United States Patent Application Publication US 2023/0272435 A1 - sequence listing, part 2

SEQ ID NO: 5394 - protein, 530 aa, synthetic construct
MIAAIYSRKSKFTGKGESIENQIQLCMDYAKNLGINEFLVYEDEGFSGKSMDRPKFKEMLKDAKDKKFNYLICYRLDRISRNVSDFSTLIEDLNKLNISFVSIKEQFDTSTPMGRAMMYISSVFAQLERETIAERVRDNMYELARTGRWLGGMPPYGFISTQINYYDENMNQRKMYKLKVDEDTIEIVKLIFDKYLELRSLSKLYKYMYENGIKGTRGGNLDPSALSLILKNPAYVKADKNVVDYLRKSNIDVMGDIDNIHGILTYAKNTDSPIAAVAKHKGVIDSDKWIEAQRLLNANKAKAPRAGTGSKALLSGLLKCSKCGSNMRITYKNSKSGTIYYYICGTKKSLGVSACDCRNIRSDKAESKVIDELKNKSIKSIMSSYKDSKLENSKNSKNIKTEINSINNQIKEKETYIDNLVMQLAKVTESSASTFIINKLESLNNDLSNLKSQLESLNTMSMENKQVDININMLIDNLNKFNKEIDTSDINKKRLLLSTVVDYMTWDSDTDTIKVNLIGINSSNTIASGK

SEQ ID NO: 5395 - protein, 530 aa, synthetic construct
MIAAIYSRKSKFTGKGESIENQIQLCMDYAKNLGVNEFLVYEDEGFSGKSMDRPKFKEMLKDAKDKKFDYLICYRLDRISRNVSDFSTLIEDLNKLNISFVSIKEQFDTSTPMGRAMMYISSVFAQLERETIAERVRDNMYELARTGRWLGGMPPYGFISTQINYYDENMNQRKMYKLKVDEDTIEIVKLIFDKYLELRSLSKLYKYMYENGIKGTRGGNLDPSALSLILKNPSYVKADKSVVDYLRKSNIDVMGDIDNIHGILTYAKNTDSPIAAVAKHKGVIDSDKWIEAQRLLNANKAKAPRAGTGAKALLSGLLKCSKCGSNMRITYKNSKSGTIYYYICGTKKSLGVSACDCRNIRSDKAESKVIDELKNKSIKSIMSSYKDSKLENSKNSKNIKTEINSINNQIKEKETYIDNLVMQLAKVTESSASTFIINKLESLNNDLSNLKSQLESLNTMSMENKQVDININMLIDNLNKFNKEIDTSDINKKRLLLSTVVDYMTWDSDTDTIKVNLIGINPSNTIASDK

SEQ ID NO: 5396 - protein, 510 aa, synthetic construct
MIKTCIYLRKSRSDEECEKQGEFETLSRHRSTLLKLAKEQNLDIIEIKEELVSGESISYRPKMIELLDEVKNGLYDSVLVMDIDRLGRGNMQDQGLILETFKKSNTKIITPRKTYDLNNEWDEEYSEFEAFMARKELKLINRRMQRGRVKSVEEGKFIASKPPYGYKFIFDESGKKSMIIDNDKAEVIKMIFDLYVNKHYGGVKISSHLNSLGLKTSTGRTWYPKVVRDILKNKTYAGYVVWNKVDRGKNNSRTRPVDEHIEAKGIHEPIIDESIFIEAQTLFKNSSIPSTKKNTSITNPLAGLIICSECGHKMIAQQSTYKNNELVKFLKCLNCGKNRGSKLSIVEKEIINELENWIASYQVSIKNLESPKNNNSNLESYYSIIKSLDCEYKTLLKQKENLHNLLEQDIYDVDTYLDRSKVLADKIDLNRDNLTQAKKDLKKEKESNFSISDILPQVENVLELYYQSDNMQERNDLLKEVIDYIEYSREPKKRLSKFNIKIYPRLRYNK

SEQ ID NO: 5397 - protein, 505 aa, synthetic construct
MKTCIYLRKSRADLELEKNGEFETLTKHRSILLKTAKELNLNIIEIKEELVSGESIDSRPKMLELLNEVENKKYDAVLVMDIDRLGRGDMQDQGLILDTFKTSNTKIITPRKTYDLQDEFDEEYSEFEAFMARKELKLINRRLQRGRIRSVEDGNYIGSAPPFGYDILKKGKERTLVPNSDADAVKLIFDLYVNNSIGARKIAIRLNYLGYKTNTGKEFYPSAVLNILKNKVYCGYVQWRKKEEKKSKDPNKKTDVRTRPIEEWIEAKGKHTPIISEELFNQAQLILKGKYHTPYHLDGITNPLAGIIKCGKCGGSMVYRTYTTQSPHIICYNACGNKSSNFKYVEEKLLYSIKNWLFNYKLEFASNDLDNNKSTKDIHLKLIKSLQSELKTLESQRDKLHDLLERDIYDLDTYMKRNSILSKKIEDLNKSLLKANEDLFLDRQREIAKNNIIPSFEEVLELYPYLEDVTLKNQMLKSILKCAVYIKEKNQSKDNFSLVIHPKID

SEQ ID NO: 5398 - protein, 517 aa, synthetic construct
MTTSKAVAYARFSSDNQRDESIDAQIRAINEYADKNNIQVVKIFIDRAKSATSDKRPEFQNMIKFCEADTTGISMVIVHKLDRFSRDKYDSAMYKQKLKVKGIRVVSVLENLDNSPESLILESVIEGMAQYYSANLAREVAKGQKENALKALHNGGDAPLGYDVAHDKTYTVNEEEAQAVKIIFDRYITGYSYSKIIDELNDLGYKTKRGNKFGKNSLHGILNNEKYTGVYVFNKTQRKGVNGKRNGHKQKNEEEIIKIEGGMPQIIDKEVFQQAQEMMQKRKKTPGAHKATTNYLLTGLIKCGECGHSFQGNKRKDAYGNDYISYRCGCRKQKRACDNREIKRDYLEEFILQELEKNILNDEAIPVLSKVLNEKMNDKNESNEELLKSLEQKLDKVNKEISNILNAIMNGIVNNMLKDKLDELEQVKLNLDLKMNELKIENKVVDDVCVTEDQIRSMFSRFKEFVLERNIPECKKFIGDYIKEVIVYKDHVEVVFNVVFSFSKNKVAHNLYITKLR

SEQ ID NO: 5399 - protein, 530 aa, synthetic construct
MIAAIYSRKSKFTGKGESIENQIQLCMDYAKNLGVNEFLVYEDEGFSGKSMDRPKFKEMLKDAKDKKFDYLICYRLDRISRNVSDFSTLIEDLNKLNISFVSIKEQFDTSTPMGRAMMYISSVFAQLERETIAERVRDNMYELARTGRWLGGMPPYGFISTQINYYDENMNQRKMYKLKVDEDTIEIVKLIFDKYLELRSLSKLYKYMYENGIKGTRGGNLDPSALSLILKNPAYVKADKSVVDYLRKSNIDVMGDIDNIHGILTYAKNTDSPIAAVAKHKGVIDSDKWIEAQRLLNANKAKAPRAGTGSKALLSGLLKCSKCGSNMRITYKNSKSGTIYYYICGTKKSLGVSACDCRNIRSDKAESKVIDELKNKSIKSIMSSYKDSKLENSKNSKNIKTEINSINNQIKEKETYIDNLVMQLAKVTESSASTFIINKLESLNNDLSNLKSQLESLNTMSMENNQVDININMLIDNLNKFNKEIDTSDINKKRLLLSTVVDYMTWDSDTDTIKVNLIGINSSNTIASGK

SEQ ID NO: 5400 - protein, 509 aa, synthetic construct
MKTCIYLRKSRSDEEAEKQGEFETLSRHRSTLLKVAKEQNLNIVEIKEELVSGESIAYRPKMLELLDEVKNGFYDSVLVMDIDRLGRGNMQDQGLILETFKKSNTKIITPRKTYDLNNEWDEEYSEFEAFIARKELKLITRRMQRGRVKSVEEGKFIASKPPYGYKFVFDESGNKSMVIDEDKADVVRMIFDLYVNKHYGGVKIATHLNSLGLKTTTGRTWYDKGVRDILKNKTYAGYVVWNKVERGKNSSKTRPIDERIEAKGVHEPIIDESIFLEAQSLFKSNFIPSTKQNSTITNPLAGLVVCSECGHKMIAQQSTYKNKEIVKFVKCLNCGKNRGIRLDILEKDIINELADWVDAYNLSIKDLDSNETKNPNLESYYSIIKSLESEYQTLMKQKENLHNLLEQGIYDVDTYLDRSKILTDKIDLNRSNLSQAKKDLENEKESVFSIADIIPQIKKVLELYYQSNDMQERNELLKEVIDYIDYSREPKKRTSRFNIKIYPRLIKNK

SEQ ID NO: 5401 - protein, 530 aa, synthetic construct
MVAAIYSRKSKFTGKGESIENQIQLCMDYAKNIGINEFLVYEDEGFSGKSMDRPKFKEMLKDAKDKKFDYLICYRLDRISRNVSDFSTLIEDLNKLNISFVSIKEQFDTSTPMGRAMMYISSVFAQLERETIAERVRDNMYELARTGRWLGGMPPYGFISTQINYYDENMNQRKMYKLKVDEDTIEIVKLIFDKYLELRSLSKLYKYMYENGIKGTRGGNLDPSALSLILKNPAYVKADKSVVDYLRKSNIDVMGDIDNIHGILTYAKNTDSPIAAVAKHKGVIDSDKWIEAQRLLNANKAKAPRAGTGSKALLSGLLKCSKCSSNMRITYKNSKSGTIYYYICGTKKSLGVSACDCKNIRSDKAESKVIDELKNKSIKSIMSSYKDSKLENSKNIKNIKTEINSINNQIKEKETYIDNLVMQLAKVTESSASTFIINKLESLNNDLSNLKSQLESLNTMSMENKQVDININMLIDNLNKFNKEIDTSDINKKRLLLSTVVDYMTWDSDTDTIKVNLIGINPSNTIASDK

SEQ ID NO: 5402 - protein, 510 aa, synthetic construct
MIKTCIYLRKSRSDEECEKQGEFETLSRHRSTLLKLAKEQNLDIIEIKEELVSGESISYRPKMIELLDEVKNGLYDSVLVMDIDRLGRGNMQDQGIILETFKKSNTKIITPRKTYDLNNEWDEEYSEFEAFMARKELKLINRRMQRGRVKSVEEGKFIASKPPYGYKFIFDESGKKSMIIDNDKAEVIKMIFDLYVNKHYGGVKISSHLNSLGLKTSTGRTWYPKVVRDILKNKTYAGYVVWNKVDRGKNNSRTRPVDEHIEAKGIHEPIIDESIFIEAQNLFKNSSIPSTKKNTSITNPLAGLIICSECGHKMIAQQSTYKNNELVKFLKCLNCGKNRGSKLSIVEKEIINELENWIASYQVSIKNLESPKNNNSNLESYYSIIKSLDCEYKTLLKQKENLHNLLEQDIYDVDTYLDRSKVLADKIDLNRDNLTQAKKDLKKEKESNFSISDILPQVENVLELYYQSNNMQERNDLLKEVIDYIEYSREPKKRLSKFNIKIYPRLRYNK

SEQ ID NO: 5403 - protein, 555 aa, synthetic construct
MCVAIGYMRYSSKLQGAGSTIHRQKSLINKWVEDQKTHHGKVYEVKFYTDKGVSGWTGENLLAGALGRLIEEVEAGGYPEGTPIILESIDRLSRQGHEEATAILRRLTSTGCVVHSILDRQVIKRSDLKTFIGAMQIIAVAERGREESDIKSERVSSSKERNYELAKLGKKLVTRNLPGWIYLDQKGKMQIDPAKQKLVQEIFEMRLAGHTYQAIAETMTNRGEPVLNERKGAQRWLPNSIRTLLHSRSVIGVLPASKVNDKYKEIEDYFPSAITKDLFYAVNDLNVPAVRSREKKQYPETVFLFKGLVKCRYCKGNVFLNGAKPGYWGRIRCIGRHDKVCDAPSLPRYDFEQSLITRMFPLLKSMDVSTEENPVAVLQAKIDHLTNILEGYYDDLEEIPREDKPRRKSINERISKRANEKEEYERQLVVVRRKMEIRTENTLLDLNYDDYTDRLKMQLVISRNIERIVLDSLFDKVHIKLVNGNALMNFPIYGDVDGSKLVITAKENTGITDVELILGLDEAMPTVYNLAPSSGENLDDREFPEVEPDYPNTDY

SEQ ID NO: 5404 - protein, 668 aa, synthetic construct
MKKEYNTSIVGRLDRQEENMSIQANRKTALYCRLSRDDELQGESNSITNQKKILSQFAKQSGFFRCEFFIDDGYSGTNFDRPEFQNMITRVANGEIGTVIVKDLSRFGRNHLHVGIYTTEFFPKHNVRFIAINDNVDTFTTDMETDISIPIKNIINEIYAVDTSRKIKAVYRAKGLEGKHTGSHAIYGYKKDPEDKDKWIIDEEAAKVVKRIYSLVVSGLGPYQIADLLYKEKVYSPSYYMAMNGYGNRVNKEFDTPYRWWGTSISCIVRREEYLGHTVNFKTIKPSFKDKRRYTNKKENWAIFENTHEAIVDKETWDIANALLKTTRRQSREGTVNPLTGKLFCGDCGEKLYNSRGINRKGTGHYKEDVRYDNYVCSTYQKHRNECSAHYIRTKVVRELILEALKDISKYIENNEEEFKNIVISARLEEREKSQKENIKKLKADKNRLSVIDRLFVKLYEDNASGRINDETFNKIAVQYTEEQKTLNTEIVELEEVTEKLQSVSDNTEQFIKTIKSFTDFSILTTSMINQLIDKIIIYQKQKLKRYKFTQRIDIYFNFIGKFEIEKEDEIKEDTYIEKTEDKKYIHKDSRFLPITEYLKGQDREIELDFSKVEELIGRKLCKSARKYPSYWYASEDRPMGNSIYNAGYDIVKVDVKKETIRLINYDK

SEQ ID NO: 5405 - protein, 612 aa, synthetic construct
MRNFEKITALYERLSRDDELQGESNSIINQKKILEEYASKNNLSNIIHFTDDGISGTQFDRPGFMAMMNGVNQGNIGCIIVKDMSRLGRDYLKVGQCMEILRQKGVRLIAINDNVDSFYREDDFTPFRNIMNEWYARDTSRKIQSTFRSKGESGKHTASTPPYGYIKDEKDKNKWIVDEKAAEVVRRIFNMTMQGNGPYRIAKILESEKVDIPAYHQQKLGYGLYQSKNFEHPYRWCSSTIASILKKQEYLGHTVNFKTRKHFKDKKSKYVSEDNWLIFENTHEPIIDQETFDNVQRIRGNVKRYPDGWGEYHPLTGLMHCADCGSKMYVHRTSNYKNIPYYTCSAYTKTPCGTLCPSAHRIKAEAVLNLIRETLKDIKKYLNEDNEAFIRSIQNEMEEKEKIEIEKKRTRLIDSKGRLQELERLMCRIYEDMILNKIPNSRYEILNNQYETEQITLSKEIKDLEQQVSRYEKETDRAKKFISLISRYENFDELTTTMINEFVEKIVVHERDRKGSQTSKQKIEIYFNFIGNYELPQAELSDEEKQKLEEEERKIKKRKDKLHQNYLKRKASGKQKEYEDKYKARREQKKQEKIKVLKRVGIPVSEYIKTNI

SEQ ID NO: 5406 - protein, 481 aa, synthetic construct
MIATNKVAIYVRVSTTNQVEEGYSIDEQKDKLSSYCDIKDWNVYKVYTDGGFSGSNTDRPALESLIKDAKKRKFDTVLVYKLDRLSRSQKDTLHLIEDVFIKNEIEFLSLQENFDTSTPFGKAMIGLLSVFAQLEREQIKERMQLGKIGRAKAGKSMMWAKTSYGYDYHKETGTVTINPAQALTIKFIFESYLRGRSITKLRDDLNEKYPKHVPWSYRAVRTILDNPVYCGFNQYKGEIYPGNHEPIISKEEYDKTQSELKIRQRTAAENVNPRPFQAKYILSGIAQCGYCGAPLKIMLGVKRKDGSRLKKYECHQRHPRTLRGVTTYNDNKKCDSGFYYKDKLEAYVLKEISKLQDDADYLDKIFSGDNAETIDRESYKKQIEELSKKLSRLNDLYIDDRITLEELQSKSAEFISMRGTLETELENDPALRKNKRKADMRKLLNAEKVFSMDYENQKVLVRRLINKVKVTAEDIVINWKI

SEQ ID NO: 5407 - protein, 481 aa, synthetic construct
MIATNKVAIYVRVSTTNQVEEGYSIDEQKDKLSSYCDIKDWNVYKVYTDGGFSGSNTDRPALESLIKDAKKRKFDTVLVYKLDRLSRSQKDTLHLIEDVFIKNEIEFLSLQENFDTSTPFGKAMIGLLSVFAQLEREQIKERMQLGKLGRAKSGKSMMWAKTSYGYDYHKETGTVTINPAQALTIKFIFESYLRGRSITKLRDDLNEKYPKHVPWSYRAVRTILDNPVYCGFNQYKGEIYPGNHEPIISKEEYDKTQSELKIRQRTAAENVNPRPFQAKYILSGIAQCGYCGAPLKIMLGVKRKDGSRLKKYECHQRHPRTLRGVTTYNDNKKCDSGFYYKDKLEASVLKEISKLQDDADYLDKIFSGDNAETIDRESYKKQIEELSKKLSRLNDLYIDDRITLEELQSKSAEFISMRGTLETELENDPALRKNKRKADMRKLLNAEKVFSMDYESQKVLVRRLINKVKVTAEDIVINWKI

SEQ ID NO: 5408 - protein, 594 aa, synthetic construct
MTRRKLYSYVRWSSDRQAKGTSLERQTNKAKEFATLHNLELVELLDAGLSAYRGKNTTQGALGGFIQAVESGAIPNDSYLFVENLDRLSRQDILTANKLFSHLLELGLTVVTGMDGKIYTKESVTANPTDLMLSILLFSRANEESATKQKRVYGNIKALVERHKAGLPTTIKTAGSHVWWTDASGDKHTAVKPHPEYWEPARKAVELFLEGYSAHAVCDYLNEHYTAPPVRVTKATNTQENGGKWSYPLLRRMKTHRALIGERTINAGGKGIQGGAVYTLENYYPALCSPTEFALLQDLNENNKLTQGPTKTRITLLSGLGVLKCGHCGGAMTFMIGANSKIRYMCSNGKDKIGSCKSWSVSLDIVERTLVPALVRGYMEYATGGGAKGDDIKASIEATQAALQELESQIDNITTAITLGGNLAPLVERMGVLSKEKDSKLVELDRLARLSLLSESEGSAIEKITDFILQIRPAVLADVNHPLRLQLREAVRAVIELCTLTKRADRGLEIEYVIKGAPHRIRYTFKATTFGNYTEVTADLDEHGKPLAYPDTEEGLRLLQTRQQMEAELFKKVDQIQEEMKLPPIDGGQLWARR

SEQ ID NO: 5409 - protein, 532 aa, synthetic construct
MPVKNTLPRAFSDVFRDDETINVYSYIRFSSKAQSLGFGEIRQLEQLNRFFEQYPTARQVERYEDLGVSAFRGKNLKSGQLAKFVGRIKSKEILPNALLLVESFDRISRMGGYDALELIISIIQSDCAIYTLFDNRLYSKRKKDSSVDISLIQNILERANDESKSKSERISDAKARNLEKGENGGIITKRCPFWISFVDDKFVLNEHAKAVKRMTELCFDFGFQSIAKELNKENHPKKYTDSTIGKVLHKHAIYGSFLAMKNDENGNRTIVNKEIRNYYPAIISESEFHRISEKLKERQDPSLAGRKAQEFRNILRGLVFCKCGSTFRFHAQKSLYVDLVCHSSTLGQCKYALPGKGIRHRYARIEEIFLAYQSLIPFHKIIVKNEDIKALEKEHQEILGQIIIKEKALANNFSILEKSSDSAQKYITNRINEVSQELDKLKADEHRLNLKINSLHLATKSDLKSIEIFRLLITEKGRIRINNFLHSQKIKLIITPVQKKYFALDIYHDDKHIDTIDVTPDGYTAHHKPHLK

SEQ ID NO: 5410 - protein, 518 aa, synthetic construct
MPKAISYIRFSTKIQSVGDSTKRQSKYINDWLKRNPDYYLDESLRFQDLGISGFSGANAKSGAFGEFLAAVESGYIEAGSVLLVESLDRVSRQDIDTAGEQLRKILRSGVEVVTLVDNEWYTKESLKDSLSMIKAMLVMERAHEESAMKSTRLRSVWAAKRERAAKGEIMSKRCAAWLKVSEDRSHFEFIPENVKAVQRVFQLRLEGLSHVKIAKQMNDEGFSTLNQFKSVTGGWSQSSVTELLSNRSVIGFKVPSKSMAVKGVSEIPNYYPSIITDEQFYAVQQLKQGSGRKPSSDLPLLTNLFKGVLRCSECGFIVVVAGVSAKRSGIYKCSMKSEGRCNSVGFSRLQTDRALVQGLLYNTNRLSLNRDNGSAIGAIQSELQHLQKQRERLIKLAMLADDTESMAKDLKDLNSQIKDAEKAVSEVHQREQSSQLETISHLDLTVKKDRIEAQIIIKRIVKEIRLNTAQKKCDVFLHNGLKLLNFPLDRVVDGEIFLEVLPVLEADEFDFDTYRMIE

SEQ ID NO: 5411 - protein, 537 aa, synthetic construct
MKQQIYNTALYLRLSRDDELQGESSSITTQRSMLRLYAKEHHLNVIDEYIDDGWSGTNFDRPSFQRMIEDIEAGKINCVVTKDLSRLGRNYIMTGQYTELYFPSHNVRYIAIDDGVDSEKGESEIAPFKNIINEWVARDTSRKVKSAFKTKFAEGAHYGAYAPLGYKKHPDIKGKLLVDDETKWIIEKIFSLAYQGYGSAKITKQLRAEKVPTASWLNFTRYGTFAHIFEGKPESKRYEWTIAHVKAILKSEVYIGNSVHNMQSTVSFKSKKKVRKPESEWFRVENTHEPIIDKEVFYRVQEQIKSRRRQTKEKATPIFAGLVKCADCGWSMRFGTNKTNKTPYSYYACSYYGQFGKGNCSMHYIRYDVLYQAVLERLQYWAKAVQQDEEKVLNKIKKAGNAERIREKKKKASTLKKAENRQNEIDRLFAKMYEDRACEKITERNFVMLSSKYQKEQIELEQQITSLREELSKMEQDMIGAEKWIELIKEYSVPKELTAPLLNAMIEKILIHEATTNEDNERIQEIEIYYRFIGRVE

SEQ ID NO: 5412 - protein, 450 aa, synthetic construct
MKRVALYMRVSTEQQAKHGDSLREQKETLYEYIEQHKDLKVVNEYVDGGISGQKINRDEFQKLLQDVKENKIDLILFTKLDRWFRNLRHYLNTQEILEKHNVSWNAVSQQYYDTTTAYGRTFIAQVMSFAELEAQIDSERIKAVMANKIAQGEVVSGKTPLGYSIENKKLVINDDAPIVIDIFNYFLSSGSLRKTVYYLGSQYGIVRDYQSVKNMLTNKKYIGELRNNKNYCPPIIDKKLFYAVQKALPKNLKTNAKRDYIFKGLLKCSDCQGSVAGQTIKARYKKKDGTESIYERTCYRCVKRRNNKLRCTNKRAFYEKNLERYIFEATKQKFEQIQINYSKKQPKIIKKKNSKKNIENKLDRLKKAYLNEVIDLEEYKKDREALMKELNEIEVEPAKIDIKNVEFILSKEFDEIYKESSEEEKNALWRSIIDNIIVFPDGNITINFLI

SEQ ID NO: 5413 - protein, 520 aa, synthetic construct
MKKAVYCYARVSSRGQAKDGYGMSRQQEMLRDYVAAYDDSQHNRGYELGDISWLYAEGVSAYSGKNIEDGSVLKTFIDDVLQKKITNSVLVIENLDRFSRAAPNRAAGLFLSLINAGCDIHEVETEMIHHQYSDLNIISGGLQRAHNESKRKARLSIKNWDERIKNTIDGTSVLTHRVPSWIEVKNNKYVLKKGESEKYNLIFKMYADGFGPAAIRDELKKRGMQINEREPTINHLMKIIKDQRLIGRFNSTGRKILDGMSIYPVVVEPELFEAVNDLRKQRNPLGKINVKANNLFAGLCICMNCGRYVQVNSVDKKGDTYFRCGGSLVKIDKCKERGFKYKIVENALLEHLRNFDFSMLRSDDNDIQVKINYLSMELVSNEKYSNEILADLEKEDIPDPNDRRILKNIQRRISEIRNEITILKQSNIGYETFNDLKDSYTDDLLDPKNTKLRLDFNVKVKRVIKNIKMKRYDNTIMLVVSYVGVNEKQAMVINSKTGAVVFMAVQNDDLKSIEYLINDN

SEQ ID NO: 5414 - protein, 516 aa, synthetic construct
MSNNKALAFLYIRFSTKKQEQGDSIRRQIDAAEAWCKEKDIELSAQTFEDLGVSAFKEGGKRPALEDMLFAIEQGRIPRNSYLLLEDHDRLSRRGWLHTQTLVHKVVKLGVKIVMLRSRTVYDQSNINNISDNIMLMFSADRAFQESERKSQLIKASRNNARKNREVTGKLPAWIVRNGDEFIFNDKLTTIQELIDCKLSGKSHQATAKHLNSLGMTTGSGSVWSASGVRAIIQNHALYGAKAYFDTGADGRMNAKPIEIVPDIFPQLISFQQYQSLNVKKASGRTSKRGAFTQLLKCGSCGSAMTTRSSNYKGQPRTYKMCVRATEGSCSQVERVREPERYLNDVLRKLTYQISKGAYVSRTGEYEKQLETLNETKDKLISLGLTDALTDVYVDMNRVRELIEDSKIEDQANIEPDVDFAYVCDIENIEERNTELRKLLSKIVFYCISKRGQTSQWKVVIHQVNGFKISFLLDQQYGFGNTNVKFVADKQQYIKDTQVDMYAWEDEYADATLGNV

SEQ ID NO: 5415 - protein, 599 aa, synthetic construct
MKKAYSYIRYSSPQQASGDSYRRQLAATQAYCDANGYELDTDLSIYKELGVSGFKGDQEHLKQFINDCETGKVKKGSLLVVENLDRLSRQAINVAMRQFLSLLEYVDIYTLQDKKHYSNNDGRDSENQLLDIMTSLIIMSRAHEESLTKQKRLKESWANQRKNAHKIKMSGCYPHWLVRSDDKTEFYVKEDRAQIIVDMFDMCINGLGATQIVRSLNNNIEKYPPPSTKKEFWVRSTVKRLLSDRRLLGEHQLYKGHHAKREPVGEPIKDYFPQVIDEKTFVNAQISLKSRKIGAGKVKADSFSNIFRGFLRCGHCDSPVEYVNKAAKQASTLYLTCSNAKRGGDCNHSKHYRYLPLEHMLIHLSTANGFLPKPEKPSDLEQQLEIIKEKKEQANEKLSVLLEKNFTAPIILEKIEELTNDVEQYSYQIAEIEDKLLSIKPDYTYEDLYHDAVLESDLLKKFSNRSMFNSYLRKKIDSAYLYSIGLFPCIAFKMNNKSVHVLVLDERYNFGGCSLPNEKDKLIRLNGEEIEAIDEMIWKMFGNAIDFINGIDEENEELNKIIRKISLLMSKFIMDNKNKELISEFNSFLNTSIEKSYQN

SEQ ID NO: 5416 - protein, 573 aa, synthetic construct
MYQSKSTKQTKAYSYLRFSTLRQKEGDSERRQLHLAVEYANRHGLALQGDTLSDLGVSAFRGKNKRDGALGRFIDAVKSGDIDKGSWLLVESVDRISRQEVFDAFGLFSELITNGITVVTLQDNQVYTRESLKGGQIYMLIAKIQTAHEESEKKSKRTAAAWEAAREGAYKGKKIRNLKPPSWLTWDKSIDAYIVIEEKADDVRFIFELAVGGMGGGLIAQKLNARGTPMLTGKPANWSGSNVLGVLRNRAVLGEYTPMRKCPETGKRKPLGNPIPDHYPAIISKEDFYTVVNQIADRNNRTVGYRNDTMKNLFSRVLRCIECSAPMVVKQKNSKALIERYGKRYYIGCSRKLENNCSAKAVHYEPMEIMLMEALSFLPSIINLHTDQGKKITELKRKLVSIEAEIIEHDNNVSVFMDLMAKRPNSQVLLSQLDTLDNDRVVLSSMLRETQAEIDRLTSKSAYQDKYSASLSESNREELTHNFDARVKYNEHLRSILGSINANFLSDDEVMFYCKTEDKENVCCITAQRDFSKWYIISSAGVIAEKDEGNDVVVTTIDKTFLSESELFGGLFV

SEQ ID NO: 5417 - protein, 547 aa, synthetic construct
MRTAYSYVRLSSKKQIQGYGQERQWQAIQAAALAHGWELSEKTFSDLGVSGWKGANIETGALSQFLQCVEDGYIEKGSVLIVENVDRLSRAGVQRAVSLLMQLLASGISIYTFTDSKLYEPDSHNPLMDLMAWALSAQRAFEESERKSQMILNAKAKAREKARLTGEIITRRCPSWLRVNQDKTAFELIPERVETVRKIFDLYVNGYGTPRIGRLLTEEGRKPLTGRAWYPRSISRILQYRAVLGEYQPTLNGKPEGDAIKNYYPAIIDEDQFNEVQAVLKEGGAGKGRRGKEMRNYFAGLLRCSCGEGMHIVSSCVKGKRYYQLRCLQYRISCFGSSWNFYKLSSFVLFALRRLPILEVMGSQDNNNIKELNAKERELTFLLEDTRRQLDNTINAIAALGLNDQLQSKFRELKTSVTNIEKQLSNVKTELETSQGKLVIQKQDSEMLTGRFLELIDSTKDIDGRIKLNQVLRRYLSKIEMHADKKKEYRYIKIYRKDGDELVSIQCDHSLKGALFESKDGLETFELLPATDAKRNEISNTLLCTPK

SEQ ID NO: 5418 - protein, 664 aa, synthetic construct
MFSFDKSKFKGICVPYARFSTKGQSKIGKKSLERQIEEARRYAKSNNLYINEDLIFADKGISGFAQQGNIAKAFKKGQMQVMLALLEEVPYQEREFIYVTFHNFDRFSRMSPKQARTYFDLILQKGFNVVTTIDNQLYTRHDKDLGKMLISTIKMTTAWEESQVKSIYIKDALARKKKVVEYLYNHPSQKGKYKHIGVVQPNMPRWIDHEKIELTYTDESGSKRTDSFKKFTLNKEKAKIVNYIFDLKIQGLGYARICRRLNEEGIPTFDQGKHRIAKKWHVFAVQNLICNEMVLGHITLHTHNEEEYMCEIDKVFKKRKIKQTATEKLYNYYPAAVSEAKYLEAHKNTIQQDKPKKLGRIGERTNIFAQILLCECGGTLQYRRTKKNKKKSESVSVNEYLQCNNAFVNHKCNSQTINYTLLETAFFRYVNNIDFKKICSTTNSKHALKIIDLDTDIKELVDEIESLKLREAGLAKTYMSLASAGLDGSTALIDREKTKKEIAEKVLELENLELKKKGLEIEADKDNREFVDINDYMLNKDNYSSDEKIIIRKKINDFLHSKIEWMEVVSTERQKFVIIAFHDTVIRTFAFDDRCANDLMFNEIDVDLSGLNRVQASNLMFTLIKAIRNSLKGVEAVITKADLISYLQHIKQDYLNNIGEQASV

SEQ ID NO: 5419 - protein, 644 aa, synthetic construct
MFNFDKSKYKGICVPYARFSTDVQDEIGRKSLERQIEEAKRFSNEYGLFFDEEIAFVDRGVSGFALSGDTAKTFQKGQMQLMLELLEEIDVAEREFIYITFHNFDRFSRMSPDVASRYFEQILDKGFNIVTTIDNEVYKRNSCNLEQMIISIIHMSTAYYESEVKSIYISDSRQRKRDVIEYLYNDETQKGKHRHVGIKACCPRWIKTKDIIYEYVGKDGSVKKEALKRFEIDEERAQIINYIFDLKIQGLGNGKICQVLNEQNIPVFHSGNYTKAKYWNLSTISNYLKNENVIGHSYLYHKAKEEVFNEKTQTFSTKRVRKIATDKLYNYYPPIMSEEKFNQAKEAVKANSNKVDRSKSSEKPHMFSNLMRCSCGTRLHYKLTKKNNVKKVDDYFEYLKCERAALNDGCKGENINYKNFEAQFINFIRYIDVNEILDHANGVEAETQGLTELEEREAAINLKITGLTKTYQGLINAGVDGSDVLVELEKAKGELQEVEFEKSKLLNSMKSQTSSSSESIRQKKSALKSKVFAEKVEARKAVNELLKQKIRWMEVYATANAKFVIVCFVDNVIRTYAYQDEFATDLMFNTIKINTDGLKGYEADELMVLMIKTVRESLAGMNEVITNTDLKIKLAAVKSEYMNN

SEQ ID NO: 5420 - protein, 529 aa, synthetic construct
MKKVYSYMRFSRPEQAKGSSIDRQSQYAEQYALEHGLELDKSLTMMDKGLSAFHGVHKTKGAFGQFLSAVTAGKVPSGSVLVVESLDRLSREDPLIAQAALTDLILSGITVVTAADNQVYSREEIQQNPFKLIMSLVVMIRANEESETKQRRSNAFLKSALNQYQTNGNIRRLGADPSWLDFNKDDNTYSFNARVDVIRRILSLYNQGIGSLKIARQLTEESIPTLSGKRNAWGQTTVANIVKSHALYGMKRINVQGVDYDLEDFYPALITKSKWLALQQHRSKRSKTMHGRGEVVHLITGHGKGFTTCGYCGGGLGAQTQKQYKRSGEYSKTVTRLHCLTHKETSSCCSSVFLEPIESAVLFAACIGVEPQSLVPTVNNVNYSALVDEIDNKVKHIVEQVTAGAPWELFKDAHDKLKLEKQKLIKERDSQKPDVNQSDVQKWVNKLVELADKARANDKEARLKCRTLINSICKSIVIKLRGHDLKSEPVATITFVTDEQFEFKVGKNGAVQFVDNGMAVNRRLKPLLT

SEQ ID NO: 5421 - protein, 530 aa, synthetic construct
MNKTKVYSYIRFSTSRQESGDSVRRQLEIARNYSEKVGGVYQDRSFSDMGISAFKQKERDGLQMMLDMVEDGSIEKGSHIVIERLDRLSRQGISVTQQLITQIVQHGVLLYVAGDNMLLERDSLNDLSIVIRVAVAADLAYKESLQKSQRIKASKIAKKKDGLDGRVTKKVCPFWLKFDEKKQEYVFSDKLPTIQRIIELRQQGFGENKMAQHLNDENVPPPRAAKWSPTSLRKLYTHPAIYGAWQTTEKTEDGKYINSDLIENYYPALLTYEEFMLMNPKSKATTAKDSGLNPFKGLLRCAKCGATMSRQTSKMRNGEKYVAYRCTNAGKGIYCDAVGYRDMDKYLVAACKRLKIKKTLSSDNREKESQLRALEAKLESLQQAILTQTDITALISTSQIVERQINELKATIKPAATVTVDELYSHRDNPQSFNLLARSLIQKVEVEVKAKNRHTKTLFAKFYQHNGYVITLTVLPSGDAFYSTTDLSPIIDNEDYEEPESTEIEEHDDSIANPDYDSSSWSKPVTQRNR

SEQ ID NO: 5422 - protein, 529 aa, synthetic construct
MKKVYSYMRFSRPEQAKGSSIDRQSQYAEQYALEHGLELDKSLTMMDKGLSAFHGVHKTKGAFGQFLSAVTAGKVPSGSVLVVESLDRLSREDPLIAQAALTDLILAGITVVTAADNQVYSREEIQQNPFKLIMSLVVMIRANEESETKQRRSNAFLKSALNQYQTNGNIRRLGADPSWLDFNKDDNTYSFNARVDVIRRILSLYNQGIGSLKIARQLTEESIPTLSGKRNAWGQTTVANIVKSHALYGMKRINVQGVDYDLEDFYPALITKSKWLALQQHRSKRSKTMHGRGEVVHLITGHGKGFTTCGYCGGGLGAQTQKQYKRSGEYSKTVTRLHCLTHKETSSCCSSVFLEPIESAILFAACIGVEPQSLVPTVNNVNYSALINEIDNKVKHIVEQVTAGAPWELFKDAHDKLKLEKQKLIKERDSQKPDVNQSDVQKWVNKLVELADKARANDKEARLKCRTLINSICKGIVIKLRGHDLKSEPVATITFVTDEQFEFKVGKNGAVQFVDNGMAVNRRLKPLLT

SEQ ID NO: 5423 - protein, 566 aa, synthetic construct
MSKIIYPYIRFSSDKQAAGSSFQRQMERITDYANENGYIVNNSLKLQDLGLSAFTAKHIEKGALGAFLDGVKAGKIEQDGSAYLCIEQLDRLSRENVDDAYQVFRKILKSNVNIITLMDNKIYTKESLTDLMSIMYSLMLMAQANQESAKKSDRVLRAFDKKLDKLNEGKTVQYVGMFPGWIDNKGTKEETNFVINKKSEIVQRVFSLYINGTSMGDIARIFNEERVPQVAKKRQKNYTNSWSSAKINHLLKNRCVLGELLIRKTGDIFENYYPAIISVDDWDVVQSMMKNKKIAKSSGRRSINIFTGKMFCACCGQKYYFETDDKNTKTGKKLYYMLKCSGRRSLSCKSKSIKYDDFLDSSPNLFGMITKSKKDNSKEIDKIKLKIKEINETTKKSRDKLITLENLNDSNELDFTVYLKESSKVQKQVRENDARIASFKLKISRLSSDNKLDYFDKTDPNSVVKAKKFISDNFAAFVISSDSRFCIALYNDGQVLQFKIKNSKIEKKESQVKNIDNFESFNEFYKLKEQVLETYKNGTMDGKFIEILSATNFWGVETSEKDYSLD

SEQ ID NO: 5424 - protein, 626 aa, synthetic construct
MKPRAYSYIRYSSPQQAKGDSFRRQFAQTQKFCEENGYELDTELSVYKELGKSAFKGEQENLKRFIEDCKSGIVEKGSLLIVENLDRLSRDTINKAMRQFLHLLDYVNIYTLQDRKFYTSNDDVDNDSQVFDIITSLLIMSRAHEESQTKRKRLKESWEAKRQQIDKKKFATSYPHWLVLADDWESFSLKEDAVRAIRKIFELCVDGNGYNQILRHLNDKIEQYPTPSKRSKSGLWVRSTIQLLLSDRRLIGEMQMYKGAYKNRKPYGEPIADYYPQVIDEETFLKAQIAMQSRKVGKGKTGKYRFSNIFRGFLQCAECGNAMEYVDKGNTKKRSQKYLTCTSAKRGGSCTHSRHYRYEELELMLLHLVTENGFLPKPVEPNDLHLQVQKLKEQKVSANNKLNVLLEHDFTAPAIMTKVQELNEQIARFDAEIQTIENKLNQKTITYQYDQLVYDLIDEPNEEIKFNNRVNFNSNFSTKVQRASVQNDINCLLVEFVMENDDKHRIMLEPKYYLGACTLANGKTVHKRLHGSPSQYPDVHDDKSIILLLEKYIEWFFELKQIVTELDPALFSDIQPIFDYLMKLIKKYAARPDDFDNLFKVADVVSKLEPFVENARKYKVEQLSDK

SEQ ID NO: 5425 - protein, 569 aa, synthetic construct
MTPQIPGHKAQPQMQAISYTRFSSEIQKKGVSVQRQNGLVNDWLDRNQNYNLVASYYDEAKSAFKGEHNTDGGDLHRLIDDITNKRLFQRGSVLLVEAVDRLSRQGIVKTNQIIYAILEAGVNIVLLSDGDTVYTWEELNTNPLLSMVITMKAEQAREESAKKSKRGLNNWQNKRAAAKDGKIITRACPAWLEVNEDRTAFNKVPGHWLTVQRIFKMRNEEFLSMANISKRLNSEGVENFKGGFGKWNQSTIQQLLINPAVYGLKVISKQATEEVKATAEDIDGYYTVNGETPITKADFLQAQRQVKEWAKGRVSHNDSAIHVNLFKTVLVCGHCGSTIIQSSVTTNKMGYYVCSMRRQGRCHEAQAIRRDIVEQAIVQGLMYNVETMLKGSNIEKEELRQLEAERELTFNKREKLVDFWMSGRLSDEKYQANHDQLTATLDQIDYQLQSLRVSASAEATASRIKNLDVTKLEDRMKIQLLSKDIFKSIRLDGNKKTADIEMKAGGFRLLDYPLDRLIDGDKWIEVMMLTDTKEHTFTNEQGRELLHTAPEWVREEEKKEDGRLPVEVD

SEQ ID NO: 5426 - protein, 527 aa, synthetic construct
MKVSVWSYARVSTLSQVDGFGIQRQVQTINQFIQYLVLDHRLPFTLDTDNITQMIAEGRSAFKGKNWSPKTKLGQYREMVMNGVVTDSVLIVENVDRLVRVDPYRAVEILSGLINRGTTILEIETGMTYSRYIPESITVLTMQINRANGESKRKSIMMKKSHENRYAKVSKVRPRWFDVVEIDGIKQYRTNDTAKAIQKMYNDYVNGIGAAQIVRTYGSTDNGKQWTLVTVLRTLSDKRVADDPRYPPIIDKELYTKVQAIKANNSNSKTHQKNMLNLFTGMSRCPVCKQAIICKRNSHGGLYTVCLGKRTNKTCEARSVAYNALERPLLDAIKGLDFSEIYNREDANVTTLRDQWIQNEKDIAMFRERLGKASRHEKFAILDELEQISKEQEDLTIRLKSVDAPKDVQVTYNDDKLDLDTEYRIELNNRLKKLIQRIDVVRVDTSKSAYTIYCNIKYWTEAITHLVIIDVESKRTGTGGTNTLTTTLRSVSSITDDFQISGNPDMEALEHWEKIFKEAVDIAVKSL

SEQ ID NO: 5427 - protein, 478 aa, synthetic construct
MNKVAIYVRVSTTSQVEEGYSIDEQKAKLSSYCDIKDWNVYKIYTDGGFSGSNTDRPALESLIKDAKKRKFDTVLVYKLDRLSRSQKDTLHLIEDVFIKNGIEFLSLQENFDTSTPFGKAMIGLLSVFAQLEREQIKERMQLGKIGRAKAGKSMMWAKTSYGYNYHKETGTVTINPAQALAVKFIFESYLRGRSITKLRDDLNEKYPKHVPWSYRAVRTILDNPVYCGFNQYKGEIYPGNHEPIISKEEYDKTQSELKIRQRTAAENVNPRPFQAKYILSGIAQCGYCGAPLKIMLGVKRKDGSRLKKYECHQRHPRTLRGVTTYNDNKKCDSGFYYKDKLEASVLKEISKLQDDADYLDKIFSGDNAETIDRESYKKQIEELSKKLSRLNDLYIDDRITLEELQSKSAEFISMRATLETELENDSALRKNKRKADMRKLLNAEKVFSMDYEKQKVLVRGLINKVQVTAEDIVIKWKI

SEQ ID NO: 5428 - protein, 507 aa, synthetic construct
MKRVISYIRFSSERQAKGDSLRRQSKMVNDWLKAHPEYYLDQDLSFRDLGVSGFTGKHLKGGLGDFLTAIEKGLVKAGDTLLIESLDRLSRQDIDIASELLRRILRAGVDIVTLSDGEHYTRESLKDPLALIKSILIMQRAHEESLRKAERIQAAWDAKKEAAKAGIKISKRCPAWLKLNDDRKTFSVIPEKVETVRRCFQLRLEGKSIWEIVRTLNDEGHQTLNQYKAGKFGQTSVQDLLKNRSVIGYFTPKGCEEISGYYPAIIDETTFYKVQQLSYARYGRKPASDKPMAVNLFKGVIRCSECGHALIITGFSDTRNGIYRCPLRNENRCSAKGLSRKQTDGTLLALLSRLDRFDSDMTNTIDTLKLHREHISSNIEKLVQLSLEIEDLSAITSKLRQLKNELSQVDADIEKETQRLKSIDVGCLSDCDLTTKAGRIEAQLIIKSAVKEVVLNTAKRRCKVTFHNGKTITLPITENPSDNVTEAIQSLSEVTERGLIDVDEVII

SEQ ID NO: 5429 - protein, 581 aa, synthetic construct
MPQLYSYIRWSSDRQDKGTTKSRQVAAAKAYAEEAGLELVEIIDPGVSAFRGKNRAGKLGDFIDAVKNNAIPSDSWLYCENLDRLSRDQVDEALRLFLELIGLGLTIVTGMDRKVYNRESIRQNPTDLMISILMFIRGNEESETKSHRTIGNVVALVERHKNGLPVNIKSVGRHPFWIDDSGSQYEAVKKHPVYWSIAREALDMFISGHGVYSVKRALDKKYPNGLRGKEWDYQVLKKMRDNRALIGERTIKVDGQSYKLCNYYPALCKDETEFLILAEKKKQNKFISKKCTTDKIRLLSGFSILRCSKCGGTMHSFMNKNVHRYICTNGTHKQKNCSGWSVIGSLVEHCTMIALLIGYINQSRKNGCDTTSIDEDIINKQSVIEGLNSKITNLTLAISIAKDVNELATLLQSLNTQREKLLVEIEKLKERSVSLKAKGSFEIEITDFLILIQYATFKNLEDENRNKIRKVIHSIIEFIVIDKTDSCITIYIKCYGIDEVFIFGGIQRKPYWRFDIGIINDSKLQMISNYDKNIGRTKERKNKEYLDGLRESYQGLYESAVLMLNEMGYPDINGALFWPNR

SEQ ID NO: 5430 - protein, 452 aa, synthetic construct
MKAAIYIRVSTQEQIENYSIQAQTEKLTALCRSKDWDVYDIFIDGGYSGSNMNRPALNEMLSKLHEIDAVVVYRLDRLSRSQRDTITLIEEYFLKNNVEFVSLSETLDTSSPFGRAMIGILSVFAQLERETIRDRMVMGKIKRIEAGLPLTTAKGRTFGYDVIDTKLYINEEEAKQLQMIYDIFEEEKSITSLQKRLKKLGFKVKSYSSYNNWLTNDLYCGYVSYADKVHTKGVHEPIISEEQFYRVQEIFSRMGKNPNMNRDSASLLNNLVVCGKCGFGFVHRRKDTVSRGKKYHYRYYSCKTYKHTHELEKCGNKIWRADKLEELIIDRVNNYSFASRNVDKEDELDSLNEKLKIEHTKKKRLFDLYISGSYEVSELDAMMSDIDAQINYYEAQIEANEELKKNKKIQENLADLATVDFNSLEFREKQLYLKSLINKIYIDDEQVTIEWL

SEQ ID NO: 5431 - protein, 507 aa, synthetic construct
MKRVISYIRFSSEKQAKGDSLRRQSKMVTDWLKAHPEYYLDQDLSFRDLGVSGFTGKHLKGGLGDFLTAIEKGLVKAGDTLLIESLDRLSRQDVDQASELLRNILRSGVDVVTLSDGEHYTSESLKDPLALIKSILIMQRAHEESLRKAERIQAAWDAKKEAAKAGIKVSKRCPAWLKLNDDRKSFSVIPEKVETVKRCFQLRLEGKSIWEIVRTLNDEGHQSMSQYKPGSFGQSSVQDLLKNRSVIGYFTPKGCEEIAGYYPAIIDETTFYKVQQLSYARYGRKPASDKPLSVNLFKGVIRCSECGHALIITGFSDTRSGIYRCPLRNENRCSAKGLSRKQTDGTLLALLSRLDRFDSDMTNTIDTLKLHREHISSNIEKLVQLSLEIEDLNAITNKLKQLKNELSQVDADIEKETQRLKSIDVGCLSDCDLTTKAGRIEAQLIIKSAVKEVVLNTAKRRCKVTFHNGKVIDLPITEDPSEDVTEAIQSLSEVTERGLIDVDEVII

SEQ ID NO: 5432 - protein, 547 aa, synthetic construct
MKLLVTYIRWSTKEQDSGDSLRRQTNLIDAFYSKHKEEYYLLPAHRYVDKGKSGFHQQHKAQGSDFRRMFENVMSGAIPEGSLIVVENFDRFSRADIDTAIDDVRQILRKGVSILTLGDGELYDKSALTDPVKLIKHIIIAERAHQESLVKQKRIAQVWNHKTQLARELKKPMGKQAPGWLELSEDGSHYIVDEDKASLVNIIYDKRLSGMSMFAICKWLNEQGYPTINQRKVRISKTKKPDGNWSALSVKHILTSRSVLGYLPAKISTEDRKTVLREEIESFYPQIVTDSKFYAVQQLLEETGKGKTSSGEHWLYVNILKGLIRCKCGLVMTPTGIRKPVYQGTYRCNGNKESRCSYGTVSRKLLDTQLCSRLFSKLSQLHDEATDTAKLDELQRRLNTVDGELEKLTETLIQLPNITQIQEALRVKQEEKDELIVQLSREKARVKSVSSLDLSGLDMESVEGRTEAQIIIKRLVKEIVVSGNEKLVDIYLHNGNMIRGFPLDGKDDHTLTLEEATDEMQSLDDMLIFGEPVTRIYPAGDMEEVDA

SEQ ID NO: 5433 - protein, 653 aa, synthetic construct
MFDYDKSIFDGICIPYARFSTTEQDKVGRKSLERQLEEAKRYASQNNLYISDDLIFTDKGVSGFAKQGQLSKTFEKGQMALLLDVLEDVPFKERENIYLCFHAFDRFSRQHPEVAYEQFSRILKRGFNIVTTIDDCLYSSKEADLESMLISIIKMSSAHYESEVKSVYVSDAHRRRRETLEYLYNHPTQKGKHKHIGLKQSTTPRWILESEIIYDFVDENGVARKDSFSEFSLDEEKALIINQIFDWKIQGLGHTKICQLLNQKKIPTFEDGNCRKAKQWHTFAISNLFKNKSTIGTFTLKTVEDQEYFCESERIFKTRSNKVDATSEMENYFPAVVTVEKYETALKVIAMNNKGEKVSEPEDKTHVFSKVLRCTCGGRLVFKGTRKTGKSGKSDWFEYLRCENAILKDGCDAENIIYKDFEMAFLRFATSSNYTVFSTTQSKLKTKLKRLSIKQSRLNSEKEQLLLEANGLKKTFESIVTQNLDATLLLDSISKNEESLHTVQNELVKIDEQVKGVEREYEKSGKPIDKRTIKKELRSEDYSKRLLMRKAVNQQLRQNVVHMEVCSTKLLKFVIVCFDDYVIRTYAYQDEFSSDLMFNSIKINVENHDESEAYDLIMHLFKEVRISLSGGNAVITNFDLKVHLSRIKEKYLK

SEQ ID NO: 5434 - protein, 673 aa, synthetic construct
MIGAEALREEIFQYDKTKFKGICVPYARFSTKGQSKVGKKSLERQLSKAREYAKRNNLFINEDLIFTDKGVSGYSNQGELSKAFKKGQMATMLLLLEEVPPEERDNVYITFHNFDRFSRMSPDAAQAHFNKILNRGFKIVTTIDNQLYDRRDKGMSNMLISIIKMTTAWQESLNKSIYITDALSRKKKVIEYLYNHASQKGKHKHIGVVQPSIPRWIDQESITYDYTDVNGSKRTDTFKKFSLNSHKAEIVRKIFDLKIAGLGYTRICQKLNNDGVEVFEQGRFKKAKKWHPYAVQNIITSDKVLGHITLKEMVTEEYHCKETDEIKTKKVKKEVTSKLENYYPAVVDEEVFRLANVLKFQEKKGKPLGRIGERTNIFATFMSCYCGATLQYSRSQINKRSNKAPVYREQLRCNNALVKNGCFDDYINYVELEQAFFKYVHHIDFREVCLVGDKSLETEIKNLQAEITYLNGQKKELKLKNSGLEKTFESAISQGLNADYVLVALNEAKKSADLIETKINDLKVRITKLQLSLDSKESDFLDIVEYSMRIKNSSTETKIMMRKKLNDFLHSKIKWMEVCSSKHSKFVILCFHDDVIRTFAYSENYANDLMFNTIKINYEVEDSQLNYELFLIYIHQIKRSLRGETEVVSNGDLIEALQRLKRKFYSGKGIDYV

SEQ ID NO: 5435 - protein, 547 aa, synthetic construct
MKLLVTYIRWSTKEQDSGDSLRRQTNLIDAFYSKHKNDYYLLPAHRYVDKGKSGFHQQHKAQGSDFRRMFENVMSGAIPEGSLIVVENFDRFSRADIDTAIDDVRQILRKGVSILTLGDGELYDKSALTDPVKLIKHIIIAERAYQESLVKQKRIAQVWNHKTQLARELKKPMGKQAPGWLELSEDGSHYIVDEDKASLVNIIYDKRLSGMSMFAICKWLNEQGYPTINQRKVRISKTKKPDGNWSALSVKHILTSRSVLGYLPAKISTEDRKTVLREEIEGFYPQIVTDSKFYAVQQLLEETGKGKTSSGEHWLYVNILKGLIRCKCGLVMTPTGIRKPVYQGTYRCNGNKESRCNYGTVSRKLLDTQLCSRLFSKLSQLHDEATDTAKLDELQRRLNTVDGELEKLTETLIQLPNITQIQEALRVKQEEKDELIVQLSREKARVKSVSSLDLSGLDMESVEGRTEAQIIIKRLVKEIVVSGNEKLVDIYLHNGNMIRGFPLDGKDDHTLTLEEATDEMQSLDDMLIFGEPVTRIYPAGDMEEVDA

SEQ ID NO: 5436 - protein, 571 aa, synthetic construct
MSRPPKAYSYIRFSTTKQAQGDSYRRQIQQAIDYCTEHNLQLDEKAIEDFGVSAFRGSNRIDGALGRFIEAVKGGAIEKGSYLLVESMDRLSRQTILKALSQFIEILNAGIVIVTLSDGEIFRVTDDGKNFDFAKLIISIVYMARANDESEMKSLRSRAAWSNGRKAARESKKVMKNARLPSWLTREGERIVPIPERTAIVSEMFEMAQSGCGYEQIAKVFLEKGYKTFGKEADWRPAGIQAVIKSRAVIGEFQPHVIENGERVPDGEPILGYYPTIVSPAVFEEVQHLIGKRSKHSGSYRKGTYSNLFSGVLRCQCGESLRYGNKGRAGSPRYYLMCPKHNTHGCSMPHLLYSKVEPQLLQAVSLLTVVMEQRKTTTEKMMALKDELATLRRELELEVKRRKKAAQSMLDNDNDADFRELFIQCKANCQALEEQISQLENELMSRELSEKTLSQNLSSEDLDSTDQRQRFNGQLKAVLREIQFSYDGYDLAAVFKDIDGEFMLEQAFEPKLVGSTVRDRDGMTLIKTIAEAPYIDANWVKDEIDEYESFQKESDSEFDDDFEDLSSEESK

SEQ ID NO: 5437 - protein, 576 aa, synthetic construct
MTKAYIYTRVSTLQQIDGFGIDRQINTLMDFLENAVLPKELGYQLDPKNYEILDSDEGLSGYKGHNFTKGSLGKFKNRVANGEITSGCLLIESVDRFSRRQGYDAIDEFTFLLKRNIDIIEVETEQIFSYRLDHKLTQLSTSIERAYQESKRKSRLITKSWANLKRKAVDEGIALKRNVPYWLILNGDHYQLNMPEVERIRAIFEDYANGKGVTAIVRDLNNIGGKYDKRVFSTNFINVMLRDRRLIGWLTGKRKKDETIADWKSREIKIYPEIVDANLFELVQRKIDANAAMKKVRTSSKQVSLFNGVARCGICNEPLVGHFTQKGSYLRCLGKRSKSGTCNSSLIRYKECEFAVISYVKNIDFKSLYGNNKNNTPAINSLQQRMTVVTAEINGIESLLYTSDNSSEIVALTKARRERVKERDKISYELTELMRTIDVGDEDFMLDLELICNHGNVELREKYNAVLKKVIKSIKIIQDNGSDDKIFIIKFEYHTDYAMHCVALNLDGSLIGYSYIEDKGELCLKSSCMDVNFKTGDITTKHAPNYIEKLGNDSNLLIVFYVQIMPDDLVMQLHRF

SEQ ID NO: 5438 - protein, 424 aa, synthetic construct
MSAHVTILRNTVLPVKFNTMNRPRLYSYIRYSSERQGKGSSIERQKSYIAEMAKQIATEYDLEIFEEYQDLGVSAYKGKNVQEGALSDFIDQVESGLIPKGSFLLIESLDRFSRQNAMQAVNLFTSLLLNGITVITGIDKQVYRQTEVNTETLQQLMFSVMLFSRANEESSTKSHRTIASALSKIRRHQERKPGDPVVAIKELGSDKWWTDSSTGYVNPHPVLFPIAKKIIQLKQDGWSNRMILQHLKNNYDGPVIGNKKSKGIWNMQHCSRILEPAIYGRKVITVNNAEYVLDDYYPAIISKDEYEALKLQVGNKGFAPNRESNPEIPLLSGIGILHCAHCSCYMVKAKSTLKNHPHAYRYQCASRDLHQDCNKWGFRASTLERTILQLIADRIFLQTKYQPSGLEGKIAVILTRHLRTAFVS

SEQ ID NO: 5439 - protein, 502 aa, synthetic construct
MTLAFSYARFSTKSQATGTSLERQLNASRVFCSERSLTLSPKGYHDLGVSGFKQVKRPELEQMLQAIQSGDIPSGSYILIEAIDRLSRKGISHTQDVLKQILQYKIKVAFVGEDAKTLNGQVLDEHSLNDLSSVILVALAADLAHKESVRKSKLVKAAKLIIRKKATEGHKVRGHTMFWIDWSDKKQDFVLNDRMKDVQTIIQLRREGQGPRKIAKTMNELGIKGPRGNLWNHMSVTIILKSPVLYGAYQTHQIIDGQKVPDVLLEDHYPALLTKEEYIKIQADSSKANKGRPSKANPFSGVLRCECGQAMMFSKRTNLDKNGDPLEYEYHYCIGSTEGRCKNKKRIRDLVPLLASIMDKLVINQTPKKNLNTELIKVTEQKIEKLNNMLVELDNPPISVLKTIQKLEQELDILLNTHIEEPVQADVKTLNSISDAQEYNQHLKRLVKNIVVYQMNGPKNLRIKVHKTDGHYQNFLVKDGKILFRSDTKAMKELIDEFNKAR

SEQ ID NO: 5440 - protein, 491 aa, synthetic construct
MYLRKSRAEEGQSTEEVLAKHRAALEELADRLGLPVDGVYEEVASGEKLYARPEMLKLLERIRAGEVEAVLCMDIDRLGRGGMADQGTILDAFRESGTLIITPEKTYDLTNDVDIEMTEFKAFFARAEWRAIRKRMRRGLMQTIEAGGYTANAPYGYRRCRIGKLPSLEVIPEEARFVRYIYERYLAGIGAQTIAQELNAMGSIPRRGAEWNRNTVRHVLRNPTFAGKVAWNRVKHYRPGAHGKDKHHVVYTPEGEWLMVDGVHEAIIPWSTWLEAQERRKQRYIPPSNTGQRANPFAGIIRCAKCGNNMQRMGTNKGEPYLLCTTKGCAAGAKFEYVEERMVELLYDELARLRLLIDSGASPNVDALEAALAAAQREQERVQARIPRLYEFLEDGTYDRSTFRSRLDAAEKELAELASKRAGLERQIDERRRIDPRKAAAALENMVQLYPTMSPADKNSALKALGVEVTYTKEKKTKPRDFTLELQLRDF

SEQ ID NO: 5441 - protein, 509 aa, synthetic construct
MERDLSLDRCQSDCVIYARYSSHNQRDVSIEQQVADCEAYARSLGLRVVKVYADRALSGMTDKRPQFQTMLRDAAHRRWAYLIVWKIDRFARNRYDSATYKFRLKRCGVRVLYAKESIPDGPEGILLESVLEGSAEYYSANLSQNIRRGMRYNAMNCKVNSGSIPFGYRKGEDGRFAVDPGEAEVVREIFRKVADGIPFVEISNDLNGRGIRTKRGGLWGRNSFHRLLTNETYVGVYRFGDVRVEDGVPPVIDRALFLAVDERLKNKKNPQGRHRENGEYMLTGKLFCGLCGAPMVGVSGTARSGALHHYYVCQKRRTERSCSKANVGRDWLERVVVQATLDYVLKPEVIEWMADAVMAYQEREANSAVLLGLRDQLSENQRATANLMKAIEAGIITLTTKGRLVELEAEASRLRDAITLEEAAQTHIERDFMVYWFEKFRGGDLEDAAFRRRVIDSFVNAVYLWDDRLRVAFNYSGKGSAVDMELVMDAEALAGPEGRFVLAPPASTR

SEQ ID NO: 5442 - protein, 559 aa, synthetic construct
MKTKLYSYIRFSSMRQSDGSSYERQIRMAREIAAKYDLELVNDYQDLGVSAFKGANSKTGALSRFLDAIGRSVPVGSWLFIENLDRLSRADIVSAQELFLSIIRRGITIVTGMDNKIYSLDTVTANPMDLMFSILLFIRGNEESQTKRNRTNSSALIKIKAHQENPQNPAVAIEEVGKNMWWTDTTSGYVLPHPVYFPVVQEIVELRKNGRSTAEILDHLNETYAPPPAVSNKKHSKWSRAMVERLFHTRALIGIKEVSVDGVNYELKDYYPRVIDDATFYHLKKNIGARAWNFGDKEEVKPIPLLSGIGLLKCDHCGCAMVKVKGTNKRSDQYRYTCDATRSRRLDCEHPNWSFRGDQLEKAVLQLLADKIWIAEDKANPVPALKVQVNEISRKIDNLIALSAMTGATKELADQITTLNSERETLYNQIKMAEEEMYSVDSQGWEKLAEFDLEDVYNEERLKVRFKIKQALKRIGCSRIDRNKNLFVLEYIDGKTQRVVIENSRGTRKGRIFIDLKTINDRQILESNGLVLHPCLDMLTDKNWKPEEEIPGPLQEFGI

SEQ ID NO: 5443 - protein, 538 aa, synthetic construct
MAKKVTVIKAAKAQKHTQEERRLKVCGYARVSTGSQAQATSYTAQVEYYTEKIESNPLWEFAGVYADEGISGTNVKHRDEFQMMISDCEDGNIDLILTKSITRFARNTVECIQTIRKLKEIGVGIYFEKENINTLSEKSELFITILASVAQGESENISSNNRWAIQKRFQDGTYIISTPAYGYGKDEDGNLVIIESEAETVRWIYESYLNGMGVYVIAKALNQKGIPTIRGAEKWQDGVIQDILKNPIYEGDMLQQRTYTETRFPFVRRVNNGQRNQYLIKDSHPPIVTHEEAEAVRNLMAYRVDVLHMNKSDYTKRYLFSGRIICGECGRTFRRQKIYIGKPYEKIIWTCSGHVEDKESCCMKAIREDVLHRAFTDMWNKLYTNQGTILEPLLKELTELVAARQDSEEIRQLDKEIKDISEQSQILNQVMRKGYMDSALFMESSSKLGWQLTECRRKKTLLTRKLRRTKEIVRTEQLIQLIAEQDGLMEEFDEQLFKMTAEKIVVSKEHDITFCLYNGLKLTERGGGQDAVAHANRL

SEQ ID NO: 5444 - protein, 544 aa, synthetic construct
MAETAKKISMIPAKVQYDRNVKLSEKKMKVAAYCRVSTELEEQDSSYEAQVEYYTSKISENENWKNAGIYADDGKSGTNTKKRADFNAMIQDALAGKIDMILTKSVSRFARNTVDSLVTIRKLKEKNVAVVFEKEGINTLEGTGEILITILSSLAQEESRNISENIRWGVVRKFEKGKVIVNCTKFMGYTKNEDGDLVIVPEEAEIVKLIFRLYLEGYSTGKIAKHLEEQGIKTATGQDKWHSTVIDKMLRNEKYMGDALLQKTYTVDFMTKKKVKNTGLVPQYYVEDDHEAIIPKELFYRVQEEMMRRASLCKAAVTRKKNQRSRYSSTYALTGMLICGKCGQEYRRVTWARNGKKKVVWRCSNRLTNGVKKCGESETLEENALNRAVMEAIHRITSDDMEFMEHFRQNIIHVIGSYGTAKESGEYEEKIKEKQEEMVALIAENAKTGSYTPEFDERYRIIAEEINALKEAQKTARNEKRMADSYEQRIQDIDHYLSTSTCQIPEFDNDLVRRLISTIKVESSEKLLIQFQSGIVMEQEIRYE

SEQ ID NO: 5445 - protein, 507 aa, synthetic construct
MFFQENETQEIISYEEYPYAVYARVSSEKDEQVTSIANQIDICHHWIEKNNYEWKDEAIQLDDGISGTVLLDRKAMQLILDKAQKRKLKMVVFKSISRLARDLKDALEIREVLLAHGVRVVTLEEGYDSLYEGKNSMKFEMFSMFAAQYPQTISVAASGALAAKARRGEHSGRVPFGFKKEGKFLAINEEEAKVVRFIFDLHNNHGYGHKRIVLKLNEELALGNIVKPKKTEFWQLSTVQTILKNPIYCGVFIANRHTQVKIGGRKKFIRNPKEKWTVYKDWCPKIISEEEYEKANNKEHKMRKKRFNPRNELRGMMKCGVCGCNMVVLPSYKYNQKREKKEFNYLKCSAYRRGGTALCVNHAPMQYKDLRAFVIKTLKQKGKKLKLDVKSDFEEQKKNRIKRTKIEIENAENKKKRLIELYLEDQLITKAEFQVKRKELEEQIEKLNDKLFMLEREEEETIDISNIKNAFAQLERTDQDLFGAFSALIDKLVVYEDGTVDFHYKFK

SEQ ID NO: 5446 - protein, 507 aa, synthetic construct
MKRVISYIRFSSERQAKGDSLRRQSKMVNDWLKAHPEYYLDQDLSFRDLGVSGFTGKHLKGGLGDFLTAIEKGLVKAGDTLLIESLDRLSRQDIDIASELLRNILRSGVDVVTLSDGEHYTKESLKDPLALIKSILIMQRAHEESLRKSERVQAAWDAKKEAAKAGIKISKRCPAWLKLNDDRKSFSIIPEKVETIKRCFELRLEGRSIWDIVRTLNDEGHQTMNQYKPGKFGQTSVQDLLKNRSVIGYFTPKGYEEIAGYYPSVIDETTFYRVQQLAYSRYGRKPVSENPMAVNLFKGIIRCSKCGHALIITGFSEKRSGIYRCPCKQENRCDAKGLSRKQTDGTLLALLSRIDRFEPEQVNLVDGLKLQREGILKNIEKLVELSLVVDDMTAITSKLKQLKSDLSLIESDIEKENQRIKSIDTGALSDCDMSKKAGRIEAQLIIRGVVKEAILDTANKRCKVIFHNSKVIELPISENPSEDVTDAIQSITEIAEKDLLEVDGFQL

SEQ ID NO: 5447 - protein, 515 aa, synthetic construct
MKTAIYLRKSRADLEAEARGEGETLAKHRTTLLKIAKEMNLNVLAVREEIVSGESLVKRPEMLALLEEIEDNKYDVVLCMDMDRLGRGGMKEQGIILETFKRSNTKIMTPRKTYDLNDEWDEEYSEFEAFMARKELKIITRRMQRGRVASVEAGNYLGTHAPFGYDIHRLNKRERTLTINSEESSVVRMIFDWYANEDMGASAIRNKLNDLGYKSKLGNDWNPYSILDILKNNIYIGKVTWQKRKEVKRPDAVKRSCARQDKSDWIIADGKHEPIIPESLFEQVQEKLNSRYHVPYNTNGIKNPLAGIIKCSKCGYSMVQRYPKNRKETMDCKHRGCENKSSYTELIEKRLLEALKEWYINYKADFERHKQGDKLKETQVIQMSEATLRKLEKELVDVQKQKNNLHDLLERGVYTVDMFLERSQVVSDRINEITSTMEKLKKEIKTEITKEKVKKDTIPQVEHVLDLYFKTDDPKKKNTLLKSVLEKAVYKKEKWQRLDDFELVLYPKLPQDGDI

SEQ ID NO: 5448 - protein, 515 aa, synthetic construct
MKTAIYLRKSRADLESEARGEGETLAKHRTTLLKIAKEMNLNVLAVREEIVSGESLVKRPEMLALLEEIEDNKYDVVLCMDMDRLGRGGMKEQGIILETFKRSNTKIMTPRKTYDLNDEWDEEYSEFEAFMARKELKIITRRMQRGRVASVEAGNYLGTHAPFGYDIHRLNKRERTLTINPEEASVVRMIFDWYANKDMGANAIRSKLNDLGYKSKLGNEWNPYSILDILKNNVYIGKVTWQKRKEVKRPDAVKRSCARQDKSDWIIANGKHEPIIPQSLFEQVQEKLNSRYHVPYNTNGIKNPLAGIIKCSKCGYSMVQRYPKNRKETMDCKHRGCENKSSYTELIEKRLLEALKEWYINYKADFEKHKQDDKLKETQVIQMSEAALRKLEKELVDVQKQKNNLHDLLERGVYTVDMFLERSNVVSDRITEITSTMEKLKTEIKTEIKKEKVKKDTIPQVEHVLDLYFKTDDPKKKNSLLKSVLEKAVYKKEKWQRLDDFELVLYPKLPQDGDI

SEQ ID NO: 5449 - protein, 515 aa, synthetic construct
MKTAIYLRKSRADLEAEARGEGETLAKHRSTLLKIAKEMNLNILAVREEIVSGESLVKRPEMLALLEEIEDNKYDAVLCMDMDRLGRGGMKEQGIILETFKRSNTKIMTPRKTYDLNDEWDEEYSEFEAFMARKELKIITRRMQRGRIASVEAGNYLGTHAPFGYDIHRLNKRERTLTINSEEASVVRMIFDWYANEDMGANAIRSKLNDLGYKSKLGNEWNPYSILDILKNNVYIGKVTWQKRKEVKRPDAVKRSCARQDKSDWIIADGKHEPIIPESLFEQVQDKLNSRYHVPYNTNGIKNPLAGIIKCGKCGYSMVQRYPKNRKEAMDCKHRGCENKSSYTELIERRLLEALKEWYVNYKADFEKHKQDDKLKETQVIQMNEVALRKLEKELLDVQKQKNNLHDLLERGVYTVDMFLERSNVISDRINEITSTMENLKKEIKTEIKKEKVKKDTIPQVEHVLDLYSKTDDPKKKNSLLKSVLEKAVYKKEKWQRLDDFELVLYPKLPQDGDI

SEQ ID NO: 5450 - protein, 462 aa, synthetic construct
MKCVIYRRVSTDMQAEKGSSLDAQKERLNAFAISQGWEVTNDYVDDGYSAKDMNRPALQRLLSDMRKNKFDIILVYKLDRLCRSVRDLNDMITEFEKYNVKFKSSTESLDTTTATGRMMINIIGTLAQWEREQTAERVSMIMNQRSKKGLWNGGPMPYGYTYKNNVASIIEHEAKVVRFCFDKAITHGAQAIARTLNENGYRTRDGNKWLMRSVLRMLHNPLYKGYVTYEEDRISQLAKVKIEGFHPIISEEVFDKIQYIIKQRTLSPTRVKSDVIFPFSGILVCPKCGGKMSGTTITAKGVPYKYYRCSRFVHSICDQSLINTKHINAEFPNTLERISKELSLNSKDNDIDRKHIEKQLKSFEGKRNRVKELYIEGEISRQEYSDKISVLNDQKEELLSVLENANQDISQKEILNLIEEMKVSWNLWPDEIKAKIIRGLFSEVHFKQITRREISIIDYKFI

SEQ ID NO: 5451 - protein, 536 aa, synthetic construct
MIRVVIYARVSTAEQAEEGYSIDAQLDVVKKRCEQEGRIVVGQYIDRGISGKAMENRPDLQRLLKDAKEGKFQEIWVWKTNRLARNHLDLLKIVDELDKNNVGFKSCSEAFDTATPTGKLLMNVLASIGEFERESIVENVKMGMKQRAREGKWNGGIVLGYKTVKINEAENKTKLEIEEDEAFIVKEIFRLYVEGRGLKSITNLVNKLGYRTKKGNFFTPIAIRTILLNPIYIGKIRYNVRENWSEKRRKGINKNPIYTTGNHEPIIPVDLWNRVQGLYKKKSQKPKRLFDGTFPLTGLIKCPMCEAPMVAGRVKRRLKNGNINIIRYYQCGAWRNKGTAVCRSNGVRADKIEELVFKRINQIVSNDKILKDTVSKLNDNAHNKIKPLEEELNIFNKNIRNFEKKKDRIFDLYEEGMIAKEVLTSRLEHISNEIEMNFAQKARIEKELQQNTSNPVSADAVKKILTRFHDLIEKVEPVKQKLILQLMITKININSNRELDSIVIHINEQIEKYILDVEEDGALQQVPSSFGFTIII

SEQ ID NO: 5452 - protein, 543 aa, synthetic construct
MSQKIAYQRLEDILKKGSRIALYARYSTNKQDENAQIHSVRNFLSDYGCELLDDNIYLDPKTSAVKISMDQRKDLQKLIQDVKENKFDCIVSYKNDRIARNTKEHNEFRTEMQRLGMPVVLSSTREIYTAGEIVPLTIKDALTQIEPALIAERTRDTFSSKIENGEWTGGQAPYGYIYDKETERFGILDKRAEVVQEIFRLFKLGYGLQQIANKLTTDKRDIGQKWYKDKIKYIITNPFYAGYMTMNRYVKGKLQLKMETWTWSKKQENIPAIMSRDEWEYCFYLYVERRKSQTVRKSSTPFWLRDILHCNECQQPYKTKNQKTKSKRKNGDEVEYGKILYECRNCSLKLEAEKVHDKFKEDVGRVLKKLLENHRENLIQQTQLQIKKEHEEIANVQKELTNKRIKLIENIDVLDKRISQLYKDITTGKGLKANHTEDVLGKEDEQDDWNSKLVEILLTGRSQKHNDLEAIKQQQQLLEEKQERLNIAMNALKNQYQDELLNFSFDPENVQSMRNFLLQFVQAVYVSKDMRLDYKIYENLISE

SEQ ID NO: 5453 - protein, 556 aa, synthetic construct
MAMMNEMEYRTIGSALAGGYRAAVYCRLSKDDDLQGESASIANQRDMLEKYCEKQGWEVVAVYQDDGFTGLNMERPDLQRMLRSIERRQINLVITKDLSRLGRNYLQTGHLIEDFFPRNGVRYIAMNDGIDTLRDNNDIAPFKNILNEMYSKDISKKVHSSYLLKAQKGQFTGCLAPFGYRKDPEDKNHLLIDEETAPIVRLIFGYALNGHGPNYIRRRLEEEKIPCPTWWNRERGLRNTRTKWEKKDPENGRYMWDFSVIKDLLMNPVYTGAIASQKKDYRFKIGTIGEKKPEDWVVVEGQHEPLIDRMSFDIVQNKLKSRQRPGQTNEISLFAGLIKCGECGKSLTIRYTNAKHPQRIYSCKTYNAFGKNHCTQHRIDYDTLYSHVLRKIRECARAALMDGEAVADRLTNTCEAEQREQREAMERSLTRDEERIEVLDKMVMRLYEDMIAGRISEQNFNTMLEKTQTEQTELKTKVSEGRKRLSDEVQLANDAKQWVEAIQEYANITELDAATLNRLIKEIVVHERIDEDKTRHISIEIHFNLKPIPEVEQVTA

SEQ ID NO: 5454 - protein, 589 aa, synthetic construct
MSAHVTILRNTVLPVKFNTMNRPRLYSYIRYSSERQGKGSSIERQKSYIAEMAKQIATEYDLEIFEEYQDLGVSAYKGKNVQEGALSDFIDQVESGLIPKGSFLLIESLDRFSRQNAMQAVNLFTSLLLNGITVITGIDKQVYRQTEVNTETLQQLMFSVMLFSRANEESSTKSHRTIASALSKIRRHQERKPGDPVVAIKELGSDKWWTDSSTGYVNPHPVLFPIAKKIIQLKQDGWSNRMILQHLKNNYDGPVIGNKKSKGIWNMQHCSRILEPAIYGRKVITVNNAEYVLDDYYPAIISKDEYEALKLQVGNKGFAPNRESNPEIPLLSGIGILHCAHCSCYMVKAKSTLKNHPHAYRYQCASRDLHQDCNKWGFRASTLERTILQLIADRIFLQTKYQPSGLEGKIADIQSQIENYVLAIGSAKSPEIINSLTSQIDQLEQEKQSLIVEKRLYDESIVQMNTEGWDKFRKFDIDDALNPLRTKIRANIKTVIMRVDCSRIDKKHNLFTITYRDQHKQRIVIENNSGWKKGKIYVEAQTINDIQILESEGLILHDHIDILINRDKFMTEAKKRLDHPRTLIDELTK

SEQ ID NO: 5455 - protein, 655 aa, synthetic construct
MLRPICYERVSSIQQIEGGGGLDDQRSALEGYLDRNADKFNDERIFIQDKGVSAFKNSNISSESQLGIFLQDVQNRKYGEGDALIVMSLDRISRRSSWAEDTIRFIVNSGIEVHDISASTVLRKDDPHSKLIMELIQMRSHNESLMKSVRAKAAWDRKIMEAVKNGTVISNKMPIWLKNVDNKYQRIEEKVNLIRHCFEWYKHGLSTGEIIKKIGDPTLQMVTVSRWIRDRRLLGEHVRYNGEVVHNAYPKVIDEDLFITANRMMDRVMLEKRKPADDLLLEPAVVQEIFRLYESGIGTGAIVKHLSKGWSTVNVLRVLRDKGVVKQKIIDNLTFERVNQKLSQNGVANRIRKDITIAQDDYITNLFPKILKCGCCGGNIAIHYNHVRVKYIICRNREEKKICDSKSIQYLRVEKNILQLVKNIDFNKLMSEGILDRGSIIDGIREELATLRKEEQKYIDKIKKRKSEGKLAGIHLSEGLTEIQDRIEELDKEIIKSQDIKEIPKLDFNIEEVLDPMNVELRAKVRKELRLVLKSVKYRVISKSIFVSLKYYTNVLAHVIVINNQRGGGDVQTEFSIEEHDENRVYRTDSFALSYKHGDEVPNFHTFEGIPINNFEYLKLRDLIEEVEGNGIVASWMNRNYDFIFNPSDTVRSSD

SEQ ID NO: 5456 - protein, 577 aa, synthetic construct
MPKLYSYIRWSSDRQDKGTTKDRQLSAARTYAEEKGLEMVEIIEPGVSAFRGKNRSGKLGDFIDAVKSNAIPSDSWLYCENLDRLSRDQVDEALSLFLEMIRLGLTIVTGMDKKVYNKASIRQNPTDLMLSILLFIRGNEESETKSKRTIGNVVALVERHNQGLPVNIKSVGRHPFWIDDSGSQYEAVKKHPIYWNIAREAIDMFLDGHGVYSVKRALDEKYPNGLKGKEWDYQVLQKMRNNRALIGERTMKVGGQIYKLKNYYPLLCKDETEYLVLAEKKEQNNFKSKKESKDKIKLLSGLSLLRCSKCGGTMHSFINKKTPRYICTNGTHKQKNCSGWSIIASLVEHCTMIALLMGYLNNSWKNGSDTTLIDEEINAKQSIIADLDSKISNLAAAISVAPNVVELATKIQVLNTEREQLLINVVNLKERSVSLKSKGSFEIEMTEFLILIQYAVFTDLEDEDRNKIRKIISSIIEYVIVDKTDSCITIRIKCYGIDEVLVFGGVNRKPHWEFDIELVNDDQDSNVAVVTDEIREKTNQYLADLRKSYHNLYDSSVSMLSQVGYPEINGSLFWPNR

SEQ ID NO: 5457 - protein, 603 aa, synthetic construct
MKKVFVYHRVSSDQQLDGSGIARQAELLEGYLDRTGICSEMDDPIPVVLSDQGVSAFKGLNISEGELGAWMEEVRNGMWDSSILVVESIDRFSRQNPFDVMGYINALMAHNVAIHDVMANIVISRSNSKDLPFVMMNAQRAYDESKYKSDRIRKGWAKKREQAFNKGSIVTNKRPQWIDVEDDKYVLNHKAAVIKEIFELYKTGLGCPTIAKELQKKEGERYKFNRAWTGELVHKILTNRRVTGKIFISETIRNHDDLDNPVTQKKYQMDVYPVVVNEDEFELVQQLLKSRRPNSGRVTVKKTENEEVLIKSNLFSGIARCTECGGSMYHNVVRAKRTPKKGEPKVDEYRYIRCLNERDGLCENKAMTYETVERFVVEHIIGMNLSTVMKEQEFNPEVEVLRVQIDQVKDQITNYENGIERRKSSGKAVSFEMREELDDAKLELEELLARQASLATVHVDVPVLQDVNVTELYDVYNVDMRTRYENELNKIVSNVRLKRNGNYYSIDITYKQNELKRHVLFVEHKKKEQTLISEVIIEDVDSSTFYSTPSFMIRATKGEIRFQQTNEDLSIIDYSLMMNYVDTLEGADTVAVWMRHNMNFLFT

SEQ ID NO: 5458 - protein, 367 aa, synthetic construct
MKVPVWSYARVSTLNQVDGFGIQRQVNTINQFIQYLVLDHRLPFVLDTENITQMVAEGKSAFKGKNWNPKTKLGQYRKMVMDGVLPDSVLIVENIDRLTRLDPFQAVEIISGLINRGTTILEIETGMTYSRYIPESITVLTMQINRANGESKRKSVMMKKSHQNRYGNVSKVRPRWFDVVEIDGIKQYRTNDTAKAIQRMYNDYVNGIGAAQIVRTYGKTDNGKAWTLVTVLRVLSDKRVADDPRYPPIIDKELYTKVQAMKVSGNKGKTHQKQMLNIFSGMSRCPVCKQSIIVKRNSHGGLYTVCLGKRTNKDCEARSVAYFALERPLLEAIKGLDFSEVYDREESNVATLRDQWIQNERDIAAFR

SEQ ID NO: 5459 - protein, 603 aa, synthetic construct
MKKVFVYHRVSSDQQLDGSGIARQAELLEGYLDRTGICSEMDDPIPVVLSDQGVSAFKGLNISEGELGAWMEEVRNGMWDSSILVVESIDRFSRQNPFDVMGYINALMAHNVAIHDVMANIVISRSNSKDLPFVMMNAQRAYDESKYKSDRIRKGWAKKREQAFNKGTIVTNKRPQWIDVEDDKYVLNHKAAVIKEIFELYKTGLGCPTIAKELQKKEGERYKFNRAWTGELVHKILTNRRVTGKIFISETIRNHDDLDNPVTQKKYQMDVYPVVVNEDEFELVQQLLKSRRPNSGRVTVKKTENEEVLIKSNLFSGIARCTECGGSMYHNVVRAKRTPKKGEPKVDEYRYIRCLNERDGLCENKAMTYETVERFVVEHIIGMNLSTVMKEQEFNPEVEVLRVQIDQVKDQITNYENGIERRKSSGKAVSFEMREELDDAKLELEELLARQASLATVHVDVPVLQDVNVTELYDVYNVDMRTRYENELNKIVSNVRLKRNGNYYSIDITYKQNELKRHVLFVEHKKKEQTLISEVIIEDVDSSTFYSTPSFMIRATKGEIRFQQTNEDLSIIDYSLMMNYVDTLEGADTVAVWMRHNMNFLFT

SEQ ID NO: 5460 - protein, 606 aa, synthetic construct
MVMIQSIDADSESVKPLVQVTIYCRVSSLMQTDGYGLQRQQDAIRAYLEDFDVPKELGYEIDRDNYVLLEDAGKSAYHGYHFSKGQLGQFRQKVLEGEITSGLFIIENVDRFCRMEEYLAIQEFTNLINNGIDILEVDTGEIFSRKVRKSLNKLTVSIERAYAESDRKSKISKRSWNNRKRKSLEEGIAINNNTPDWLSLSDDKQSYIVNKERVEILNEIFKMYAEGFGGTAIVNKLNKEKRYYNKTSWSTNKFYHLLRNRRLIGYLGDERHYPVVIDSVLYEQVQSLLNGNVRKGKKAGTMMRSIFNGIAKCGFCGNGMICQTMTSSASYLRCIAERSKTTKCTHAKLIRYKEAERIILEHLCNINWDELKKCNSIHRDDIDVLKTQLSIITNKLQKLDLLIQETEDDDDKISLINIKNKNRKELTAIDGKISSLTTNVEVPDLEVLTSLNEIQNLANVELRQKVYSLLSKTVSSIECTRADAPDPFYTFTINYIGASEKHLLIVELKNNCKVTRFVEKISDDTVTYYTPSFVVAYSNNWESCLPEIRELQDCNGITIKADLIDCMHLFSILDRTNRGEAKVIRDWLVIPKVQEFFFHTGTYEEE

SEQ ID NO: 5461 - protein, 589 aa, synthetic construct
MSAHVTILRNTVLPVKFNTMNRPRLYSYIRYSSERQGKGSSIERQKSYIAEMAKQIATEYDLEIFEEYQDLGVSAYKGKNVQEGALSDFIAQVESGLIPKGSFLLIESLDRFSRQNAMQAVNLFTSLLLNGITVITGIDKQVYRQTEVNTETLQQLMFSVMLFSRANEESSTKSHRTIASALSKIRRHQERKPGDPVVAIKELGSDKWWTDSSTGYVNPHPVLFPIAKKIIQLKQDGWSNRMILQHLKNNYDGPVIGNKKSKGIWNMQHCSRILEPAIYGRKVITVNNAEYVLDDYYPAIISKDEYEALKLQVGNKGFAPNRESNPEIPLLSGIGILHCAHCSCYMVKAKSTLKNHPHAYRYQCASRDLHQDCNKWGFRASTLERTILQLIADRIFLQTKYQPSGLEGKIADIQSKIENYVLAIGSAKSPAIINSLTSQIDQLEQEKQSLIVEKRLYDESIVQMNTEGWDKFRKFDIDDALNPLRTKIRANIKTVIMRVDCSRIDKKHNLFTITYRDQHKQRIVIENNSGWKKGKIYVEAQTINDIQILESEGLILHDHIDILINRDKFMTEAKKRLEHPRTLLDELTE

SEQ ID NO: 5462 - protein, 544 aa, synthetic construct
MAETIELQEKKAVAYSYVRFSTARQELGDSLRRQVAMAEEFCAKYGLDLHPVSYRDLGVSAFKRKNVERGALAAFIDAVKTGKVEKGSYLVIEQFDRLSRAEVDVALKLLLDLVHSGIKLVTLVDEKIWDRESVKDIGNLILAIVFMSRANNESAAKADRLSQAWTQKKKAALESGKIMSRECPRWLTVNADKSAFVVLEDRAESVRRVFAMRINGHGVVSIVNRANREMWPVPGKGDTWHTSLVGRLLSNRALLGEYQPHRSGSEDDKRIPVGELVRDYYPTIIDEQTFLRAQAVRERKGAFPGRRDISYRNWLQGLLKCSCGHSFVRKNKTSSKQPGYARYYCTARNRGVTDCPSMNAREIETAIIHAVSGIAPHFWNGTARLEELNTLLDVQQVDLTAAVSQRDRFAEAIGASKAPIPVLLERLTAAEIEVEKAEKALATTRAEISELQGDSDSVFENIVKAVENVDSLDARAALREDLSRVLVKCVVDVKAGIVNVYIRGEELPLTVPLREDAVIPGAAAGQMTEEEFRRTFGRGPDELE

SEQ ID NO: 5463 - protein, 535 aa, synthetic construct
MEYAARWAAEHEMQLDVSLTLRDEGLSAFHQRHIKQGALGVFLRAVEDGRILPGSVLVVEGLDRLSRAEPIQAQAQLAQIVNAGITVVTASDGRKYNRERLKAQPMDLVYSLLVMIRAHEESDTKSKRVKAAIRRQCEGWVAGTWRGIVRNGKDPHWVRQAENGAFEFLPERELAIRTMIDLFLAGHGAIEIARILSERELYVSNAGNYSTHMYRIVRNRALVGEKSLTVDGEEFRLAGYYPALLTPDAFATLQEAMSERGRRKGKGEIPNILTGLSISSCGYCGLALVSQNTAIRPAKGRAFTRRLGCSGATFNTGCPVGGTCDSRIVERALMHYCSDQFNLARLLEGDDGAARRVAQLAVARQRAREIETQIQRVTDALLSDDGVAPVAFMRRARELESELEQQHREIEVLEHKIAASNAHEIPAAAEAWAQLVDGVLALDYGARMKARQLVADTFRKIVLFQRGFTPFGNAPADRWKRSGTIGLLLVTRRGGMRLLNIDRKTGQWEAEDNLDLAPHHADEIPLPPTVQGMEC

SEQ ID NO: 5464 - protein, 548 aa, synthetic construct
MSKKVAIYCRVSTTEQAEEGYSIDEQNIKIREYCEREGHEIYNLYEDRGISGKNITNRPGIKQLLQDATENKFDLVIVWKLNRISRKLLDILNIVELLNKHNIAFRSLTENFETETPSGKLQLNIMGAIGEFERETIAENVKMGLLARAKEGRWNGGVVLGYDLVELNNEGKKRKNTVLKINEKEANTVRRIFELYSQGHGYKAVVNRINKEGHKTKRNGEFAVSTVKEILQNPVYIGKIRYNVRQDWSKKRRNNINANPILSDGIHEPIIDVETWNKVQVILKERSKKHNKVYDCEFPLTGILKCPVCGAGMTINRSTAKRKDGTRRINEYYSCGNWKNKGTAVCNSNSIRVEVADEYVLNKIMDLINNESILRKVVDNINNNKSTKLKPTLEQLEQINKEIENLTDKKSKNIELFEDGILDKSELSIRVKSINDDIEKLKYREQELKQDLQLAEGEPIPFEIIKEVMKRFKEVFLGMSTSQQRKQLIHLLVSKITMNEKREVDSIEIQINDDVITYLMKDRLPKEQGNLSFLHLLGMNCVNLKIVI

SEQ ID NO: 5465 - protein, 603 aa, synthetic construct
MKKCFIYHRVSSEQQLSGTGIQRQADNLQAYVERTNLLAEMEDPEATIISDQGVSAFKGLNMSEGELGRWMEQVRAGMWDDSHLVLESIDRFSRQNPFTVVAYLSELVNHNITIHDVSLNMLINRTNSAMLPIVTMSAQRAYEESKIKSDRIRDGWRRKRENAFNNGTIVTNKRPQWIDVQDDKYVLNDKVAIVREIFRLYQTGIGTPTIAKVLNAKGDDWLFESGRLWRGESVHKILKNKRVTGTIFISEIIRDYNSTSNPVDQKTYEMDVYPIAIPKEEFDLVQQLMRTRRPNNGRITTSKETEELKKSNIFNSVCRCARCGEAMYHNVVLANRDSKKNGKFTEEYRYIRCIGERDGLCDNKALRYEVVEQFVIEHIKGMDFTQILKPNETNPEIELVRQRIEEEKAHIQEYELGIERLKNQGKKVPFDVLTELQESRDKLKELVERQSTFTEVQVDTDYLKTVEPSVLFDQTNIEVRSRIERELSKVIDTIQLYRTGKHYVITLKYRNVDVLKHVLFVEAKKVPVLISGVAIERMGSTVAYSTPSFSIVMVDGNSPRLINIEGEPLSIIDYSLLLNYVDAVDRDDVVGVWMRNMFNTLTA

SEQ ID NO: 5466 - protein, 601 aa, synthetic construct
MKKDVKVIKGDTTLKRTASGCVQRSIKRVAAYCRVSTDTEDQINSYNSQVEHYTEFIQKNKEWTLAGIYADEAITGTQVDRRIDFQRLINDCMNGDIDMIITKSISRFARNTLDTLKYVRKLKEFNVAVFFEEENINTLTMDGELLLTILSSVAQQEVENISANVKKGLRMKMERGEMVGFQGCLGYDYDPETKSISINEKEAEIVRYIFRRYIEGVGGMVISRELEEQGYLSPRGNKRWTETTVLGIIKNEKYKGDLMMGKTYTVDPISKRRLDNFGEQDKFYIENHHEPIISEEDFEKAQGIRLRRSKNRNTVANNGGKREKYSRKYAFSSMLECGFCGHNLSRRNWHSSSEYTKVIWQCVNATKNGKKYCPHSKGIEEEAIEKAFMESYRQVCHNNVEITNEFLKTVEEELKDNSLAKDLKKITNQLDKILKKEKDLVELRLNESISMDIYQDKYNEIAISKEKLLAEKRTLEVTLTDEKALKKRLEGFKKLLESNKYLEEFDRAVFESIVDKIIIGGTNDEGEIDPAMITIIYKTGKKDSQDGRLFKSRRKNAKEVNEETDNKLYPQSSDEVNNLCSYPMDNTCGVCGSARKSLETF

SEQ ID NO: 5467 - protein, 628 aa, synthetic construct
MAGIRMENKIYEVGMYCRLSKDDGTDNESASIATQKSILTDYVKKQGWHLAKTYVDDGYSGTNFQRPSFQNMIKDIESGLINCVITKDLSRLGRNYLDCGLYLEVFFPEHNVRYIAVNDGVDTLNKSAMDITPFRNILNEMYSADVSVKIKSAYRARFQQGKFMGTTAPYGYVKDPADHNHLLIDDKVAHVVREIFDLALAGNGIAKIRKHINKQHILRPAAYAAEQGATGYERYFEENEENRYIWSENSVRGILRSPIYAGNLAGYKRIAANMKSKKRPSKLPEEWEVIPDTHEGIVTQEEFDTVQQLITSRRLPENKGGFENIFAGVIKCADCGYAMRAMSANRRKRPDIIDCVQYSCNNYGRYGNIMCTAHSIEARDLFNAVLTDINRFADMAVNDEKAVRAIEKRLTETDQSKAKALEKEQRKLNKRLAELDRLFSSLYEDKVMERITERNFEMMSGKYQKEQLEIEARLKEVTETLSDSYEKTQGVRDFLSLIRNYQGIKELDATIINALIDKILVSEREKLTDGMVRQEIKIYYKFIGFVGELHITPTKRWTALKPKNCTVCGVEYVPRSGISKYCPACAKKIQREKSNESKRRSRERNRQACIELSAKNDRLTLSREQEEL

SEQ ID NO: 5468 - protein, 507 aa, synthetic construct
MKRVISYIRFSSEKQAKGDSLRRQSKMVNDWLKAHPEYYLDQDLSFRDLGVSGFTGKHLKGGLGDFLTAIEKGLVKAGDTLLIESLDRLSRQAVDRASELLRNILRSGVDVVTLSDGEHYTRESLKDPLSLIKSILIMQRAHEESLRKSERIQAAWNRKKELISEGIKVSRRCPAWLRLNDDRKTFSVIPEKVETVRRCFQLRLEGKSIWEIVRTLNDEGHQTLNQYKAGKFGQTSVQDLLKNRSVIGYFTPKGCEEIAGYFPPIIPETDFYKVQQLSYSRYGRKPASDKPLSVNLFKGVIRCSECGHALIITGFSDTRSGIYRCPLRNENRCNAKGLSRKQTDGTLLTLLSRLDRFDSDTTNTIDTLKLHREHISSNIEKLVQLSLEIEDLNAITSKLKQLKNELSQVDADIEKETQRLKSIDVGCLSDCDLTTKAGRIEAQLIIKSAVKEVVLNTAKRRCKVTFHNGKSIDLPITENPSEDVTEAIQSLSEVTERGLIDVDVVAI

SEQ ID NO: 5469 - protein, 643 aa, synthetic construct
MAGIRTENKIYEVGIYCRLSKDDGTDNESASIATQKSILTDYVKRQGWHLAKTYVDDGYSGTNFQRPSFQNMIKDIENGLINCVITKDLSRLGRNYLDCGLYLEVFFPEHNVRYIAVNDGVDTLNKSAMDITPFRNILNEMYSADVSVKIKSAYRARFQQGKFMGTTAPYGYVKDPADHNHLLIDDKVAHVVREIFDLALAGNGIAKIRKHINKQHILRPAAYAVEQGATGYERYFEDNEENRYIWSENSVRGILRSPIYAGNLAGYKRIAANMKSKKRPSKLPEEWEVIPDTHEGIVTQEEFDTVQQLMTSRRREQNAGGFENIFSGVIKCADCGYAMRAASANRRKRPDIIDCVQYTCNNYGRYGNVMCTAHSIEARDLFNAVLADINRFADMAVNDEKAVRAIERRLTETDQSRAKSLEKEKKKLNKRLAELDRLFSSLYEDKVMERITERNFEMMSGKYQKEQLEIEARLKEVTETLNDSYEKSQGVRDFLSLIRNYQGLKELDATIINALIDKILVSEREKLADGTVRQEIKIYYKFIGFVGELHITPTKRWTALKPKNCTVCGVEYVPSSGISKYCPACAKRIQREKSNESKRRSRERNRRACIELSAKNDRLISNNVMEESFDKAMKIKKFKSSVM

SEQ ID NO: 5470 - protein, 522 aa, synthetic construct
MPESDFISILVIFMKKAIAYLRFSSPVQQYGDSLRRQNKLVEEWIDAHPDYILDDMTYKDLGLSAYHGDHATRGAFSDFMIAVESGYIEYGTVLLVESLDRLSREKIGEATERLKNILKAGVEVVTLCDHTHYTKESLDDPYSLIKAILIAQRANEESEIKSRRIKSAWKKKREEAEVSGKIITRSCPRWLKINQAGNGFELIPEYAKTIKYIFNLRLKGESFNGIVKILNDEKVKTMKGEIGVWNPSTIEILLANKALIGVNVPSYRTITSGAKEITDYFPRVISDKIFYKVRDFKRPPFGKGKHTDNPYLINIFRSVMKCKACGYNIILNAIDGNGMGYYVCPMRRLHRCNTQSLRRDIVDANLVSTVVANADKFQTNAISRNSTRTLQDRNIEVLKSIDRLIEALQIAPEVVALAEKIKELHKEFKSNEATIREIKDKQKLVVSEDIATLDLSLKGDREKCRRFIFKTFKEIVLDTESKTCDICFTNGFKLINFPLVKSINPEQLISALAYTDDSTLIL

SEQ ID NO: 5471 - protein, 547 aa, synthetic construct
MKLLVTYIRWSTREQDSGDSLRRQTNLIDAFYSKHKNDYYLLPAHRYVDKGKSGFHQQHKAQGSDFRRMFENVMSGAIPEGSLIVVENFDRFSRADIDTAIDDVRQILRKGVSILTLGDGELYDKSALTDPVKLIKHIIIAERAHQESLVKQKRIAQVWNHKTQLARELKKPMGKQAPGWLELSEDGSHYIVDEDKASLVNIIYDKRLSGMSMFAICKWLNEQGYPTINQRKVRISKTKKPDGNWSALSVKHILTSRSVLGYLPAKISTEDRKTVLREEIESFYPQIVTDSKFYAVQQLLEETGKGKTSSGEHWLYVNILKGLIRCKCGLVMTPTGIRKPVYQGTYRCNGNKESRCSYGTVSRKLLDTQLCSRLFSKLSQLHDEATDTAKLDELQRRLNTVDGELEKLTETLIQLPNITQIQEALRVKQEEKDELIVQLSREKARVKSVSSLDLSGLDMESVEGRTEAQIIIKRLVKEIVVSGNEKLVDIYLHNGNMIRGFPLDGKDDHTLTLEEATDEMQPLDDMLIFGEPVTRIYPAGDMEEVDA

SEQ ID NO: 5472 - protein, 503 aa, synthetic construct
MDSSKNAVIYARYSSDNQREESIEGQIRVCEDYARKNGFNVINIYADRALTGRTDKRPQFQLMIKDSETMTFRHVIVYKLNRFARNRYDSAVYKNKLKKNGVKLVSAMENIADDPSGILLESVIEGLAEYYSAELAENVRRGMTENALDCRYTGGAVPMGLKIDENGHFMPDYPAANIIYQIFKAAASGAEYRGILDRFNSPDNVAVLGRKITRGTLLKMLKNEKYIGTYSWNGIRKENAFPAVVDKKTFEFIQDLRRSRMHKHQSKPYEYPLSGKLFCRCGAPMVGTSGTSKNGSIYNYYSCTAHLKSTENCKQKSIPRDDIETTIVRAVTDILSDEKAIDILAQQVVALAKSKGEPQEILAIESQISDLDKKISHAVAAIENGISSPALFSSLNENEAKKSELSAALARERLRHRGTNITEETIRQFFRSMRDKDFSNEQYRRILLRSIVNKVQIGDGEIIISFNYTQKLPTLPNPVKVESSYTATLAERGRFELPHRKPV

SEQ ID NO: 5473 - protein, 507 aa, synthetic construct
MKRVISYIRFSSEKQAKGDSLRRQSKMVTDWLKAHPEYYLDQDLSFRDLGVSGFTGKHLKGGLGDFLTAIEKGLVKAGDTLLIESLDRLSRQAVDRASELLRNILRSGVDVVTLSDGEHYTSESLKDPLALIKSILIMQRAHEESLRKSERIQAAWDAKKEAAKAGIKVSKRCPAWLKLNDDRKSFSVIPEKVETVKRCFQLRLEGKSIWEIVRTLNDEGRQTLNQYKPGKFGQTSVQDLLKNRSVIGYFTPKGREEISGYYPAIIDETTFYKVQQLSHYRYGRKPVSDKPLSVNLFKGVIRCSECGHALIITGFSDTRSGIYRCPLRNENRCSAKGLSRKQTDGTLLALLSRLDRFDSDTTNTIDTLKLHREHISSNIEKLVQLSLEIEDLNAITNKLKQLKGELSQVDADIEKETQRLKSIDVGCLSDCDLTTKAGRIEAQLIIKSAVKEVVLNTAKRRCKVTFHNGKVIDLPITENPSEDVTEAIQSLSEVIERGLIDVDVVEI

SEQ ID NO: 5474 - protein, 559 aa, synthetic construct
MKTKLYSYIRFSSMRQNDGSSYERQIRMAREIAAKYDLELVNDYQDLGVSAFKGANSKTGALSRFLDAIGRSVPVGSWLFIENLDRLSRADIVSAQELFLSIIRRGITIVTGMDNKIYSLDTVTANPMDLMFSILLFIRGNEESQTKRNRTNSSALIKIKAHQENPQNPAVAIEEVGKNMWWTDTTSGYVLPHPVFFPVVQEIVELRKNGRSTAEILDHLNETYAPPPAVSNKKHSKWSRAMVERLFHTRALIGIKEVSVDGVNYELKDYYPRVIDDPTFYHLKKNIGARAWNFGDKEEVKPIPLLSGIGLLKCDHCGCAMVKVKGTNKRSDQYRYTCDATRSRRLDCEHPNWSFRGDQLEKAVLQLLADKIWIAEDKANPVPALKVQVDEISRKIDNLIALSAMTGATKELADQITTLNSERETLYNQIKMAEEEMYSVDSQGWEKLAEFDLEDVYNEERLKVRFKIKQALKRIGCSRIDRNKNLFVLEYIDGKTQRVVIENSRGTRKGQIFVDLKTINDRQILESNGLVLHPCLDMLTDKNWKPEEEIPGPLQEFGI

SEQ ID NO: 5475 - protein, 558 aa, synthetic construct
MTKLYSYIRFSSMRQSDGSSYERQIRMAKEIADRYNLELVNDYQDLGVSAFKGANSKTGALSRFLDEIGRSIPVGSWLFIENLDRLSRQDIISAQELFLSIIRRGITIVTGMDNKIYSIETVTANPMDLMFSILLFIRGNEESQTKRNRTNSSALLKIKAHQQNPQNPAVAIEEIGKNMWWTDTTSGRVLPHPVYFPVLQKIVQLRQEGHSAGVILDYLNEHHEPPAPTSNKKHGKWSRAMVSRLFNTKALIGVKTVNVDGVEYELRDYYPRVLSDSEFYFLRKNIVKKAWDYSHDKEKVIPLLSGIGVLRCVHCGATMVKQTAANGKREQYRYCCDGRKSGRTDCPYPNWGFRAVTLEGAVLQLLADKIWIAEDKTNPIPEIQVKIDEISRKIDNLINLSAMTGATKELANQITDLNSQREALHEEIRLFEREMYSVDSQGWDKLAQFDLSDVQNEERLKVRLKIKGALHEIECSRIDSKKNLFVLVYLDGLRQRLVIENNRGLKKGQIFVDLKTINDRQILESAGMVLHPCIEMIIDADWKAPEEIPGLLSEEFGI

SEQ ID NO: 5476 - protein, 598 aa, synthetic construct
MNKIIPYGYLRVSSLEQVRTGGGLDTQDEEVRRYITQNSEKFDIDRMVVMSDAGMSAYTGSNIKEGELGRFLADVNAGLIPTGSALICYSVDRLSRQNPWVGTHLISTLIGAGIEIHSVAENQILRSDDPVGAIMSTIYLMRANNESVIKSERAKKGYEKRLNESITNKKVLTRQMPRWLFDCDGKYAIDPNMQNVINFTFDSYIAGQSTGFIAKELNNRGLMYGNTSWRGSYVAKLIRDERLIGKHIRYSKQIKGVKRVVIETIPNFYPVVVDVEKFFLANNMLTSVAKNIRGRTRVTYGDDSILRNLFNGVIKCGVCGGDTSVVQNTRKKIVNGEATYIPYKTFLRCRTRYELKNCVQSDIRYEVIERAILNHLMGLDISALLSVPVDNKIESYRTELELCKAEEVELHTLIEQREREGKRVRPRTIKAYEDVSDRIDELNKLIESYVEDTFVPDFNVDLNSIADVSNVSDRSLIKKGIATIADSICYKRISDFILVEIKYRNLSVKHVLVIDNKQSKVVVNFSIEYHENSHDYTCNGFILKYVKSPEELHLMGVNIEDYAHMMNFVDFISDNEAKKIKEYLVSNLSRVLISNVPE

SEQ ID NO: 5477 - protein, 506 aa, synthetic construct
MRTVITYLRFSSATQGAEGADSTRRQNELFKQWLRKNSDAQVVASFNDEGLSGYKGKHLSGQFGDMLSRIESGEFPEGTILLVEAIDRIGRLEHLETEALMNRIIAHGIEIHTLQDGLIYTRDALSDDLGISIIQRVKSYLAHQESKQKSFRVSQKWEQRAKLALAGEQRLTKMVPGWIDPETFKLNEHAETVRLIFKLLLDGESLHNIARHLQANNISSFSRRKDANGFSVHSVRTILRSETTIGTLPASQRNDRPAIPNYYEAAIDAATFNKAQEILDKNRKGRTPASDNPLTINIFKGLFRCQCGASVHPTGTKNKYAGVYRCNSHLDGRCDVPPLKRKPFDKWMIDNFLGMIDVGNDGEAEGKIASLQHEVEIVTTRIKKATALLLEMDDITELKTQVKELNQKRTELQATIDSMRRKTSLSDKGLPQLKDIDLMTKEGRVECQLILSKHLKGLTLGKDSVTVTLQNDTEITIPTNPLPLNDGTSIFEIADKELLDIDAFRL

SEQ ID NO: 5478 - protein, 594 aa, synthetic construct
MTRRKLYSYVRWSSDRQAKGTSLERQTNKAKEFATLHNLELVELLDAGLSAYRGKNTTQGALGGFIQAVENGAIPNDSYLFVENLDRLSRQDILTANKLFSHLLELGLTVVTGMDGKIYTKASVTANPTDLMLSILLFSRANEESATKQKRVYGNIKALVERHKAGLPTTIKTAGSHVWWTDASGDKHTAVKQHPEYWEPARKAVELFLEGYSAHAVCDYLNEHYTAPPVRVTKATNTQENGGKWSYPLLRRMKTHRALIGERTINAGGKGIQGGAVYTLDNYYPALCSPTEFALLQDLNENNKLTQGPTKTRITLLSGLGVLKCGHCGGAMTFMIGANSKIRYMCSNGKDKIGSCRSWSVSLDIVERTLVPALVRGYMEYATGGGAKGEDIKASIEATQAALQELESQIDNITTAITLGGNLAPLVERMGVISKEKDSKLVELDRLARLSLLSESEGSAIEKITDFILQIRPAVLADVNHPLRLQLREAVRAVIESCTLTKRADRGLEIEYVIKGDPHRIRHTFKATTFGNYTEVTADLDEHGKPLAYPDTEEGLRLLQTRQQMEAELFKKVDQIQEEMKLPPIDGGQLWARR

SEQ ID NO: 5479 - protein, 508 aa, synthetic construct
MKKAIAYMRFSSPGQMSGDSLNRQRRLIAEWLKVNSDYYLDTITYEDLGLSAFKGKHAQSGAFSEFLDAIEHGYILPGTTLLVESLDRLSREKVGEAIERLKLILNHGIDVITLCDNTVYNIDSLNEPYSLIKAILIAQRANEESEIKSSRVKLSWKKKRQDAMESGTIMTASCPRWLSLDDKRTAFVPDPDRVKTIELIFKLRMERRSLNAIAKYLNDHAVKNFSGKESAWGPSVIEKLLANKALIGICVPSYRARGKGISEIAGYYPRVISDDLFYAVQEIRLAPFGISNSSKNPMLINLLRTVMKCEACGNTMIVHAVSGSLHGYYVCPMRRLHRCDRPSIKRDLVDYNIINELLFNCSKIQPVENKKDANETLELKIIELQMKINNLIVALSVAPEVTAIAEKIRLLDKELRRASVSLKTLKSKGVNSVSDFYAIDLTSKNGRELCRTLAYKTFEKIIINTDNKTCDIYFMNGIVFKHYPLMKVIYAQQAISALKYMVDGEIYF

SEQ ID NO: 5480 - protein, 643 aa, synthetic construct
MKKNNVEIIKADSLVRRRGDNFERESKRVAAYCRVSSDSEDQKNSYESQVRHYKDYISQRSDWELAGIYADEGISGTQVGKRQDFQRLINDCVNGEIDYIVTKAIARFARNTLDTLKYVRMLKDMQIGVYFEEENIDTLTMDGELLLTILSSVAQQEVENTSAHVKKGLKMKMQRGELIGFQGCLGYDYDVETKQLSINKKEAKIVRYIFERYLEGIGGKVIARELDELGYKSPRGLDHWNDTTVLGIIKNEKYKGDILMGKTFTVDPISKRRLSNFGEEDKYYIKDNHEPIISKEDFEKAQEIRLRRAGNKKTAANVNGKRERYSKMYAFSSMLECGFCGSILSRRSWHCRSDYRKVVWHCVTSIKKGKKFCKHSKGLEELAIEGAFMEAYRKLYHSNENLMTDLLETIESELNDNSLNKELKRITNKLRTLLKKEENLVNLRLEGKISDTIYNEKYNEISSEKEFLAEEKVNIETTLKSEIDVKKRLTEFKHLLSSQKMLTEFDRAVFESIVEKIIVGGVNSDGEIDPAMLTIIFKTGETQNKDGKQFKSKRKNAKLETDKLCPQNSDEDKKLYSQGTDYTHRSCGIIRKTQLDCPVCSPVFWQAASKGPRTFELSNTHHVDSCHTYTKIKCQQALSRVIA

SEQ ID NO: 5481 - protein, 559 aa, synthetic construct
MKTKLYSYIRFSSMRQNDGSSYERQIRMAREIAAKYDLELVNDYQDLGVSAFKGANSKTGALSRFLDAIGRSVPVGSWLFIENLDRLSRADIVSAQELFLSIIRRGITIVTGMDNKIYSLDTVTANPMDLMFSILLFIRGNEESQTKRNRTNSSALIKIKSHQENPQNPAVAIEEVGKNMWWTDTTSGYVLPHPTYFPVVQEIVELRKNGRSTAEILDHLNETYTPPPAVSNKKHSKWSRAMVERLFHTRALIGIKEISVDGVNYELKDYYPRVIDDPTFYHLKKNIGARAWNFGDKEEVKPIPLLSGIGLLKCDHCGCAMVKVKGTNKRSDQYRYTCDATRSRRLDCEHPNWSFRGDQLEKAVLQLLADKIWIAEDKANPVPALKVQVDEISRKIDNLIALSAMTGATKELADQITTLNSERETLYNQIKMAEEEMYSVDSQGWEKLAEFDLEDVYNEERLKVRFKIKQALKRIGCSRIDRNKNLFVLEYIDGKTQRVVIENSRGTRKGQIFVDLKTINDRQILESNGLVLHPCLDMLTDKNWKPEEEIPGPLQEFGI

SEQ ID NO: 5482 - protein, 452 aa, synthetic construct
MKAAIYIRVSTQEQIENYSIQAQTEKLTALCRSKDWDVYDTFIDGGYSGSNMNRPALNEMLSKLHEIDAVVVYRLDRLSRSQRDTITLIEEYFLKNNVEFVSLSETLDTSSPFGRAMIGILSVFAQLERETIRDRMVMGKIKRVESGLPLTTAKGRTYGYDVVDTKLYINEEEAQHLQLIYDIFEEEKSITFLQKRLKKLGFKVKSYSSYNKWLMNDLYIGYVSYSDKVHAKGIHEPIISEDQFYRVQEIFSRMGKNPNMNKESSSLLNNLIVCEKCGLGYVHRAKDTVSRGKKYHYRYYSCKTYKHTHELEKCGNKIWRADKLEEIIISRVKNYSFATRNLDKEDELDSITEKLKTEHSKKKRLFDLYINGTYEVAELDKMMADIDAQINYYNSQIEANKELKRNKKVQESLAELATVDFDSLEFREKQIYLKSIINKIYIDGEQVTIEWI

SEQ ID NO: 5483 - protein, 520 aa, synthetic construct
MTEKNIMVIPARKRVGSTAAKEKIKKLRVAAYCRVSTETEEQNSSYEVQVAHYTEFIKKNTEWEFAGIFADDGISGTNTKKRDEFNRMIAECMDGNIDMVITKSISRFARNTLDCLQYIRQLKDKNISVYFEKENINTMDAKGEVLLTIMASLAQQESQSLSQNVKLGLQYRYQQGKVQVNHKRFMGYTKDEDGNLIIVPEEAEVIKHIYREYLEGQSLVGIGRGLEKEGILTAAGKPRWRPESVKKILQNEKYIGDALLQKTVTVDFLTKKRVKNEGHLPQYYVENSHEAIIPKELFLQAQEEIHRRSNIYTGEGKNKRIYSSKYALSAITFCGDCGDIYRRVYWNIHGRKEFVWRCVTRIEQGPEVCKNRTVKEDELYGAVMTAINKLLAGGNNMIKTLEENIHAVIGETTEYQISEINNSLEEKQKELIKLANKGQDYEHLADEIDELRDKRQTLLVEDASLNSENERIDELIEFIRKNKFRTLEYDDKLVRKIIQNVTVYEDHFVISFKSGIEMEI

SEQ ID NO: 5484 - protein, 452 aa, synthetic construct
MKAAIYIRVSTQEQIENYSIQAQTEKLTALCRSKDWDVYDIFIDGGYSGSNMNRPALNEMLSKLHEIDAVVVYRLDRLSRSQRDTITLIEEYFLKNNVEFVSLSETLDTSSPFGRAMIGILSVFAQLERETIRDRMVMGKIKRIEAGLPLTTAKGRTFGYDVIDTKLYINEEEAKQLQMIYDIFEEEKSITTLQKRLKKLGFKVKSYSSYNNWLTNDLYCGYVSYADKVHTKGVHEPIISEEQFYRVQEIFSRMGKNPNMNRDSASLLNNLVVCSKCGLGFVHRRKDTVSRGKKYHYRYYSCKTYKHTHELEKCGNKIWRADKLEELIIDRVNNYSFASRNVDKEEELDNLNEKLKTEHTKKKRLFDLYISGSYEVSELDGMMADIDARINYYEAQIEANEELKKNKKIQENLADLATVDFDSLEFREKQLYLKSLINKIYIDGEQVTIEWL

SEQ ID NO: 5485 - protein, 568 aa, synthetic construct
MSRPVKAYSYIRFSTPKQAQGDSYRRQLQQAMDYCAEHNLQLDDKTIDDFGTSAFRGANMSEGALGRFVDAVKHGEIEQGSYLLVESVDRLSRQAVEEALEQFLAIVRAGIVIVTLSDKQVFRRGQVDFTKLIVSIVYMARANDESEMKSRRSRAAWSNGREQARKNNKVIANSRLPSWLTRDGEQIVPIPERVAIVNEMFEMAKSGCGYEQIAKVFLEKGYKTFGKEADWRPAGIQAVIKSQAVIGVFQPHVTENGHRVPADEPILGYYPTIVSPALFEEVQHLISKRNKHSGSYRKGTFNNLFSGVLRCQCGESLRYQNKGRAGSPRNYLVCPKQNTAGCKLPNMLYDKVEPQLLQAVFLLNKVMKQRVEGEDKTIALSTMLAELRVQLEVETQKRKKAAQLVLDNDNDADYRVLFEQCKKKTQALEEQIQRAESDLMSRELSVKTLKYIVDPKDLRSTEQRQRFNSQLKTALKEIRFRFDGGYLWAEYMDIDGSRVLTQIFEDRLAGSSIYDGSSYLVRKTQTEAPYGVDPSVMQQEMDDYIRNLQKNDDGTDPDFEDLSSEYSK

SEQ ID NO: 5486 - protein, 452 aa, synthetic construct
MKAAIYIRVSTQEQIENYSIQAQTEKLTALCRSKDWDVYDIFIDGGYSGSNMNRPALNEMLSKLHEIDAVVVYRLDRLSRSQKDTITLIEEYFLKNNVEFVSLSETLDTSSPFGRAMIGILSVFAQLERETIRDRMVMGKIKRVESGLPLTTAKGRTFGYDVVDTKLYVNKEEAQHLQLIYDIFEEEKSITFLQKRLKKLGFKVKSYSSYNKWLMNDLYIGYVSYGDKVHVKGVHEAIISEEQFYRVQEIFSRMGKNPNMNKESSSLLNNLIACEKCGLSFVHRVKDTASRGKKYRYRYYSCKTYKHTHELEKCGNKIWRADKLEEIIIDRVKNYSFATRNLDKEDELDSINAKLQVEHSKKKRLFDLYMNGSYEVAELDKMMADIDAQINYYNSQIEANEELKRNKKVQESLAELATVDFDSLEFREKQIYLKSIINKIYIDGEQVTIEWI

SEQ ID NO: 5487 - protein, 558 aa, synthetic construct
MNIDKVNKIEHIAIYCRVSTIEQAEEGYSIDEQERLLRDWCNRMNYSVYKVYSDRGISGKDIKNRPALKELLKDAEERKFQMVISWKINRISRKLSDVLKIVDVLEQNNIAFNSYSEQFDNSTPAGKMQFQMMALIGEFERGTIAQNVKMGMCAKAKSGEWCGGRVLGYDLVPVENQGGSKRRKTKLTINEIEARSVRLIFNEYSNGKGYKAITNKLNKLDYKTKKGNDFSVGSIREILTNPVYIGKVRYNVRQNWSEKRRRNINANPIITDGIHEPIIDEGLWDRVQAIMESKKGKPSRIYDGEYPLTGILRCPKCGAGMVISRTTNKLADGTKKRIAYYCCGAWKNKGTSVCNSNTIRVDKANEYVFTKISELLSNEKMVESIVNNINRERHKKINPTKKELERIDKELEKIDRKKTKLFEAYEEEVISKEEFKERKDELNKRAKNLQEEKEPLLVTLSDDVSEEIPYEFIKSILENFSKVLTESATREQQKKLLHMIISEITINETREIDSIKLKINDSLVDYISKEEGVSIKDAPSSFMLRNVGMSVLNLDIAI

SEQ ID NO: 5488 - protein, 549 aa, synthetic construct
MQSQGDSLRRQFQRCNEAIKKHNLYVKEQITDEAFSGFHGDNLISGKLKDFIDRAVAGDIEKDAFLIVENLDRITRLQPSKAVNVITQILSSGLEIYQTSPECLFTFKNKKDEAMTIIMITLFAQRAHEESDTKSYRIKEAWISRIERILKGEQKILMDKPPYWLDVVEKDFDVNGVTKRLKCYEVNKERTDEVLLVLEYLKSMGIKESCKMMNAESSGKKWTVKAVQRLLESKTLYGELDLKLSVREDGKKDLQSRGLEMPQIYPPIISKPDFDEILELIKLRASGRGGGRKSTQFHNIFAKILYCAHCGGAYRYMHKREYSYLVCYNSEVHTCKYEKVLSLRFYDVQNAILAYGGYFDFNVLYRGVELKEYSVDLAEKQAELEAKRAAFSNMFNSIMQKNNGIISSMYQTSLDMTEKNIDELEKEIETLKQKDILNPIKRIKANGGALLLDPALLSTAVGRAKLNSHLKRMVERIDLSHHKVTKDSYNVLSVKFFGVEDLLKIRFMGTKRIYLDVGNDFSKVFDDDADRFIDEAEWNKQTSMMDDYF

SEQ ID NO: 5489 - protein, 524 aa, synthetic construct
MPRAISYIRFSSEKQAKGSSLERQQTMLAQWLESNPEYVLSDLRFQDLGVSGFTGAHLENGFGQLLAAVENGSIEPGDVVLIEAIDRVGRLEPMEMLPLLARIVRTGVYIVTLDDGIKYDRESANSNHLFLLVAKVQQAHQYSETLSRRLKASYAARRKNAVEGVVPKRHTPVWLTSEGELIPEIAPLVKQAFEDYASGIGERRIFERIFKGNSNPLLARMAASTVKRWMNNRTAIGEWDSIPNVYPAVVEPELFYRVQKRMKAKFSPRGTPNKHAYTGLVVCSECGKNFNTKYFKASDQTSMECSSRARRGAMGCSNNRSIPEPVIELAYLFTFTGHALKALEGQMLTASQKRAMELEGEIGEVNKKITRIVNAITVLEDDSEELTDKLRSLQAERKLLQAEMNGLTHTSISMRDKIASTTDFNKDMMKANALQQSVGYQLVCHPDGRITFEDETGKQTFHYLGWGRSEDVYKVVLSDGKLVKLGINRPENKLVKKTVKATPVDRATLKGMKLSQIKVRLDKQ

SEQ ID NO: 5490 - protein, 506 aa, synthetic construct
MRSVITYLRYSSAIQGAEGADSTRRQNDLFKQWLKKNSDAQVVASFSDEGLSGYKGKHLTGQFGDMLARIESGEFSKGTILLVESIDRIGRLEHLETEALMNRILGNGLEIHTLQDGLIYTKDALVDDLGISIIQRVKAYIAHQESKQKSFRVSEKWKQRAKLALAGEQRLTKMVPGWIDPDTLKLNEHAETVRLIFKLLLSGESLHNIARHLQSNGIKSFSRRKDANGFSVHSVRTILRSETTIGTLPASQRNDRPAIPNYYEAAIDAATFNKAQEILDKNRKGRTPASDNPLTINIFKGLFRCQCGASVHPTGTKNKYAGVYRCNNNPDGRCDVPPLKRKPFDRWMLENFLGMIDVGNDGEAEGKIASLQHEVEIVTARIKKATALLLEMDDITELKAQVKGLNQKRTEIQTTIDTLKRKTSLTDKELPQLKDIDLTTKAGRVECQLILSKHLKGLTLGKDSVTVTLQNDTEITIPTNPLPLNDGSPIFEIADKELLDIDAYQL

SEQ ID NO: 5491 - protein, 505 aa, synthetic construct
MENTKIMQDFIPSQKFKRVAAYCRVSTNSDEQLKSLAAQREHYQQYISNHPGWELAGIYYDEGITGTKKNKRPELLHLLKDCEAHQVDLVITKSISRLARNAADCLDIVRQLKSLGIPVIFERENLNTANMDDEFILTVLSSMAESESNSISANNRWSIQSRMANGYFKVSTPPYGYDRDFEIIPDEAKVVKQIFTAFLNGKSSLSIAKSLTVPSPSGRKWSDSTIRSLLRNEAYTGNLRLQKTYTDHSFNRHVNHDEDTMTWYQDHHDPIITLDEFDRTQSLLAKRAKYRHTETRSLKYRQSYLYSGKLICQCGAKFKRQKKAKRVTWSCQKHIKDSQACPIKPIDERQIEVAFTTMINKLIFSKNKLLNPYLQGLRNEPENRKYRRMKELEESILLATEKRDTLMTMLSQDLIEPNEMMAKTKELIVRSNQYRQELSKLRSTFGENDNLILATRGLLNYVNNHSIQATFDGQLFKQTVDNITVQDNSHLTFNLFCGLSLPERI

SEQ ID NO: 5492 - protein, 538 aa, synthetic construct
MKDVTEKVAVIYCRVSSLKQAVQGDGLTSQETRCREYAKYKGYDVVNVFKDDMSGGLIDRPGMKSMLGYLHKNRSLPHVVIIDDISRLARGLEAHLQLRSAISSVGASLESPSIEFGEDSDSILVENLLASVSQHQRQKNGEQTKNRMRSRLINGYWVFQAPVGYRYARSTGNGKVLVRNEPCASIVQEALEGFASGRFQIQAEVKRFLESFPEFPRTNHGYVRNQQVTDILTNPVYAGYVEAPNWSVSLRQGHHEPLITFQTFKKIEERLNNKAKAPARKNINEDFPLRGSVLCGDCGSALTSCWSSGRHSRYPYYLCHKRGCESYGKSIKRDVLESEFEALLRAIQPTPGLFKIAQKMFEELWNHRLAMSEARVRNLKSEMAKIERQVGQFLDRITDTDMPSVIRTYEDRIRKLEEQRIVIGEQIARCGRPVRSFDQTLRTAFDFLGNPCKLWASERFEDKRTVLKLVFLDRLAYVRGSGFRTADLSLPFKTLSDFSKGNLKMAQRTGLEPATPGVTGRYSNRLNYRCASAGQDAR

SEQ ID NO: 5493 - protein, 495 aa, synthetic construct
MYGYNLKPCLNRRNTLKRMEQITPPPISASPLVKVAVYARISMETERTPLSLSTQVSYYQQLIHDTPGWTFAGVFADSGISGTTTHRPQFQEMLALAREEAIDLILTKSLSRFARNTVDLLETVRELKDLGVEVRFEKENISSTSADGELMLTLLASFAQAESEQISQNVKWRIWRSFEEGKANGFHLYGYTDSADGTDVQIIEETAVVRWIFAQYMTKISCEKMAAQLIADGRVPHLADNKLPGEWVRHILKNPHYTGDLLLGRWSTPEGRPGRTVRNTGQLPQYLVEDAIPAIIDRDTFTAVQTEIARRRELGAWANWSIETVALTSKIKCVSCDCSFVRSVRNPKTQTSISTEHWICTERKKGRKTGCGTCEISDTALESFIAQVLGIDAFDEDVFNERIDHIDVQGKDHYTFHYTDGTSSSHTWRPSLKKSSWTPARKAAWGELVRARWAEAKRLGLDNPRQAPTPPEALAKYRAVAKAEAERLRAEQGER

SEQ ID NO: 5494 - protein, 495 aa, synthetic construct
MYGYNLKPCLTRRNTLKRMEQITPPPISASPLVKVAVYARISMETERTPLSLSTQVSYYQQLIHDTPGWTFAGVFADSGISGTTTHRPQFQEMLALAREEAIDLILTKSISRFARNTVDLLETVRALKDLGVEVRFEKENISSTSADGELMLTLLASFAQAESEQISQNVKWRIWRSFEEGKANGFHLYGYTDSADGTDVQIIEETAVVRWIFAQYMKKISCEKMAAQLIADGRVPHLADNKLPGEWVRHILKNPHYTGDLLLGRWSTPEGRPGRTVRNTGQLPQYLVEDAIPAIIDRDTFTAVQTEIARRRELGAWANWSIETVALTSKIKCVSCDCSFVRSVRNPKTQTSISTEHWICTERKKGRKTGCGSCEISDTALKSFIAQVLGIDAFDEDVFNERIDHIDVQGKDHYTFHYTDGTSSSHTWRPSLKKSSWTPARKAAWGELVRARWAEAKRLGLDNPRQAPTPPEALAKYRAVAKAEAERLRAEQGER

SEQ ID NO: 5495 - protein, 560 aa, synthetic construct
MTKLYSYIRFSSMRQGEGSSYERQIKMAKEIADRYGLELVNDYQDLGVSAFKGANSKTGALSRFLDEIGRSIPVGSWLFIENLDRLSRQDIISAQELFLSIIRRGITIVTGMDNKIYSIETVTANPMDLMFSILLFIRGNEESQTKRNRTNSSALLKIKAHQQNPQSPAVAIEEIGKNMWWTDTTSGYVLPHPVYFPILQKIVKMKQEGHSTGSVLDYLNEHHEPPAPTSNKQHRKWSIAMVSRLFKTKALIGVKEVTVDGVQYELKDYYPRVLSDSEYYFLKNNLIKKAWSFGHAQEKTIPLLSGIGLLKCAHCGSPMVKRKAANGKVEQYRYTCDGEGSGRTDCLYPNWGFRASSLEGAVLQLLADKVWIAEDKANPIPEIQVQIDEISRKIDNLINLSAMTGATKELANQITDLNTQREALHEEIRLFEREMYSVDSQGWEKLAQFDLSDVQNEERLQIRLKIKGALRSIECARIDRNKNLFVLVYLDGLRQRIVIENNRGIRKGQIFVDLKTINDRQILESAGMVLHDHIDILIDEKAFYDGLPKEEDGPLSKFGI

SEQ ID NO: 5496 - protein, 576 aa, synthetic construct
MTKAYIYTRVSTLQQIDGFGIDRQINTLMDFLENAELPKELGYQLDPKNYEILDSDEGLSGYKGHNFTKGSLGKFKSRVANGEITSGCLLIESVDRFSRRQGYDAIDEFTFLLKRNIDIIEVETEQIFSYRLDHKLTQLSTSIERAYQESKRKSRLITKSWANLKRKAVDEGIALKSNVPYWLALDGDHYRLNTSEAERIRTIFNDYANGKGVTAIVRDLNKAGGKYDEKPFSTNFINVMLRDRRLIGWLTGKRKKDETIADWELREIKIYPEVIDANLFELVQRRIDANAVTKEVRSSSKQVSLFNGVARCGICNEPLVGHFTQKGSYLRCLGKRSKLGTCNSSLIRYKECELAVINYVKNIDFKAIYGNNKNSTPMINLLQQRMSVATAEINGIESLLYTSDNSSEIVALTKARREKVKERDKISYELSELMRTVDFCDEDFILDLESICDHNNAELREKFNGVLKKVIKSIKIIQDNGSDNKIFIIKFEYHTDYAMHCVALNLDGSLIGYSYIEDKGELCLKSSCMDINFKTGDITTKHVPDYIEALIVKSTLENIEQVLNEFDDNLNKFEIT

SEQ ID NO: 5497 - protein, 523 aa, synthetic construct
MRQVITYLRFSSKPQERGDSIRRQKGLFERWLKDNPDAKVVDEFSDEGASAYHGHHLKGDFGRMLQNIQDGKYLSGQTVLLVESETRLNRQKARNTENLVDLITGKGVDVICLESGKIYTSTNIDDLDTSIQLKIAAHIAHQQSKEKSIKVSAAWEHRAQLALEGKQQLTKNVPGWIDPDTRKLNEHSSTVVTIFDLLLSGESLHNIARYLQANNIKSFSRREKANGFSVHSVRTILRSESTVGTLAASKRNDRPAIPNYYEPAIDVATFNKAQEILSKNRVGRAPASDNPITINLFKGIIRCQCGASVHPTGVKATYQGVYRCNNVPDGRCNVPTIKRKPFDKWMLDNIIGFLERSDGNNTDKRKAEIEYQISLVTSKLKKAATLLLELDDVTELKEQVKELNIQRINLQSELDELNQRETLSDKPLHHLSEIDLTTKAGRVEAQLILSKFVQSIELQREMIIITLRNGAVIGISRDLSPALSQDLMKQVVSSSSPRDIDMFSVITSDEEFRKSGKPVTKRS

SEQ ID NO: 5498 - protein, 481 aa, synthetic construct
MIATNKVAIYVRVSTTSQVEEGYSIDEQKAKLSSYCDIKDWSVYKIYTDGGFSGSNTDRPALEGLIKDAKKRKFDTVLVYKLDRLSRSQKDTLYLIEDIFIKNNIAFLSLQENFDTSTPFGKAMIGLLSVFAQLEREQIKERMQLGKIGRAKAGKSMMWAKTSYGYDYHRETGTITINPAQALAVKFIFESYLRGRSITKLRDDLNEKYPKHVPWSYRAVRTILDNPVYCGFNQYKGEIYPGNHESIISKEEYDKTQSELKIRQRTAAENVNPRPFQAKYILSGIAQCGYCGAPLKIMLGVKRKDGSRLKKYECHQRHPRTLRGVTTYNDNKKCDSGFYYKDKLEAYVLTEISKLQDNAGYLDKIFSGDNAETIDRESYKKQIEELSKKLSRLNDLYIDDRITLEELQSKSAEFISMRGTLETELENDPALRKNKRKADMRKLLNAEKIFSMDYEGQKVLVRGLINKVQVTAEDIVINWKI

SEQ ID NO: 5499 - protein, 481 aa, synthetic construct
MITTNKVAIYVRVSTTSQVEEGYSIDEQKAKLSSYCDIKDWSVYKIYTDGGFSGSNTDRPALEGLIKDAKKRKFDTVLVYKLDRLSRSQKDTLHLIEDVFIKNEIEFLSLQENFDTSTPFGKAMIGLLSVFAQLEREQIKERMQLGKIGRAKAGKSMMWAKTSYGYNYHKETGTVTINPAQALTIKFIFESYLRGRSITKLRDDLNEKYPKHVPWSYRAVRTILDNPVYCGFNQYKGEIYPGNHEPIISKEEYDKTQSELKIRQRTAAENVNPRPFQAKYILSGIAQCGYCGAPLKIMLGVKRKDGSRLKKYECHQRHPRTLRGVTTYNDNKKCDSGFYYKDKLEASVLKEISKLQDDADYLDKIFSGDNAETIDRESYKKQIEELSKKLSRLNDLYIDDRITLEELQSKSAEFISMRATLETELENDPALRKNKRKADMRKLLNAEKVFSMDYESQKVLVRRLINKVKVTAEDIVINWKI

SEQ ID NO: 5500 - protein, 542 aa, synthetic construct
MQQLKQKRVGIYVRVSTEIQSSEGYSINGQINQIREYCDFNNFVVVDVYADRGISGKSMKRPELQRLLKDANEGHLDCVMVYKTNRLARNTSDLLKIVEDLHRQNVEFFSLSERMEVNTSSGKLMLQILASFSEFERNNIVENVFMGQTRRAQEGYYQGNLPLGYDKIPDSKHELMINQHEANIVKYIFESYAKGHGYRKIANALNHKGYVTKKGNPFSINSITYILVNPFYIGKIQFAKYKDWNEKRRKGLNDKPIIADGKHPPIISQELWDKVQSRKKQVSQKPQVHGKGTNLLTGIIHCPQCGAPMAASNTTNTLKDGTKKRIRYYSCSNFRNKGSKVCSANSVRADVIEKYVMDQVLEIVKCDKVINKVLERVNQENKVDIGALNHDIAYKQQQYDEIHAKLDNLIKTIEDNPDLTTILKETIHKYKTQLTDITNQINQLKQQQYQEKTSYDTKQISAILRRIFQNVESMDKSQLKALYLTVIDRIDIRKDINHKKQFYVTLKLNNEIIKQLFNNILIDEVLLSTSSLFLPQTIYLQI

SEQ ID NO: 5501 - protein, 449 aa, synthetic construct
MKQAIGYLRQSTTKQQSLTAQKQTIETLAKKYNIQHITFYSDKQSGRTDNRTGYQQVIERIQQRQCDVLCCYRLNRLHRNLKNALKLMKLCQKYHVHILSIHDGYFDMDKAFDRLKLNIFISLAELESDNIGEQVKNGLREKAKQGKLITTHAPFGYTYRNGTFTINQDEAPTVKAIFHYYLQDYGYKKIAQYLEKDDKCINRKPYQVRAIITNPNYCGRVINQYGQYDNMFPSIVSTNIYEQAQAIRSQKHTKRTPSDNQLQKKIKCPYCGSTLTNMTIRKKHHMLRYYTCPQNMNASSFVCAFKGINAQVLETSVLATCQDFFQNQQLYSKINHTIQQRLKRQRDIEAKYTLTQEQLIDKLAKGMIDAETFRNQSQSVLQKRKTISSISDTQLQTSLQKVIQKSFTLNMLHPYIDEIRITKNKALVGIYFKNEPLNIVNQKTQSSID

SEQ ID NO: 5502 - protein, 507 aa, synthetic construct
MKRVISYIRFSSEKQSRGDSLRRQSKMVNDWLKAHPEYYLDQDLSFRDLGVSGFTGKHLKGGLGDFLTAIEKGLVKAGDTLLIESLDRLSRQDVDQASELLRNILRSGVDVVTLSDGEHYTKESLRDPLSLIKSILIMQRAHEESLRKAERIQAAWDAKKEAAKAGIKISRRCPAWLKLNDDRKSFSVIPEKVETVKRCFQLRLEGKSIWEIVRTLNAEGHQTLNQYKAGKFGQTSVQDLLKNRSVIGYFTPKGCEEISGYYPAIIDETTFYKVQQLSHSRYGRKPASDKPLSVNLFKGVIRCSECGHALIITGFSDTRNGIYRCPLRNENRCNAKGLSRKQTDGTLLALLSRLDRFDSDTTNTIATLKLHREHLSSNIEKLVQLSLEIEDLNAITNKLKQLKNELSQVDADIEKETQRLKSIDVGCLSDCDLTTKAGRIEAQLIIKSAVKEVVLNTAKRRCKVTFHNGRLIDLPITENPSDNVTEAIQSLSEVTEKGLIDVDEVIV

SEQ ID NO: 5503 - protein, 536 aa, synthetic construct
MKIADLYIRVSTDEQADKGYSQRDQEERLRRYCSQNNFTVGNVIYEDHSAKSFNRPEWKKLLIELKKKGSKTNVILFTKWDRFSRNAGDAYQMISILSKLGVDLQAVEQPLDLSIPENKMMLAIYLAAPEVENDRRALNVFYGMRRAVKEGRVMGKAPFGYANKITENGKKYIAIKEPEATKMKWAFNELSKGIYASNSIRTKINESLRKSVSRTSFHIAIRNPIYCGKVFVPKHKDEEACFVEGQHEPLISEELFDKVQEILDGKKRPQRPNTKITVQENFPLRGFLTCPNCGKTLTASASRGRNNRYYYYHCNSTCGFRERAEIVNKVFEDGLMTLEMNAPVKKYLKKLLTENYQNFISDPLKEKKKISDEIDTLNNKLSFARNKFLSEIIDDDEYLEIKRECKDRISKLEEELNKSSIPQISNIEKLLEQALETLQNIGKHYQEGEIEIKRAIIGSIFPEKLEFDGKHYRTARINSIAYHIFQINNDLDGVKKKRNDQNDHFSLNVDPQGFEPQLMVPKTRVLPLHHGSVLFW

SEQ ID NO: 5504 - protein, 506 aa, synthetic construct
MRTVITYLRFSSAIQGAEGADSTRRQNDLFKQWLKKNSDAQVVASFSDEGLSGYKGKHLTGQFGDMLARIESGEFPEGTILLVEAIDRIGRLEHLETEALMNRIIAHGIEIHTLQDGLIYTRDALSDDLGISIIQRVKSYIAHQESKQKSFRVSQKWEQRAKLALAGEQRLTRNVPGWIDPDTFKCNEHAETVRLIFKLLLDGESLHNIARHLQSNDIKSFSRRKDANGFSVHSVRTVLRSESVIGTLPASQRNDRPAIPNYYEAAIDAATFNKAQEILDKNRKGRTPASDNPLTINIFKGLFRCQCGASVHPTGTKNKYAGVYRCNNHLDGRCDVPPLKRKPFDRWMIDNFLGMIDVGNDGESERKIAALQHEVEIVTARIKKATALLLEMDDITELKAQVKGLNQKRTEIQTTIDTLKRKTSLTDKELPQLKDIDLTTKAGRVECQLILSKHLKGLTLGKDSVTVTLQNDTEITIPTNPLPLNDGSPIFEIADKELLDIDAYQL

SEQ ID NO: 5505 - protein, 507 aa, synthetic construct
MKRVISYIRFSSEKQAKGDSLRRQSKMVTDWLKAHPEYYLDQDLSFRDLGVSGFTGKHLKGGLGDFLTAIEKGLVKAGDTLLIESLDRLSRQDVDQASELLRNILRSGVDVVTLSDGEHYTKESLRDPLSLIKSILIMQRAHEESLRKAERIQAAWDAKKEAAKAGIKISRRCPAWLKLNDDRKSFSVIPEKVETVKRCFQLRLEGKSIWEIVRTLNAEGHQTLNQYKAGKFGQTSVQDLLKNRSVIGYFTPKGCEEIAGYYPAIIDETTFYKVQQLSHSRYGKRSVSDKPLSVNLFKGVIRCSECGHALIITGFSDTRNGIYRCPLRNENRCSAKGLSRKQTDGTLLALLSRLDRFDSDMTNTIDTLKLHREHISSNIEKLVQLSLEIEDLSAITSKLKQLKGELSQVDADIEKETQRLKSIDVGCLSDCDLTTKAGRIEAQLIIKSAVKEVVLNTAKRRCKVTFHNGKAITLPITENPSDNVTEAIQSLSEVTERSLIDVDEVII

SEQ ID NO: 5506 - protein, 506 aa, synthetic construct
MRSVITYLRYSSAIQGAEGADSTRRQNDLFKQWLKKNSDAQIVASFSDEGLSGYKGKHLTGQFGDMLARIESGEFPQGAILLVESIDRIGRLEHLETEALMNRILGNGIEIHTLQDGLICTKDALADDLGISIIQRVKAYIAHQESKQKSFRVSQKWEQRAKLALAGEQRLTKMVPGWIDPETFKLNEHAETVRLIFKLLLDGESLHNIARHLQSNGIKSFSRRKDANGFSVHSVRTILRSETTIGTLPASQRNDRPAIPNYYEAAIDAATFNKAQEILDKNRKGRTPASDNPLTINIFKGLFRCQCGASVHPTGTKNKYAGVYRCNNHLDGRCDVPPLKRKPFDKWMIDNFLGMIDVGNDGEAEKEIASLQHEVEIVTARIKKATALLLEMDDIDELKIQLKELNQKRTELQTTIDNMRRKASLTDKELPQLKDIDLTTKTGRVECQLILSKHLKGLTLGKDSVTVTLQNDTEITIPTNPLPLNDGSPIFEIADKELLDIDAYQL

SEQ ID NO: 5507 - protein, 507 aa, synthetic construct
MKRVISYIRFSSERQAKGDSLRRQSKMVNDWLKAHPEYYLDQDLSFRDLGVSGFTGKHLKGGLGDFLTAIEKGLVKAGDTLLIESLDRLSRQDIDIASELLRRILRAGVDVVTLSDGEHYTKESLRDPLSLIKSILIMQRAHEESLRKAERIQAAWDAKKEAAKAGIKISKRCPAWLRLNDDRKSFSVIPEKVETVKRCFQLRLEGKSIWEIVRTLNDEGHQTLNQYEAGSFGQSSVQDLLKNRSVIGYFTPKGCEEIAGYYPAIIDETTFYKVQQLSYARHGRKPASAKPLSVNLFKGVIRCSECGHALIITGFSDTRNGIYRCPLRNENRCSAKGLSRKQTDGTLLTLLSRLDRFDSDTTNTVDMLRLHREHISSNIEKLVQLSLEIEDLSAITSKLKQLKGELSQVDADIEKETQRLKSIDVGCLSDCDLTTKAGRIEAQLIIKSAVKEVVLNTAKRRCKVTFHNGKIIDLPITENPSEDVTEAIQSLSEVTERGLIDVDVVEI

SEQ ID NO: 5508 - protein, 547 aa, synthetic construct
MKLLVTYIRWSTKEQDSGDSLRRQTNLIDAFYAKHKDDYYLLPAHRYVDKGKSGFHQQHKNQGSDFKRMFENVMSGVIPEGSLIVVENFDRFSRADIDTAIDDVRQILRKGVSILTLGDGELYDKSALTDPVKLIKHIIIAERAHQESLVKQKRIAQVWNHKTQLARELKKPMGKQAPGWLELSDDGSHYIVDEDKASLVNIIYDKRLSGMSMFAICKWLNEQGYPTINQRKVRISKTKKPDGNWSALSVKHILTSRSVLGYLPAKISTEDRKTVLREEIESFYPQIVTDSKFYAVQQLLEETGKGKTSSGEHWLYVNILKGLIRCKCGLVMTPTGIRKPVYQGTYRCNGNKESRCSYGTVSRKLLDTQLCSRLFSKLSQLHDEATDTAKLDELQRRLNTVDSELEKLTETLIQLPNITQIQEALRVKQEEKDELIVQLSREKARVKSVSSLDLSGLDMESVEGRTEAQIIIKRLVKEIVVSGNEKLVDIYLHNGNMIRGFPLDGKDDHTLTLEEATDEMQSLDDMLIFGEPVTRIYPAGDMEEVDA

SEQ ID NO: 5509 - protein, 507 aa, synthetic construct
MKRVISYIRFSSEKQAKGDSLRRQSKMVTDWLKAHPEYYLDQDLSFRDLGVSGFTGKHLKGGLGDFLTAIEKGLVKAGDTLLIESLDRLSRQDVDQASELLRNILRSGVDVVTLSDGEHYTRESLRDPLALIKSILIMQRAHEESLRKAERIQAAWDAKKEAAKAGIKVSKRCPAWLKLNDDRKSFSVIPEKVETVKRCFQLRLEGKSIWEIVRTLNDEGHQTLNQYKAGKFGQTSVQDLLKNRSVIGYFTPKGREEIAGYFPPIIPETDFYKVQQLSYSRYGRKPASDKPLSVNLFKGVIRCSECGHALIITGFSDTRSGIYRCPLRNENRCSAKGLSRKQTDGTLLTLLSRLDRFDSDTTNTIDTLKLHREHISSNIEKLVQLSLEIEDLNAITNKLKQLKNELSQVDADIEKETQRLKSIDVGCLSDCDLTTKAGRIEAQLIIKSAVKEVVLNTAKRRCKVTFHNGKTITLPITENPSDNVTEAIQSLSEVTERGLIDVDVVEI

SEQ ID NO: 5510 - protein, 507 aa, synthetic construct
MKRVISYIRFSSEKQAKGDSLRRQSKMVTDWLKAHPEYYLDQDLSFRDLGVSGFTGKHLKGGLGDFLTAIEKGLVKAGDTLLIESLDRLSRQDVDQASELLRNILRSGVDVVTLSDGEHYTSESLKDPLALIKSILIMQRAHEESLRKSERIQAAWNRKKELISEGIKVSKRCPAWLRLNDDRKSFSVIPEKVETVKRCFQLRLEGKSIWEIVRTLNDEGHQSMSQYKPGKFGQTSVQDLLKNRSVIGYFTPKGCEEISGYYPAIIDETTFYKVQQLSHYRYGRKPVSDKPLSVNLFKGVIRCSECGHALIITGFSDTRNGIYRCPLRNENRCSAKGLSRKQTDGTLLALLSRLDRFDSDMTNTVDTLKLHREHISSNIEKLVQLSLEIEDLSAITSKLKQLKGELSQVDADIEKETQRLKSIDVGCLSDCDLTTKAGRIEAQLIIKSAVKEVVLNTAKRRCKVTFHNGKVIGLPITENPSEDVTEAIQSLSEVTERGLIDVDVVAI

SEQ ID NO: 5511 - protein, 506 aa, synthetic construct
MRTVITYLRFSSATQGAEGADSTRRQNELFKQWLRKNSDAQVVASFSDEGLSGYKGKHLTGQFGDMLARIESGEFPEGTILLVEAIDRIGRLEHLETEALMNRIIAHGIEIHTLQDGLIYTRDALSDDLGISIIQRVKSYVAHQESKQKSFRVSQKWKQRAKLALAGEQRLTRNVPGWIDPDTFKCNEHAETVRLIFKLLLDGESLHNIARHLQANNISSFSRRKDANGFSVHSVRTILRSETTRGTLPASQRNDRPAIPNYYEAAIDASTFNKAQEILDKNRKGRTPASDNPLTINIFKGLFRCQCGASVHPTGTKNKYAGVYRCNNNPDGRCDVPPLKRKPFDKWMIDNFLGMIDVGNDGEAEGKIASLQHEVEIVTARIKKATALLLEMDDIDELKIQLKELNQKRTELQTTIDNMRRKASLTDKELPQLKDIDLTTKAGRVECQLILSKHLKGLTLGKDSVIVTLQNDTEITIPTNPLPLNDGSPIFEIADKELLDIDAYQL

SEQ ID NO: 5512 - protein, 507 aa, synthetic construct
MKRVISYIRFSSEKQAKGDSLRRQSKMVTDWLKAHPEYYLDQDLSFRDLGVSGFTGKHLKGGLGDFLTAIEKGLVKAGDTLLIESLDRLSRQAVDRASELLRNILRSGVDVVTLSDGEHYTKESLRDPLSLIKSILIMQRAHEESLRKAERIQAAWDAKKEAAKAGIKISRRCPAWLKLNDDRKSFSVIPEKVETVKRCFQLRLEGKSIWEIVRTLNDEGHQSMSQYKPGSFGQSSVQDLLKNRSVIGYFTPKGCEEIAGYYPAIIDETTFYKVQQLSYARYGRKPASDKPLSVNLFKGVIRCSECGHALIITGFSDTRSGIYRCPLRNENRCSAKGLSRKQTDGTLLALLSRLDRFDSDTTNTIDTLKLHREHISSNIEKLVQLSLEIEDLNAITNKLKQLKNELSQVDADIEKETQRLKSIDTGSLSDCDLSTKAGRIEAQLIIKSAVKEVVLNTAKRRCKVTFHNSKAITLPITENPSDNVTEAIQSLSEVTERGLIDVDVVEI

SEQ ID NO: 5513 - protein, 547 aa, synthetic construct
MKLLVTYIRWSTKEQDSGDSLRRQTNLIDAFYSKHKNDYYLLPAHRYVDKGKSGFHQQHKNQGSDFRRMFENVMSGVIPEGSLIVVENFDRFSRADIDTAIDDVRQILRKGVSILTLGDGELYDKSALTDPVKLIKHIIIAERAHQESLVKQKRIAQVWNHKTQLARELKKPMGKQAPGWLELSEDGSHYIVDEDKASLVNIIYDKRLSGMSMFAICKWLNEQGYPTINQRKVRISKTKKPDGNWSALSVKHILTSRSVLGYLPAKISTEDRKTVLREEIEGFYPQIVTDSKFYAVQQLLEETGKGKTSSGEHWLYVNILKGLIRCKCGLVMTPTGIRKPVYQGTYRCNGNKESRCSYGTVSRKLLDTQLCSRLFSKLSQLHDEATDTAKLDELQRRLNTVDSELEKLTETLIQLPNITQIQEALRVKQGEKDELIVQLSREKARVKSVSSLNLSGLDMESVEGRTEAQIIIKRLVKEIVVSGNEKLVDIYLHNGNMIRGFPLDGKDDHTLTLEEATDEMQSLDDMLIFGEPVTRIYPAGDMEEVDA

SEQ ID NO: 5514 - protein, 507 aa, synthetic construct
MKRVISYIRFSSERQAKGDSLRRQSKMVTDWLKAHPEYYLDQDLSFRDLGVSGFTGKHLKGGLGDFLTAIEKGLVKAGDTLLIESLDRLSRQDIDIASELLRNILRSGVDVVTLSDGEHYTRESLKDPLSLIKSILIMQRAHEESLRKSERIQAAWNRKKELISEGIKVSRRCPAWLRLNDDRKSFSVIPEKVETVKRCFQLRLEGKSIWEIVRTLNDEGHQSMSQYKPGKFGQSSVQDLLKNRSVIGYFTPKGCEEISGYYPAIVDETTFYKVQQLSYARHGRKPASAKPLSVNLFKGVIRCSECGHALIITGFSDTRSGIYRCPLRNENRCSAKGLSRKQTDGTLLTLLSRLDRFDSDMTNVIDTLKLHREHISNNIEKLVQLSLEIEDLSAITSKLKQLKGELSQVDADIEKETQRLKSIDVGCLSDCDLTTKAGRIEAQLIIKSAVKEVVLNTAKRRCKVTFHNGKVIGLPITENPSEDVTEAIQSLSEVTERGLIDVDEVII

SEQ ID NO: 5515 - protein, 506 aa, synthetic construct
MRSVITYLRYSSAIQGAEGADSTRRQNDLFKQWLKKNSDAQVVASFSDEGLSGYKGKHLTGQFGDMLARIESGEFPEGTILLVESIDRIGRLEHLETEALMNRILGNGLEIHTLQDGLIYTKDALADDLGISIIQRVKAYIAHQESKQKSFRVSQKWEQRAKLALAGEQRLTKMVPGWIDPDTFKLNEHAETVRLIFKLLLSGESLHNIARHLQSNGIKSFSRRKDANGFSVHSVRTILRSETTIGTLPASQRNDRPAIPNYYEAAIDAATFNKAQEILDKNRKGRTPASDNPLTINIFKGLFRCQCGASVHPTGTKNKYQGVYRCNNHLDGRCDVPPLKRKPFDRWMIDNFLGMIDVGNDGEAEGKIASLQHEVEIVTTRIKKATALLLEMDDIDELKIQLKELNQKRTELQTTIDNMRRKASLTDKELPQLKDIDLTTKAGRVECQLILSKHLKGLTLGKDSVTVTLQNDTEITIPTNPLPLNDGSPIFEIADKELLDIDAYQL

SEQ ID NO: 5516 - protein, 507 aa, synthetic construct
MKRVISYIRFSSEKQAKGDSLRRQSKMVTDWLKAHPEYYLDQDLSFRDLGVSGFTGKHLKGGLGDFLTAIEKGLVKAGDTLLIESLDRLSRQAVDRASELLRNILRSGVDVVTLSDGEHYTSESLKDPLALIKSILIMQRAHEESLRKSERIQAAWDAKKEAAKAGIKVSKRCPAWLKLNDDRKSFSVIPEKVATVKRCFQLRLEGKSIWEIVRTLNDEGHQTLNQYKPGKFGQTSVQDLLKNRSVIGYFTPKGREEIAGYFPPIIPETDFYKVQQLSYSRYGRKPASDKPLSVNLFKGVIRCSECGHALIITGFSDTRSGIYRCPSRNENRCNAKGLSRKQTDGTLLALLSRLDRFDSDMTNTVDTLKLHREHISSNIEKLVQLSLEIEDLSAITSKLKQLKGELSQVDADIEKETQRLKSIDVGCLSDCDLTTKAGRIEAQLIIKSAVKEVVLNTAKRRCKVTFHNGRIIDLPITENPSEDVTEAIQSLSEVTERGLIDVDEVII

SEQ ID NO: 5517 - protein, 507 aa, synthetic construct
MKRVISYIRFSSEKQSRGDSLRRQSKMVNDWLKAHPEYYLDQDLSFRDLGVSGFTGKHLKGGLGDFLTAIEKGLVKAGDTLLIESLDRLSRQNVDRASELLRNILRSGVDVVTLSDGEHYTRESLKDPLALIKSILIMQRSHEESLRKSERIQAAWNRKKELISEGIKISKRCPAWLKLNDDRKSFSVIPEKVETVKRCFQLRLEGKSIWEIVRTLNAEGHQSMSQYKPGSFGQSSVQDLLKNRSVIGYFTPKGCEEIAGYFPSIIHETDFYKVQQLSYARHGRKPASAKPLSVNLFKGVIRCSECGHALIITGFSDTRNGIYRCPLRNENRCSAKGLSRKQTDGTLLALLSRLDRFDSDTTNTIDTLKLHREHISSNIEKLVQLSLEIEDLNAITSKLKQLKGELSQVDADIEKETQRLKSIDVGCLSDCDLTTKAGRIEAQLIIKSAVKEVVLNTAKRRCKVTFHNSKSITLSITENPSEDVTEAIQSLSEVTERGLIDVDEVII

SEQ ID NO: 5518 - protein, 506 aa, synthetic construct
MRTAITYLRFSSAIQGAEGADSTRRQNDLFKQWLKKNSDAQVVASFSDEGVSGYKGKHLTGQFGDMLARIEAGEFPEGTILLVESIDRIGRLEHLETEALMNRILGNGIEIHTLQDGLIYTKDALADDLGISIIQRVKAYIAHQESKQKSFRVSQKWGQRAKLALAGEQRLTKMVPGWIDPETFKLNEHAETVRLIFKLLLDGESLHNIARHLQSNGIRSFSRRKDANGFSVHSVRTILRSETTIGTLPASQRNDRPAIPNYYEAAIDASTFNKAQEILGKNRKGRTPASDNPLTINIFKGLFRCQCGASVHPTGTKNKYQGVYRCNNHLDGRCNLQPLKRKPFDRWMIDNFLGMIDVGNDGKSEMKVAALQHEVEIVTARIKKATALLLEMDDITELKTQVRELNQKRTDIQTTIDTLKRKTSLSDKGLPQLKDIDLMTKAGRVECQLILSKHLKGLTLGKDSVTVTLQNETEITIPTNPLPLNDGSPIFEIADKELLDIDAYQL

SEQ ID NO: 5519 - protein, 507 aa, synthetic construct
MKRVISYIRFSSEKQAKGDSLRRQSKMVTDWLKAHPEYYLDESLTFRDLGVSGFTGKHLKGGLGDFLTAIEKGLVKAGDTLLIESLDRLSRQDVDQASELLRNILRSGVDVVTLSDGEHYTSESLKDPLALIKSILIMQRAHEESLRKSERIQAAWDAKKEAAKAGIKVSKRCPAWLKLNDDRKSFSVIPEKVETVKRCFQLRLEGKSIWEIVRTLNDEGHQSMSQYKPGKFGQTSVQDLLKNRSVIGYFTPKGCEEISGYFPPIIPETDFYKVQQLSYARYGRKPASDKPMAVNLFKGVIRCSECGHALIITGFSDTRNGIYRCPLRNENRCSAKGLSRKQTDGTLLTLLSRLDRFDSDTTNTIDTLKLHREHISSNIEKLVQLSLEIEDLSAITIKLKQLKGELSQVDADIEKETQRLKSIDVGCLSDCDLTTKAGRIEAQLIIKSAVKEVVLNTAKRRCKVTFHNGKTITLPITENPSDNVTEAIQSLSEVTERGLIDVDEVII

SEQ ID NO: 5520 - protein, 507 aa, synthetic construct
MKRVISYIRFSSEKQAKGDSLRRQSKMVTDWLKAHPEYYLDQDLSFRDLGVSGFTGKHLKGGLGDFLTAIEKGLVKAGDTLLIESLDRLSRQAVDRASELLRNILRSGVDVVTLSDGEHYTSESLKDPLALIKSILIMQRAHEESLRKSERIQAAWDAKKEAAKAGIKVSKRCPAWLKLNDDRKSFSVIPEKVETVKRCFQLRLEGKSIWEIVRTLNDEGYQTLNQYKAGKFGQTSVQDLLKNRSVIGYFTPKGCEEISGYYPAIIDETTFYKVQQLSHYRYGRKPVSDKPLSVNLFKGVIRCSECGHALIITGFSDTRNGIYRCPLRNENRCSAKGLSRKQTDGTLLTLLSRLDRFDSDMTNTIDTLKLHREHISSNIEKLVQLSLEIEDLSAITIKLKQLKNELSQVDADIEKETQRLKSIDVGCLSDCDLTTKAGRIEAQLIIKSAVKEVVLNTAKRRCKVTFHNGKAITLPITENPSEDVTEAIQSLSEVTERGLIDVDEVIV

SEQ ID NO: 5521 - protein, 563 aa, synthetic construct
MTAQIQGHKAQPLMQAISYTRFSSEIQKKGVSLQRQNSLVNDWLDRNPTFNLVAEYSDESKSAYKGEHNEAGGDLHRLLNDIQRGMFQKGAVLLVEAVDRLSRQGIVKTNKIIYSILEAGVNIVLLSDSDTVYTEEGLNTNPLLSMVITMKAETAREESEKKSRRGLTNWKKKREAAKDGKIITRACPAWLKVNDDKTAFEMVPQHWQTVQRIFKMRNVDFMSMSKIAKSLNEDGIENFKGGFGKWNQSTIQQLLINPAVYGLKVISKQATDDVKASAEDIDGYYTVNGLTPVSLVDFQLAQKHVTEWAKGRTPNNETPNTINIFKGVLVCAHCGSTIIQSSVTPLKMGYFVCSMRRQGRCDNAKPIRRDIVEQAIVQGLLYNVETLLKGSDIEKEELRQLEAERESVAAKREKLSDFWLAGRMSDDKYQSSYDQLTASLDQIDYQLQAVRVTSEANAVASRVMNLDLTNKEDRMSMQLLSRDVIKSIRLDGNTKTADIELKAGGYRLFNYPLDRVIDGDKWIEILMLTGSKEHTFSDTEQRQPYHVALENAPEWVQEEEARL

SEQ ID NO: 5522 - protein, 547 aa, synthetic construct
MKLLVTYIRWSTKEQDSGDSLRRQTNLIDAFYSKHKNDYYLLPAHRYVDKGKSGFHQQHKNQGSDFRRMFENVMSGAIPEGSLIVVENFDRFSRADIDTAIDDVRQILRKGVSILTLGDGELYDKSALTDPVKLIKHIIIAERAHQESLVKQKRIAQVWNHKTQLARELKKPMGKQAPGWLELSEDGSHYIVDEDKASLVNIIYDKRLSGMSMFAICKWLNEQGYPTINQRKVRISKTKKPDGNWSALSVKHILTSRSVLGYLPAKISSEDRKTVLREEIESFYPQIVTDSKFYAVQQLLEETGKGKTSSGEHWLYVNILKGLIRCKCGLVMTPTGIRKPVYQGTYRCNGNKESRCSYGTVSRKLLDTQLCSRLFSKLSQLHDEATDTAKLDELQRRLNTVDSELEKLTETLIQLPNITQIQEALRVKQEEKDELIVQLSREKARVKSVSSLDLSGLDMESVEGRTEAQIIIKRLVKEIVVSGNEKLVDIYLHNGNMIRGFPLDGKDDHTLTLEEATDEMQSLDDMLIFGEPVTRIYPAGDMEEVDA

SEQ ID NO: 5523 - protein, 559 aa, synthetic construct
MKTKLYSYIRFSSMKQADGSSYERQKRTAAEIAAKYDLELVTSYQDFGVSAFKGANSRTGALSRFLDEIGRSIPVGSWLVVENLDRISRQSIIEAQELFLSIIRRGITIVTGMDGKVYSKESVNANPIDLLLSVMLFARANEESQTKRNRTNSSALIKIKAHQENPQNPAVAIEEIGKNMWWTDTTSGYVLPHPVFFPIVQEVVELRRNGRSTAEILDHLNATYTPPPAASHKRHSNWSRAMIERLFHTRALIGIKEISVDGVKYELKNYYPRVLDDAEFYHLKKSIGVRACNYGDKEEAKPIPLLSGVNLLKCEHCGSAMVKVKGTNKRPNQYRYSCDAMRSSRIACVHTNWSFRGDQLEKAVLQLLADKIWIAEDKANPVPALKVQIDEISRKIDNLITLSAMTGATKELADQITTLNSERETLYNQIKMAEEEMYSVDSQGWEKLAEFDLEDVYNEDRIKVRFKIKQALKRIGCSRIDKYKNLFVLEYIDGKTQRVVIENSRGPRKGQIFVDLKTINDRQILESNGLVLHPCLDMLTDKDWKPEEEIPGPLQEFGI

SEQ ID NO: 5524 - protein, 546 aa, synthetic construct
MKQADGSSYERQKRTAKEIAAKYDLELVTSYQDFGVSAFKGANSRTGALSRFLDEIGRSVPVGSWLVVENLDRISRQSIIEAQELFLSIIRRGITIVTGMDGKVYSRESVNANPIDLLLSVMLFARANEESQTKRNRTNSSALIKIKAHQENPQNPAVAIEEVGKNMWWTDTTSGYVLPHPVYFPVVQEIVELRKNGRSTAEILDHLNETYAPPPAVSNKKHSKWSRAMVERLFHTRALIGIKEISVDGVNYELKDYYPRVIDDPTFYHLKKNIGARAWNFGDKEEVKPIPLLSGIGLLKCDHCGCAMVKVKGTNKRSDQYRYTCDATRSRRLDCEHPNWSFRGDQLEKAVLQLLADKIWIAEDKANPVPALKVQVDEISRKIDNLIALSAMTGATKELADQITTLNSERETLYNQIKMAEEEMYSVDSQGWEKLAEFDLEDVYNEERLKVRFKIKQALKRIGCSRIDRNKNLFVLEYIDGKTQRVVIENSRGTRKGQIFVDLKTINDRQILESNGLVLHPCLDMLTDKNWKPEEEIPGPLQEFGI

SEQ ID NO: 5525 - protein, 506 aa, synthetic construct
MRHVITYLRYSSAIQGAEGADSTRRQNDLFKQWLKKNSDAQVVASFNDEGLSGYKGKHLSGQFGDMLSRIESGEFSEGTILLVEAIDRIGRLEHLETEALMNRILGNGIEIHTLQDGLIYTRDALSDDLGISIIQRVKAYIAHQESKQKSFRVSQKWGQRAKLALAGKQRLTKMVPGWIDPETFEVNEHAETVRLIFKLLLDGESLHNIARHLQANNISSFSRRKDANGFSVHSVRTILRSETTIGTLPASQRNDRPAIPNYYEAAIDAATFNKAQEILDKNRKGRTPASDNPLTINIFKGLFRCQCGASVHPTGTKNKYQGVYRCNNHLDGRCDVPPLKRKPFDRWMIDNFLGMIDVGNDGESERKIAALQHEVEIVTSRIKKATALLLEMDDIDELKIQLKELNQKRTELQTMIDNMRRKASLTDKELPQLKDIDLTTKAGRVECQLILSKHLKGLTLGKDSVTVTLQNDTEITIPTNPLPLNDGTSIFEIAEKELLEIDAYQL

SEQ ID NO: 5526 - protein, 506 aa, synthetic construct
MRSVITYLRYSSAIQGAEGADSTRRQNDLFKQWLKKNSDAQIVASFSDEGLSGYKGKHLTGQFGDMLARIESGEFPQGAILLVESIDRIGRLEHLETEALMNRILGNGIEIHTLQDGLIYTKDALADDLGISIIQRVKAYIAHQESKQKSFRVSQKWEQRAKLALAGEQRLTKMVPGWIDPETFKLNEHAETVRLIFKLLLDGESLHNIARHLQSNGIKSFSRRKDANGFSVHSVRTILRSETTIGTLPASQRNDRPAIPNYYEAAIDAATFNKAQEILDKNRKGRTPASDNPLTINIFKGLFRCQCGASVHPTGTKNKYAGVYRCNNHLDGRCDVPPLKRKPFDKWMIDNFLGMIDVGNDGEAEKEIASLQHEVEIVTARIKKATALLLEMDDIDELKIQLKELNQKRTELQTTIDNMRRKASLTDKELPQLKDIDLTTKTGRVECQLILSKHLKGLTLGKDSVTVTLQNDTEITIPTNPLPLNDGSPIFEIADKELLDIDAYQL

SEQ ID NO: 5527 - protein, 507 aa, synthetic construct
MKRVISYIRFSSERQAKGDSLRRQSKMVNDWLKAHPEYYLDQDLSFRDLGVSGFTGKHLKGGLGDFLTAIEKGLVKAGDTLLIESLDRLSRQDIDIASELLRRILRAGVDIVTLSDGEHYTRESLKDPLALIKSILIMQRAHEESLRKAERIQAAWDAKKEAAKAGIKISKRCPAWLKLNDDRKTFSVIPEKVETVRRCFQLRLEGKSIWEIVRTLNDEGHQTLNQYKAGKFGQTSVQDLLKNRSVIGYFTPKGCEEIADYYPAIIDETTFYKVQQLSYSRYGRKPASDKPLSVNLFKGVIRCSECGHALIITGFSDTRNGIYRCPLRNENRCSAKGLSRKQTDGTLLALLSRIDRFDSDMTNTIDTLKLHREHISSNIEKLVQLSLEIEDLSAITSKLKQLKGELSQVNADIEKETQRLKSIDVGCLSDCDLTTKAGRIEAQLIIKSAVKEVVLNTAKRRCKVTFHNGKVIDLSITENPSEDVTEAIQSLSEVTERGLIDVDEVII

SEQ ID NO: 5528 - protein, 506 aa, synthetic construct
MRHVITYLRYSSATQGAEGADSTRRQNDLFKQWLKKNSDAQVVASFNDEGLSGYKGKHLSGQFGDMLSRIESGEFSEGTILLVEAIDRIGRLEHLETEALMNRIIAHGIEIHTLQDGLIYTRDALSDDLGISIIQRVKSYIAHQESKQKSFRVSQKWEQRAKLALAGEQRLTKMVPGWIDPDTFKLNEHAETVRLIFKLLLDGESLHNIARHLQSNDIKSFSRRKDANGFSVHSVRTVLRSVSAIGTLPASQRNDRPAIPNYYEAAIDAATFNKAQEILDKNRKGRTPASDNPLTINIFKGLFRCQCGASVHPTGTKNKYAGVYRCNNHLDGRCDVPPLKRKPFDRWMIDNFLGMIDVGNDGESERKIAALQHEVEIVTSRIKKATALLLEMDDITELKTQVRELNQKRTELQTTINTMKRKTSLSDKGLPQLKDIDLMTKAGRVECQLILSKHLKGLTLGKDSVTVTLQNDTEITIPTNPLPLNDGSPIFEIADKELLDVDAYQL

SEQ ID NO: 5529 - protein, 507 aa, synthetic construct
MKRVISYIRFSSEKQAKGDSLRRQSKMVNDWLKAHPEYYLDQDLSFRDLGVSGFTGKHLKGGLGDFLTAIEKGLVKAGDTLLIESLDRLSRQAVDRASELLRNILRSGVDVVTLSDGEHYTSESLKDPLALIKSILIMQRAHEESLRKSERIQAAWDAKKEAAKAGIKVSKRCPAWLKLNDDRKSFSVIPEKVETVKRCFQLRLEGKSIWEIVRTLNDEGHQSMSQYKPGKFGQTSVQDLLKNRSVIGYFTPKGCEEISGYFPPIIPETDFYKVQQLSYARHGRKPASAKPLSVNLFKGVIRCSECGHALIITGFSDTRNGIYRCPLRNENRCSAKGLSRKQTDGTLLTLLSRLDRFDSDTTNTIDTLKLHREHLSSNIEKLVQLSLEIEDLNAITNKLKQLKNELSQVDADIEKETQRLKSIDVGCLSDCDLTTKAGRIEAQLIIKSAVKEVVLNTAKRRCKVTFHNSKSITLPITENPSEDVTEAIQSLSEVTERGLIDVDEVII

SEQ ID NO: 5530 - protein, 509 aa, synthetic construct
MRRAISYIRFSSERQLKGDSVRRQSKLVTDWLDKNPEFYLDSSLSFKDLGKSAFSGKHLKGGLGDFLTAIEKGLVKAGDTLLIESLDRLSRQDIDIASELLRRILRAGVDVVTLSDGEHYTRESLKDPLSLIKSILIMQRAHEESLRKSERVQAAWNRKKELISEGIKVSRRCPAWLRLNDDRRTFTIIPDKVEVVKRAFDLRLQGLSFWAITRTLNDEGHLSLNQYTPKQKGWSDTAVKKLLRNRAVIGCFTPAGREEVQGYYPAIISESLFYRVQQLNTGQYGRASVSSNPLSVNLFRGIIKCSECGATIVLGGYALKRFGMYRCPNRSANRCSAKAISRKQTDATILYMLALCDRFETENTDIIDSFKLQREDLQRKISKMAELAIELDDMTIITEKLRDMKNALSKLNHDIEEETKRIKAITTGSLKDIDRTTKEGMIETQLLIKGVLKEIVIDAAKRRCKVTFHNGKAITLPITENPSEDVTEAIQSLSEVTGRGLIDVDEVII

SEQ ID NO: 5531 - protein, 507 aa, synthetic construct
MKRVISYIRFSSEKQAKGDSLRRQSKMVTDWLKAHPEYYLDQDLSFRDLGVSGFTGKHLKGGLGDFLTAIEKGLVKAGDTLLIESLDRLSRQAVDRASELLRNILRSGVDVVTLSDGEHYTKESLKDPLALIKSILIMQRAHEESLRKSERIQAAWNRKKELISEGIKISKRCPAWLRLNDDRKSFSVIPDKVETVKRCFQLRLEGKSIWEIVRTLNAEGHRSMNQYKPGKFGQTSVQDLLKNRSVIGYFTPKGCEEIAGYYPSVIDETTFYKVQQLSYARHGRKPASAKPLSVNLFKGVIRCSECGHALIITGFSDTRSGIYRCPLRNENRCSAKGLSRKQTDGTLLTLLSRLDRFDSDTTNTIDMLRLHREHISSNIEKLVQLSLEIEDLNAITNKLKQLKNELSQVDADIEKETQRLKSIDVGCLSDCDLTTKAGRIEAQLIIKSAVKEVVLNTAKRRCKVTFHNGKSITLPITENPSEDVTEAIQSLSEVTERGLIDVDEVII

SEQ ID NO: 5532 - protein, 507 aa, synthetic construct
MKRVISYIRFSSEKQSRGDSLRRQSKMVTDWLKAHPEYYLDQDLSFRDLGVSGFTGKHLKGGLGDFLTAIEKGLVKAGDTLLIESLDRLSRQAVDRASELLRNILRSGVDIVTLSDGEHYTRESLKDPLALIKSILIMQRAHEESLRKSERIQAAWDAKKEAAKAGIKVSRRCPAWLRLNDDRKSFSVIPEKVETVKRCFQLRLEGKSIWEIVRTLNAEGHRSMNQYKPGKFGQTSVQDLLKNRSVIGYFTPKGCEEIAGYYPAIIDETTFYKVQQLSHSRYGKRSVSDKPLSVNLFKGVIRCSECGHALIITGFSDTRSGIYRCPLRNENRCSAKGLSRKQTDGTLLTLLSRLDRFDSDTTNTIDMLRLHREHISSNIEKLVQLSLEIEDLSAITIKLKQLKGELSQVDADIEKETQRLKSIDTGSLSDCDLSTKAGRIEAQLIIKSAVKEVVLNTAKRRCKVTFHNSKSITLPITENPSEDVTEAIQSLSEVTEKGLIDVDEVII

SEQ ID NO: 5533 - protein, 559 aa, synthetic construct
MKTKLYSYIRFSSMRQNDGSSYERQIRMAREVAAKYDLELVNDYQDLGVSAFKGANSKTGALSRFLDAIGRSVPVGSWLFIENLDRLSRADIVSAQELFLSIIRRGITIVTGMDNKIYSLDTVTANPMDLMFSILLFIRGNEESQTKRNRTNSSALIKIKAHQENPQNPAVAIEEVGKNMWWTDTTSGYVCPDPVFFPIVQEVVELRRNGRSTAEILDHLNATYTPPPAASHKRHSNWSRAMIERLFHTRALIGIKEISVDGVKYELKDYYPRVLDDAEFYHLKKSIGVRACNYGDKEEAKPIPLLSGVNLLKCEHCGSAMVKVKGTNKRPNQYRYSCDAMRSSRIACVHTNWSFRGDQLEKAVLQLLADKIWIAEDKANPVPALKVQVDEISRKIDNLIALSAMTGATKELADQITTLNSERETLYNQIKMAEEEMYSVDSQGWEKLAEFDLEDVYNEDRIKVRFKIKQALKRIGCSRIDKYKNLFVLEYIDGKTQRVVIENSRGPRKGQIFVDLKTINDRQILESNGLVLHPCLDMLTDKNWKPEEEIPGPLQEFGI

SEQ ID NO: 5534 - protein, 506 aa, synthetic construct
MRSVITYLRFSSAIQGAEGADSTRRQNDLFKQWLKKNSDAQVVASFSDEGLSGYKGKHLTGQFGDMLARIESGEFPQGAILLVESIDRIGRLEHLETEALMNRIIAHGIEIHTLQDGLIYTRDALSDDLGISIIQRVKSYIAHQESKQKSFRVSQKWEQRAKLALAGEQRLTKMVPGWIDPDTFKLNEHAETVRLIFKLLLSGESLHNIARHLQSNGIKSFSRRKDANGFSVHSVRTVLRSESVIGTLPASQRNDRPAIPNYYEAAIDAATFNKAQEILDKNRKGRTPASDNPLTINIFKGLFRCQCGASVHPTGTKNKYAGVYRCNNHLDGRCDVPPLKRKPFDRWMIDNFLGMIDVGNDGESERKIAALQHEVEIVTARIKKATALLLEMDDITELKTQVKGLNQKRTELQTTIDNMRRKASLTDKELPQLKDIDLTTKAGRVECQLILSKHLKGLTLGKDSVTVTLQNDTEITIPTNPLPLNDGSPIFEIADKELLDIDAYQL

SEQ ID NO: 5535 - protein, 606 aa, synthetic construct
MKKVFVYHRVSSDQQLDGSGIARQAELLEAYLKRTNILAEMDDPEPVIITESGGVSAFKGHNMLITSGLGAWMQEVRAAMWDGSHLVYENGDRFSRQNPFMVIGYINDLINHNITIHDATMNIIISRQNSAMLPMVLMNAQRAYDESKYKSDRIRKGWAKKREQAFNKGTIVTNKRPQWIEVEKDKYVLNEKAAVVKEIFALYQTGMGCPTIAKKLQGKEGEQYKFNRPWTGELVHKILTNRRVTGKIFISEIIRNHADIENPVTQKKYDRDVYPVVINEEEFELVQELLKSRRPNAGRVTVKKDGQEEVLIKSNLFSGIARCTECGGPMYHNVVRAKRTPKKGDPKIEEYRYIRCLNERDGLCENKAMTYETVERFVVEHLLGMDLSTVMEEQEFNPEIEVLRIQIDQVKEQITNYENGIERRKSAGKIITFDMREDLDDAKSELERLLARQASLATVQVDVAVLQDVNVTELYNVNNVDIRTRYENELNKIVSTIRLKRNGTSYTIDISYKQNELKRHVLFVENKKKEQTLISEVIIEDVDGGKFYYTPSFMIRLEDGEIRFQHTNEDLSIVDYSLLLNYVDAVDRNDTVGVWMRNQFNFLTSN

SEQ ID NO: 5536 - protein, 507 aa, synthetic construct
MKRVISYIRFSSERQAKGDSLRRQSKMVNDWLKAHPEYYLDQDLSFRDLGVSGFTGKHLKGGLGDFLTAIEKGLVKAGDTLLIESLDRLSRQDIDIASELLRRILRAGVDIVTLSDGEHYTRESLKDPLALIKSILIMQRAHEESLRKAERIQAAWDAKKEAAKAGIKISKRCPAWLKLNDDRKTFSVIPEKVETVRRCFQLRLEGKSIWEIVRTLNDEGHQTLNQYKAGKFGQTSVQDLLKNRSVIGYFTPKGCEEIAGYFPPIIPETDFYKVQQLSYSRYGRKPASDKPLSVNLFKGVIRCSECGHALIITGFSDTRNGIYRCPLRNENRCSAKGLSRKQTDGTLLALLSRIDRFDSDMTNTIDTLKLHREHISSNIEKLVQLSLEIEDLSAITSKLKQLKGELSQVNADIEKEIQRLKSIDVGCLSDCDLTTKAGRIEAQLIIKSAVKEVILNTAKRRCKVTFHNGKVIDLPITEDPSENVTEAIQSLSEVTERGLIDVDEVII

SEQ ID NO: 5537 - protein, 514 aa, synthetic construct
MKKVYSYIRFSSTKQAFGDSHRRQSKSIQDWLSSHPDHILDESLSFEDLGRSAFHGDHLKEGGALRAFLEAVKQGLIPSDSVLLVESLDRVSRQSISHAQETIRDILEHGITVVTLSDGETYNRQSLDDSLALIRMIILQERSHNESVIKSDRIKKAWSHKRQQFEQDGTKITGNCPGWLKLNSDGKLFSLIPHHVETIHRIFDEKLSGKSLHAIARDLNLENIPTITNKKVDTGWTPTRVRDLLLKESLIGVAYGVSDYFPPAISKEKFHAVQMIRGQGKGKKPTSQQPSSIDIFKGLCKCAECDSTLRQRNTKKTPEGRYPRGYLECRNRLLGRCNSKAFNRSLIEDILIQKVFPTLQYLSLKSNGDNISVTTLKADITSLEKGINNLISLAEKGLGDLDTLAQRITSNRVELESKKKDLRQAEAIQSLRSDNDIQDSDRKTVEGRIKLQLAIKSFVKEIIFDYYKQEITIRLLNGKSFSGISVAREDKDFDHSSMFEVLQKSLLDIDEVHL

SEQ ID NO: 5538 - protein, 547 aa, synthetic construct
MKLLVTYIRWSTKEQDSGDSLRRQTNLIDAFYSKHKNDYYLLPAHRYVDKGKSGFHQQHKNQGSDFRRMFENVMSGVIPEGSLIVVENFDRFSRADIDTAIDDVRQILRKGVSILTLGDGELYDKSALTDPVKLIKHIIIAERAHQESLVKQKRIAQVWNHKTQLARELKKPMGKQAPGWLELSEDGSHYIVDEDKASLVNIIYDKRLSGMSMFAICKWLNEQGYPTINQRKVRISKTKKPDGNWSALSVKHILTSRSVLGYLPAKISTEDRKTVLRGEIESFYPQIVTDSKFYAVQQLLEETGKGKTSSGDHWLYVNILKGLIRCKCGLVMTPTGIRKPVYQGTYRCNGNKESRCSYGTVSRKLLDTQLCSRLFSKLSQLHDEATDTAKLDELQRRLNTVDGELGKLTETLIQLPNITQIQEALRVKQEEKDELIVQLSREKARVKSVSSLDLSGLDMESVEGRTEAQIIIKRLVKEIVVSGNEKLVDIYLHNGNMIRGFPLDGKDDHTLTLEEATDEMQSLDDMLIFGEPVTRIYPAGDMEEVDA

SEQ ID NO: 5539 - protein, 506 aa, synthetic construct
MRSVITYLRFSSAIQGAEGADSTRRQNDLFKQWLKKNSDAQVVASFSDEGLSGYKGKHLTGQFGDMLARIESGEFPEGTILLVESIDRIGRLEHLETEALMNRILGNGLEIHTLQDGLIYTKDALADDLGISIIQRVKAYIAHQESKQKSFRVSEKWKQRAKLALAGEQRLTKMVPGWIDPDTLKLNEHAETVRLIFKLLLSGESLHNIARHLQSNGIKSFSRRKDANGFSVHSVRTILRSETTIGTLPASQRNDRPAIPNYYEAAIDAATFNKAQEILDKNRKGRTPASDNPLTINIFKGLFRCQCGASVHPTGTKNKYAGVYRCNNHLDGRCDVPPLKRKPFDKWMLENFLGMIDVGNDGEAEGKIASLQHEVEIVTTRIKKATALLLEMDDIDELKIQLKELNQKRTELQTTIDNMRRKASLTDKELPQLKDIDLTTKAGRVECQLILSKHLKGLTLGKDSVIVTLQNDTEITIPTNPLPLNDGTSIFEIAEKELLEIDAYQL

SEQ ID NO: 5540 - protein, 506 aa, synthetic construct
MRSVITYLRYSSAIQGAEGADSTRRQNDLFKQWLKKNSDAQVVASFSDEGLSGYKGKHLTGQFGDMLARIEAGEFPAGTILLVESIDRIGRLEHLETEALMNRILGNGIEIHTLQDGLIYTKDALADDLGISIIQRVKAYIAHQESKQKSFRVSQKWEQRAKLALAGEQRLTKMVPGWIDPDTFKLNEHAETVRLIFKLLLSGESLHNIARHLQSNGIKSFSRRKDANGFSVHSVRTILRSETTIGTLPASQRNDRPAIPNYYEAAIDASTFNKAQEILGKNRIGRTPASDNPLTINIFKGLFRCQCGASVHPTGTKNKYQGVYRCNNHLDGRCDVPPLKRKPFDKWMIDNFLGMIDVGNDGEAEGKIASLQHEVEIVTTRIKKATALLLEMDDIDELKIQLKELNQKRTELQTTIDNMRRKASLTDKELPQLKDIDLTTKAGRVECQLILSKHLKGLTLGKDTVTVTLQNDTEITIPTDPLPLNDGTSIFEIAEKNLLNIDTFQL

SEQ ID NO: 5541 - protein, 509 aa, synthetic construct
MRRAISYIRFSSERQLKGDSVRRQSKLVTDWLDKNPEFYLDSSLSFKDLGKSAFSGKHLKGGLGDFLTAIEKGLVKAGDTLLIESLDRLSRQDIDIASELLRRILRAGVDIVTLSDGEHYTRESLKDPLSLIKSILIMQRAHEESLRKSERVQAAWNRKKELISEGIKVSRRCPAWLRLNDDRRTFTIIPDKVEVVKRAFDLRLQGLSFWAITRTLNDEGHLSLNQYTPKQKGWSDTAVKKLLRNRAVIGCFTPAGREEVQGYYPAIISESLFYRVQQLNTGQYGRASVSSNPLSVNLFRGIIKCSECGATIVLGGYALKRFGMYRCPNRSANRCSAKAISRKQTDTTILYMLALCDRFETENTDTIDSLKLQREDLQRKISKMAELAIELDDMTIITEKLRDMKNALSKLNHDIEEETKRIKAITTGSLKDIDRTTKEGMIETQLLIKGVLKEIVIDAAKRRCKVTFHNGKIIDLPITENPSEDVTEAIQSLSEVTERGLIDVDVVEI

SEQ ID NO: 5542 - protein, 507 aa, synthetic construct
MKRVISYIRFSSERQAKGDSLRRQSKMVNDWLKAHPEYYLDQDLSFRDLGVSGFTGKHLKGGLGDFLTAIEKGLVKAGDTLLIESLDRLSRQDIDIASELLRRILRAGVDIVTLSDGEHYTRESLKDPLALIKSILIMQRAHEESLRKAERIQAAWDAKKEAAKAGIKISKRCPAWLKLNDDRKTFSVIPEKVETVKRCFQLRLEGKSIWEIVRTLNDEGHQSMSQYKPGKFGQTSVQDLLKNRSVIGYFTPKGCEEIAGYYPAIIDETTFYKVQQLSHSRYGKRSVSDKPLSVNLFKGVIRCSECGHALIITGFSDTRNGIYRCPLRNENRCSAKGLSRKQTDGTLLALLSRLDRFDSDTTNTIDTLKLHREHISNNIEKLVQLSLEIEDLSAITIKLKQLKNELSQVDADIEKETQRLKSIDVGCLSDCDLTTKAGRIEAQLIIKSAVKEVVLNTAKRRCKVTFHNGKEIDLPITENPSEDVTEAIQSLSEVTERGLIDVDEVII

SEQ ID NO: 5543 - protein, 507 aa, synthetic construct
MKRAISYIRFSSEKQSRGDSLRRQSKMVNDWLKAHPEYYLDQDLSFRDLGVSGFTGKHLKGGLGDFLTAIEKGLVKAGDTLLIESLDRLSRQNVDRASELLRNILRSGVDVVTLSDGEHYTRESLKDPLALIKSILIMQRAHEESLRKSERIQAAWDAKKEAAKAGIKVSKRCPAWLKLNDDRKSFSVIPEKVETVKRCFQLRLEGKSIWEIVRTLNDEGHQTLNQYKAGKFGQTSVQDLLKNRSVIGYFTPKGCEEISGYFPPIIPETDFYKVQQLSYSRYGRKPASDKPLSVNLFKGVIRCSECGHALIITGFSDTRSGIYRCPSRNENRCNAKGLSRKQTDSTLLALLSRLDRFDSDTTNIIDMLRLHREHISSNIEKLVQLSLEIEDLSAITSKLKQLKGELSQVDADIEKETQRLKSIDVGCLSDCDLTTKAGRIEAQLIIKSAVKEVVLNTAKRRCKVTFHNGKIIDLPITENPSEDVTEAIQSLSEVTERGLIDVDVVAI

SEQ ID NO: 5544 - protein, 507 aa, synthetic construct
MKRVISYIRFSSEKQAKGDSLRRQSKMVTDWLKAHPEYYLDQDLSFRDLGVSGFTGKHLKGGLGDFLTAIEKGLVKAGDTLLIESLDRLSRQDVDQASELLRNILRSGVDVVTLSDGEHYTKESLRDPLSLIKSILIMQRAHEESLRKAERIQAAWDAKKEAAKAGIKISRRCPAWLKLNDDRKSFSVIPEKVETVKRCFQLRLEGKSIWEIVRTLNAEGHQTLNQYKAGKFGQTSVQDLLKNRSVIGYFTPKGCEEISGYYPAIIDETTFYKVQQLSYARYGRKPASDKPMAVNLFKGVIRCSECGHALIITGFSDTRNGIYRCPLRNENRCSAKGLSRKQTDGTLLTLLSRLDRFDSDTTNTIDMLRLHREHISSNIEKLVQLSLEIEDLSAITIKLKQLKGELSQVDADIEKETQRLKSIDVGCLSDCDLTTKAGRIEAQLIIKSAVKEVVLNTAKRRCKVTFHNGKVIDLPITENPSEDVTEAIQSLSEVTERGLIDVDVVEI

SEQ ID NO: 5545 - protein, 509 aa, synthetic construct
MRRAISYIRFSSERQLKGDSVRRQSKLVTDWLDKNPEFYLDSSLSFKDLGKSAFSGKHLKGGLGDFLTAIEKGLVKAGDTLLIESLDRLSRQDIDIASELLRRILRAGVDVVTLSDGEHYTKESLKDPLSLIKSILIMQRAHEESLRKSERVQAAWNRKKELISEGIKISRRCPAWLKLNDDRRTFTIIPDKVEVVKRAFDLRLQGLSFWAITRTLNDEGHLSLNQYTPKQKGWSDTAVKKLLRNRAVIGCFTPAGREEVQGYYPAIISESLFYRVQQLNTGQYGRASVSSNPLSVNLFRGIIKCSECGATIVLGGYALKRFGMYRCPNRSANRCSAKAISRKQTDATILYMLALCDRFETENTDIIDSLKLQREDLQRKISKMAELAIELDDMTIITEKLRDMKNALSKLNHDIEEETKRIKAITTGSLKDIDRTTKEGMIETQLLIKGVLKEIVIDAAKRRCKVTFHNSKSITLPITENPSEDVTEAIQSLSEVTERGLIDVDVVEI

SEQ ID NO: 5546 - protein, 506 aa, synthetic construct
MRSVITYLRFSSAIQGAEGADSTRRQNDLFKQWLKKNSDAQVVASFSDEGLSGYKGKHLTGQFGDMLARIESGEFPQGAILLVESIDRIGRLEHLETEALMNRIIAHGIEIHTLQDGLIYTRDALSDDLGISIIQRVKSYIAHQESKQKSFRVSQKWEQRAKLALAGEQRLTKMVPGWIDPDTFKLNEHAETVRLIFKLLLSGESLHNIARHLQSNGIKSFSRRKDANGFSVHSVRTVLRSESVIGTLPASQRNDRPAIPNYYEAAIDAATFNKAQEILDKNRKGRTPASDNPLTINIFKGLFRCQCGASVHPTGTKNKYAGVYRCNNHLDGRCDVPPLKRKPFDRWMIDNFLGMIDVGNDGESERKIAALQHEVEIVTSRIKKATALLLEMDDITELKTQVKELNQKRTALQTTIDNMRRKTSLTDKELPQLKDIDLTTKAGRVECQLILSKHLKGLTLGKDSVTVTLQNDTEITIPTNPLPLNDGTSIFEIADKELLDIDAYQL

SEQ ID NO: 5547 - protein, 507 aa, synthetic construct
MKRVISYIRFSSERQAKGDSLRRQSKMVNDWLKAHPEHYLDQDLSFRDLGVSGFTGKHLKGGLGDFLTAIEKGLVKAGDTLLIESLDRLSRQDVDQASELLRNILRSGVDVVTLSDGEHYTKESLRDPLSLIKSILIMQRAHEESLRKAERIQAAWDAKKEAAKAGIKISRRCPAWLKLNDDRKSFSVIPEKVETVKRCFQLRLEGKSIWEIVRTLNAEGHQTLNQYKAGKFGQTSVQDLLKNRSVIGYFTPKGCEEISGYYPAIIDETTFYKVQQLSYARYGRKPASDKPMAVNLFKGVIRCSECGHALIITGFSDTRNGIYRCPLRNENRCSAKGLSRKQTDGTLLALLSRLDRFDSDMTNTIDTLKLHREHISSNIEKLVQLSLEIEDLSAITSKLKQLKGELSQVDADIEKETQRLKSIDVGCLSDCDLTTKAGRIEAQLIIKSAVKEVVLNTAKRRCKVTFHNGKAITLPITENPSDNVTEAIQSLSEVTERSLIDVDEVII

SEQ ID NO: 5548 - protein, 604 aa, synthetic construct
MKKVFVYHRVSSDQQLDGSGIARQAELLEGYLERTGICSEMHDPIPVVLSDQGVSAFKGLNISEGELGAWMEEVRKGMWDSSILVVESIDRFSRQNPFDVMGYINALMAHNVAIHDVMANIVISRSNSKDLPFVMMNAQRAYDESKYKSDRIRKGWAKKREQAFNKGTIVTNKRPQWIDVKDDKYIINHKATVIKEIFELYKTGLGCPTIAKELQKKEGEQYKFNRAWTGELVHKILTNRRVTGKIFISETIRNHDDLDNPVTQKKYQMNVYPVIVNEDEFELVLDLLKSRRPNAGRVTVKKTDNEEVLIKSNLFSGIARCMDCGGPMYHNVVRAKRTPKKGEPKVEEYRYIRCLSERDGLCNNKAMTYETVERFVVEHLIGMDISTVIKEQEFNPELEVIRIQIDQVKDQIANYENGIERRKSVGKVISFEMREELDDARLQLEELLARKASLATVNVDIPVLKNVDVNELFNVNNVDIRTRYENELNKIVSTVRLKRVDDSYIIDIKYKNNDLKRHVIFVEHKKKEQKLIGDVIIENIDGTILYSTSSFWIRVKDGAILFKQTKDDLSIIDYHILLNYVDGLERDNMVAVWMRHNINFLFGK

SEQ ID NO: 5549 - protein, 507 aa, synthetic construct
MKRVISYIRFSSEKQSRGDSLRRQSKMVTDWLKAHPEYYLDQDLSFRDLGVSGFTGKHLKGGLGDFLTAIEKGLVKAGDTLLIESLDRLSRQDVDQASELLRNILRSGVDVVTLSDGEHYTRESLKDPLALIKSILIMQRSHEESLRKSERIQAAWNRKKELISEGIKISKRCPAWLKLNDDRKSFSVIPDKVETVKRCFQLRLEGKSIWEIVRTLNAEGHRSMNQYKPGKFGQTSVQDLLKNRSVIGYFTPKGCEEISGYFPSIIPETDFYKVQQLSYSRYGRKPASDKPLSVNLFKGVIRCSECGHALIITGFSDTRSGIYRCPSRNENRCNAKGLSRKQTDGTLLALLSRLDRFDSDTTNTIDTLKLHREHISSNIEKLVQLSLEIEDLSAITIKLKQLKNELSQVDADIEKETQRLKSIDVGCLSDCDLTTKAGRIEAQLIIKSAVKEVVLNTAKRRCKVTFHNSKSITLSITENPSEDVTEAIQSLSEVTERGLIDVDEVII

SEQ ID NO: 5550 - protein, 506 aa, synthetic construct
MRTVITYLRFSSATQGAEGADSTRRQNELFKQWLRKNSDAQVVASFSDEGLSGYKGKHLSGQFGDMLSRIESGEFPEGTILLVEAIDRIGRLEHLETEALMNRIIAHGIEIHTLQDGLIYTRDALSDDLGISIIQRVKSYIAHQESKQKSFRVSQKWEQRAKLALAGEQRLTKMVPGWIDPETFKLNEHAETVRLIFKLLLDGESLHNIARHLQANNISSFSRRKDANGFSVHSVRTILRSETTIGTLPASQRNDRPAIPNYYEAAIDAATFNKAQEILDKNRKGRTPASDNPLTINIFKGLFRCQCGASVHPTGTKNKYAGVYRCNNHLDGRCDVQPLKRKPFDRWMIDNFLGMIDVGNDGESERKIAALQHEVEIVTARIKKATALLLEMDDITELKTQVKELNQRRTELQTTIDNMRRKASLTDKELPQLKDIDLTTKAGRVECQLILSKHLKGLTLGKDSVIVTLQNDTEITIPTNPLPLNDGTSIFEIAEKELLEIDAYQL

SEQ ID NO: 5551 - protein, 507 aa, synthetic construct
MKRVISYIRFSSEKQAKGDSLRRQSKMVNDWLKAHPEYYLDQDLSFRDLGVSGFTGKHLKGGLGDFLTAIEKGLVKAGDTLLIESLDRLSRQNVDQASELLRNILRSGVDVVTLSDGEHYTRESLKDPLALIKSILIMQRSHEESLRKSERIQAAWNRKKELISEGIKISKRCPAWLKLNDDRKSFSVIPEKVETVKRCFQLRLEGKSIWEIVRTLNAEGHQTLNQYKAGSFGQTSVQDLLKNRSVIGYFTPKGCEEISGYFPPIIPETDFYKVQQLSYSRYGRKPASDKPLSVNLFKGVIRCSECGHALIITGFSDTRNGIYRCPLRNENRCSAKGLSRKQTDGTLLTLLSRLDRFDSDMTNTIDMLRLHREHISSNIEKLVQLSLEIEDLSAITIKLKQLKGELSQVDADIEKETQRLKSIDVGCLSDCDLTTKAGRIEAQLIIKSAVKEVVLNTAKRRCKVTFHNGKVIDLPITENPSEDVTEAIQSLSEVTAKGLIDVDVVEI

SEQ ID NO: 5552 - protein, 506 aa, synthetic construct
MRSVITYLRFSSAIQGAEGADSTRRQNDLFKQWLKKNSDAQVVASFSDEGLSGYKGKHLTGQFGDMLARIESGEFPQGAILLVESIDRIGRLEHLETEALMNRIIAHGIEIHTLQDGLIYTRDALSDDLGISIIQRVKSYIAHQESKQKSFRVSQKWEQRAKLALAGEQRLTKMVPGWIDPDTFKLNEHAETVRLIFKLLLSGESLHNIARHLQSNGIKSFSRRKDANGFSVHSVRTVLRSESVIGTLPASQRNDRPAIPNYYEAAIDAATFNKAQEILDKNRKGRTPASDNPLTINIFKGLFRCQCGASVHPTGTKNKYAGVYRCNNHLDGRCDVPPLKRKPFDRWMIDNFLGMIDVGNDGESERKIAALQHEVEIVTARIKKATALLLEMDDIDELKIQLKELNQKRTELQTTIDNMRRKASLTDKELPQLKDIDLTTKTGRVECQLILSKHLKGLTLGKDSVTVTLQNDTEITIPTNPLPLNDGSPIFEIADKELLDIDAYQL

SEQ ID NO: 5553 - protein, 547 aa, synthetic construct
MKLLVTYIRWSTKEQDSGDSLRRQTNLIDAFYSKHKNDYYLLPAHRYVDKGKSGFHQQHKNQGSDFRRMFENVMSGAIPEGSLIVVENFDRFSRADIDTAIDDVRQILRKGVSILTLGDGELYDKSALTDPVKLIKHIIIAERAHQESLVKQKRIAQVWNHKTQLARELKKPMGKQAPGWLELSEDGSHYIVDEDKASLVNIIYDKRLSGMSMFAICKWLNEQGYPTINQRKVRISKTKKPDGNWSALSVKHILTSRSVLGYLPAKISSEDRKTVLREEIEGFYPQIVTDSKFYAVQQLLEETGKGKTSSGEHWLYVNILKGLIRCKCGLVMTPTGIRKPVYQGTYRCNGNKESRCSYGTVSRKLLDTQLCSRLFSKLSQLHDEATDTAKLDELQRRLNTVDSELEKLTETLIQLPNITQIQEALRVKQGEKDELIVQLSREKARVKSVSSLDLSGLDMESVEGRTEAQIIIKRLVKEIVVSGNEKLVDIYLHNGNMIRGFPLDGKDDHTLTLEEATDEMQSLDDMLIFGEPVTRIYPAGDMEEVDA

SEQ ID NO: 5554 - protein, 507 aa, synthetic construct
MKRVISYIRFSSERQAKGDSLRRQSKMVNDWLKAHPEYYLDQDLSFRDLGVSGFTGKHLKGGLGDFLTAIEKGLVKAGDTLLIESLDRLSRQAVDRASELLRNILRSGVDVVTLSDGEHYTSESLKDPLALIKSILIMQRAHEESLRKSERIQAAWNRKKELISEGIKISKRCPAWLKLNDDRKSFSVIPDKVETVKRCFQLRLEGKSIWEIVRTLNDEGHQTLNQYKAGKFGQTSVQDLLKNRSVIGYFTPKGCEEISGYYPAIIDETTFYKVQQLSHYRYGRKPVSDKPLSVNLFKGVIRCSECGHALIITGFSDTRSGIYRCPLRNENRCSAKGLSRKQTDGTLLALLSRLDRFDSDTTNTIDTLKLHREHISSNIEKLVQLSLEIEDLSAITSKLKQLKGELSQVDADIEKETQRLKSIDVGCLSDCDLTTKAGRIEAQLIIRSAVKEVVLNTAKRRCKVTFHNGKVIGLPITENPSEDVTEAIQSLSEVTERGLIDVDVVEI

SEQ ID NO: 5555 - protein, 507 aa, synthetic construct
MKRVISYIRFSSERQAKGDSLRRQSKMVTDWLKAHPEYYLDQDLSFRDLGVSGFTGKHLKGGLGDFLTAIEKGLVKAGDTLLIESLDRLSRQDVDRASELLRNILRSGVDVVTLSDGEHYTRESLKDPLALIKSILIMQRAHEESLRKSERIQAAWNRKKELISEGIKISKRCPAWLRLNDDRKSFSVIPEKVETVKRCFQLRLEGKSIWEIVRTLNDEGHQSMSQYKPGKFGQTSVQDLLKNRSVIGYFTPKGCEEISGYFPPIIPETDFYKVQQLSYARYGRKPASDKPMAVNLFKGVIRCSECGHALIITGFSDTRNGIYRCPLRNENRCSAKGLSRKQTDGTLLTLLSRLDRFDSDTTNTIDMLRLHREHISSNIEKLVQLSLEIEDLSAITIKLKQLKGELSQVDADIEKETQRLKSIDVGCLSDCDLTTKAGRIEAQLIIKSAVKEVVLNTAKRRCKVTFHNGKAITLPITENPSEDVTEAIQSLSEVTERGLIDVDEVII

SEQ ID NO: 5556 - protein, 547 aa, synthetic construct
MKLLVTYIRWSTKEQDSGDSLRRQTNLIDAFYAKHKDDYYLLPAHRYVDKGKSGFHQQHKNQGSDFRRMFENVMSGAIPEGSLIVVENFDRFSRADIDTAIDDVRQILRKGVSILTLGDGELYDKSALTDPVKLIKHIIIAERAHQESLVKQKRIAQVWNHKTQLARELKKPMGKQAPGWLELSDDGSHYIVDEDKASLVNIIYDKRLSGMSMFAICKWLNEQGYPTINQRKVRISKTKKPDGNWSALSVKHILTSRSVLGYLPAKISTEDRKTVLREEIESFYPQIVTDSKFYAVQQLLEETGKGKTSSGEHWLYVNILKGLIRCKCGLVMTPTGIRKPVYQGTYRCNGNKESRCSYGTVSRKLLDTQLCSRLFSKLSQLHDEATDTAKLDELQRRLNTVDSELEKLTETLIQLPNITQIQEALRVKQEEKDELIVQLSREKARVKSVSSLDLSGLDMESVEGRTEAQIIIKRLVKEIVVSGNEKLVDIYLHNGNMIRGFPLDGKDDHTLTLEEATDEMQPLDDMLIFGEPVTRIYPAGDMEEVDA

SEQ ID NO: 5557 - protein, 559 aa, synthetic construct
MKTKLYSYIRFSSMRQSDGSSYERQIRMAREIAAKYDLELVNDYQDLGVSAFKGANSKTGALSRFLDAIGRSVPVGSWLFIENLDRLSRADIVSAQELFLSIIRRGITIVTGMDNKIYSLDTVTANPMDLMFSILLFIRGNEESQTKRNRTNSSALIKIKAHQENPQNPAVAIEEVGKNMWWTDTTSGYVLPHPVFFPVVQEIVELRKNGRSTAEILDHLNETYAPPPAVSNKKHSKWSRAMVERLFHTRALIGIKEISVDGVNYELKDYYPRVIDDPTFYHLKKNIGARAWNFGDKEEVKPIPLLSGIGLLKCDHCGCAMVKVKGTNKRSDQYRYTCDATRSRRLDCEHPNWSFRGDQLEKAVLQLLADKIWIAEDKANPVPALKVQVDEISRKIDNLIALSAMTGATKELADQITTLNSERETLYNQIKMAEEEMYSVDSQGWEKLAEFDLEDVYNEERLKVRFKIKQALKRIGCSRIDRNKNLFVLEYIDGKTQRVVIENSRGTRKGQIFVDLKTINDRQILESNGLVLHPCLDMLTDKNWKPEEEIPGPLQEFGI

SEQ ID NO: 5558 - protein, 481 aa, synthetic construct
MKTMNKVAIYVRVSTTNQVEEGYSIDEQKDKLSSYCDIKDWNVYKVYTDGGFSGSNTDRPALESLIKDAKKRKFDTVLVYKLDRLSRSQKDTLHLIEDVFIKNGIEFLSLQENFDTSTPFGKAMIGLLSVFAQLEREQIKERMQLGKLGRAKSGKSMMWAKTSYGYDYHKETGTVTINPAQALTIKFIFESYLRGRSITKLRDDLNEKYPKHVPWSYRAVRTILDNPVYCGFNQYKGEIYPGNHEPIISKEEYDKTQSELKIRQRTAAENVNPRPFQAKYILSGIAQCGYCGAPLKIMLGVKRKDGSRLKKYECHQRHPRTLRGVTTYNDNKKCDSGFYYKDKLEASVLKEISKLQDDADYLDKIFSGDNAETIDRESYKKQIEELSKKLSRLNDLYIDDRITLEELQSKSAEFISMRGTLETELENDPALRKNKRKADMRKLLNAEKVFSMDYESQKVLVRRLINKVKVTAEDIVINWKI

SEQ ID NO: 5559 - protein, 507 aa, synthetic construct
MKRVISYIRFSSEKQAKGDSLRRQSKMVTDWLKAHPEYYLDQDLSFRDLGVSGFTGKHLKGGLGDFLTAIEKGLVKAGDTLLIESLDRLSRQDVDQASELLRNILRSGVDVVTLSDGEHYTRESLRDPLALIKSILIMQRAHEESLRKAERIQAAWDAKKEAAKAGIKVSKRCPAWLKLNDDRKSFSVIPEKVETVKRCFQLRLEGKSIWEIVRTLNDEGHQSMSQYKPGSFGQSSVQDLLKNRSVIGYFTPKGREEIAGYFPPIIPETDFYKVQQLSYSRYGRKPASDKPLSVNLFKGVIRCSECGHALIITGFSDTRNGIYRCPLRNENRCSAKGLSRKQTDGTLLALLSRLDRFDSDTTNIIDMLRLHREHVSSNIEKLVQLSLEIEDLSAITSKLKQLKGELSQVDADIEKETQRLKSIDVGCLSDCDLTTKAGRIEAQLIIKSAVKEVVLNTAKRRCKVTFHNGKVIDLSITENPSDNVTEAIQSLSEVTERGLIDVDEVII

SEQ ID NO: 5560 - protein, 507 aa, synthetic construct
MKRVISYIRFSSEKQAKGDSLRRQSKMVTDWLKAHPEYYLDQDLSFRDLGVSGFTGKHLKGGLGDFLTAIEKGLVKAGDTLLIESLDRLSRQAVDRASELLRNILRSGVDVVTLSDGEHYTKESLKDPLALIKSILIMQRAHEESLRKSERIQAAWDAKKEAAKAGIKVSKRCPAWLKLNDDRKSFSVIPEKVATVKRCFQLRLEGKSIWEIVRTLNAEGHQTLNQYKAGKFGQTSVQDLLKNRSVIGYFTPKGCEEISGYYPAIIDETTFYKVQQLSYARYGRKPASDKPMAVNLFKGVIRCSECGHALIITGFSDTRNGIYRCPLRNENRCSAKGLSRKQTDGTLLALLSRLDRFDSDMTNVIDTLKLHREHISSNIEKLVQLSLEIEDLSAITSKLRQLKNELSQVDADIEKETQRLKSIDAGCLSDCDLTTKAGRIEAQLIIKSAVKEVVLNTAKRRCKVTFHNGKIIDLPITENPSEDVTEAIQSLSEVTERGLIDVDVVEI

SEQ ID NO: 5561 - protein, 606 aa, synthetic construct
MKKVFVYHRVSSDQQLDGSGIARQAELLEAYLKRTNILAEMDDPEPVIITESGGVSAFKGHNMLITSGLGAWMQEVRAAMWDGSHLVYENGDRFSRQNPFTVIGYINDLINHNITIHDATMNIIISRQNSAMLPMVLMNAQRAYDESKYKSDRIRKGWAKKREQAFNKGTIVTNKRPQWIEVVKDKYVLNEKAAVVKEIFALYQTGMGCPTIAKKLQGKEGEQYKFNRPWTGELVHKILTNRRVTGKIFISETIRNHADIENPVTQKKYDMDVYPVVINEEEFELVQELLKSRRPNAGRVTVKKDGQEEVLIKSNLFSGIARCTECGGPMYHNVVRAKRTPKKGDPKIEEYRYIRCLNERDGLCENKAMTYETVERFVVEHLLGMDLITVMKEQEFNPEIEVLRIQIDQVKEQITNYENGIERRKSAGKIITFDMREDLDDAKSELERLLARQASLATVQVDVAVLQDVNVTELYNVNNVDIRTRYENELNKIVSTIRLKRNGTSYTIDISYKQNELKRHVLFVENKKKEQTLISEVIIEDVDGGKFYYTPSFMIRLEDGEIRFQHTNEDLSIVDYSLLLNYVDAVDRNDTVGVWMRNQFNFLTSN

SEQ ID NO: 5562 - protein, 547 aa, synthetic construct
MKLLVTYIRWSTKEQDSGDSLRRQTNLIDAFYAKHKDDYYLLPAHRYVDKGKSGFHQQHKAQGSDFRRMFENVMSGAIPEGSLIVVENFDRFSRADIDTAIDDVRQILRKGVSILTLGDGELYDKSALTDPVKLIKHIIIAERAHQESLVKQKRIAQVWNHKTQLARELKKPMGKQAPGWLELSEDGSHYIVDEDKASLVNIIYDKRLSGMSMFAICKWLNEQGYPTINQRKVRISKTKKPDGNWSALSVKHILTSRSVLGYLPAKISTEDRKTVLREEIESFYPQIVTDSKFYAVQQLLEETGKGKTSSGEHWLYVNILKGLIRCKCGLVMTPTGIRKPVYQGTYRCNGNKESRCSYGTVSRKLLDTQLCSRLFSKLSQLHDEATDTAKLDELQRRLNTVDSELEKLTETLIQLPNITQIQEALRIKQEEKDELIVQLSREKARVKSVSSLDLSGLDMESVEGRTEAQIIIKRLVKEIVVSGNEKLVDIYLHNGNMIRGFPLDGKDDHTLTLEEATDEMQSLDDMLIFGEPVTRIYPAGDMEEVDA

SEQ ID NO: 5563 - protein, 507 aa, synthetic construct
MKRVISYIRFSSERQAKGDSLRRQSKMVNDWLKAHPEYYLDQDLSFRDLGVSGFTGKHLKGGLGDFLTAIEKGLVKAGDTLLIESLDRLSRQDIDIASELLRNILRSGVDVVTLSDGEHYTRESLRDPLALIKSILIMQRAHEESLRKSERIQAAWDAKKEAAKAGIKVSKRCPAWLRLNDDRKSFSVIPEKVETVKRCFQLRLEGKSIWEIVRTLNAEGHRSMNQYKPGKFGQTSVQDLLKNRSVIGYFTPKGCEEISGYYPAIIDETTFYKVQQLSHSRYGKRSVSDKPLSVNLFKGVIRCSECGHALIITGFSDTRNGIYRCPLRNENRCNAKGLSRKQTDGTLLALLSRLDRFDSDMTNVIDALKLHREHISNNIEKLVQLSLEIEDLSAITIKLKQLKGELSQVDADIEKETQRLKSIDVGCLSDCDLSTKAGRIEAQLIIKSAVKEVVLNTAKRRCKVTFHNGRAITLPITENPSEDVTEAIQSLSEVTERGLIDVDVVEI

SEQ ID NO: 5564 - protein, 547 aa, synthetic construct
MKLLVTYIRWSTKEQDSGDSLRRQTNLIDAFYSKHKNDYYLLPAHRYVDKGKSGFHQQHKAQGSDFRRMFENVMSGAIPEGSLIVVENFDRFSRADIDTAIDDVRQILRKGVSILTLGDGELYDKSALTDPVKLIKHIIIAERAHQESLVKQKRIAQVWNHKTQLARELKKPMGKQAPGWLELSEDGSHYIVDEDKASLVNIIYDKRLSGMSMFAICKWLNEQGYPTINQRKVRISKTKKPDGNWSALSVKHILTSRSVLGYLPAKISTEDRKTVLREEIESFYPQIVTDSKFYAVQQLLEETGKGKTSSGEHWLYVNILKGLIRCKCGLVMTPTGIRKPVYQGTYRCNGNKESRCSYGTVSRKLLDTQLCSRLFSKLSQLHDEATDTAKLDELQRRLNTVDGELEKLTETLIQLPNITQIQEALRVKQGEKDELIVQLSREKARVKSVSSLDLSGLDMESVEGRTEAQIIIKRLVKEIVVSGNEKLVDIYLHNGNMIRGFPLDGKDDHTLTLEEATDEMQSLDDMLIFGEPVTRIYPAGDMEEVDA

SEQ ID NO: 5565 - protein, 507 aa, synthetic construct
MKRVISYIRFSSEKQAKGDSLRRQSKMVTDWLKAHPEYYLDQDLSFRDLGVSGFTGKHLKGGLGDFLTAIEKGLVKAGDTLLIESLDRLSRQDVDQASELLRNILRSGVDVVTLSDGEHYTKESLRDPLSLIKSILIMQRAHEESLRKSERIQAAWNRKKELISEGIKVSRRCPAWLRLNDDRKSFSVIPEKVETVKRCFQLRLEGKSIWEIVRTLNDEGHQSMSQYKPGKFGQTSVQDLLKNRSVIGYFTPKGCEEIAGYYPAIIDETTFYKVQQLSYSRYGRKPASDKPLSVNLFKGVIRCSECGHALIITGFSDTRSGIYRCPLRNENRCSAKGLSRKQTDGTLLALLSRLDRFDSDMTNTIDTLKLHREHISSNIEKLVQLSLEIEDLNAITNKLKQLKNELSQVDADIEKETQRLKSIDVGCLSDCDLTTKAGRIEAQLIIRSAVKEVVLNTAKRRCKVTFHNGKSITLPITENPSEDVTEAIQSLSEVTERGLIDVDVVEI

SEQ ID NO: 5566 - protein, 478 aa, synthetic construct
MNKVAIYVRVSTTSQVEEGYSIDEQKAKLSSYCDIKDWNVYKIYTDGGFSGSNTDRPALESLIKDAKKRKFDTVLVYKLDRLSRSQKDTLHLIEDVFIKNGIEFLSLQENFDTSTPFGKAMIGLLSVFAQLEREQIKERMQLGKIGRAKAGKSMMWAKTSYGYNYHKETGTVTINPAQALTIKFIFESYLRGRSITKLRDDLNEKYPKHVPWSYRAVRTILDNPVYCGFNQYKGEIYPGNHEPIISKEEYDKAQSELKIRQRTAAENVNPRPFQAKYILSGIAQCGYCGAPLKIMLGVKRKDGSRLKKYECHQRHPRTLRGVTTYNDNKKCDSGFYYKDKLEAYVLKEISKLQDDADYLDKIFSGDNAETIDRESYKKQIEELSKKLSRLNDLYIDDRITLEELQSKSAEFISMRGTLETELENDPALRKNKRKADMRKLLNAEKVFSMDYENQKVLVRRLINKVKVTAEDIVINWKI

SEQ ID NO: 5567 - protein, 514 aa, synthetic construct
MMAVTPVPTICGLYTRVSTRNQADTEYSSLETQREKLEAYCKSQDQYVIYRVYEDAGFSADTMNRPALKEMLQDIRTGRISCVLAYKIDRLTRSVKDFHVLMDLFDRHGAKFVSITQSLDTHHPMGRLLRNILLDFAQFEREMTADRTRDKMQQRATKGLWNGGNIPFGYQNEDKRLVKHPEEAACVQFMFQHFAQDPSLTGPAELQRRGWFPRTGKPWGKMTLDYILTNPIYCGRIQFNDQLFPGEHEALIEEGLYHKVQSLPREHSRAETKIQRTFLLKGLLRCSVCQSVMTPHYTQKRRKDQSINQIAYYRCTKTMQHNNAVCTIKALNADTVERQVIEYLSTLSQQAEWVKVTVEELNRDQKEQVRPLEQEAIRLRASLNRLEREIDRLVRGVGQGTVSVQRLEEEMRRQQQEQHSLETQYQAVQRQIQEHTAREYDSEVVLRNLRSFQRIFAALLPKEKMEVLRCLVRDIVVHPDKLVFNIFELAEVGTSSQERKGWLPGQDSNLRPAG

SEQ ID NO: 5568 - protein, 481 aa, synthetic construct
MIATNKVAIYVRVSTTNQVEEGYSIDEQKDKLSSYCDIKDWNVYKVYTDGGFSGSNTDRPALESLIKDAKKRKFDTVLVYKLDRLSRSQKDTLHLIEDVFIKNGIEFLSLQENFDTSTPFGKAMIGLLSVFAQLEREQIKERMQLGKLGRAKSGKSMMWAKTSYGYDYHKETGTVTINPAQALTIKFIFESYLRGRSITKLRDDLNEKYPKHVPWSYRAVRTILDNPVYCGFNQYKGEIYPGNHEPIISKEEYDKAQSELKIRQRTAAENVNPRPFQAKYILSGIAQCGYCGAPLKIMLGVKRKDGSRLKKYECHQRHPRTLRGVTTYNDNKKCDSGFYYKDKLEAYVLKEISKLQDDADYLDKIFSGDNAETIDRESYKKQIEELSKKLSRLNDLYIDDRITLEELQSKSAEFISMRGTLETELENDPALRKNKRKADMRKLLNAEKVFSMDYENQKVLVRRLINKVKVTAEDIVINWKI

SEQ ID NO: 5569 - protein, 562 aa, synthetic construct
MSKEKIKVYLYTRVSTSIQIDGYSLEAQKTRMKAFALYNDYEIVGEYEDAGKSGKSIEGRAQFTRMMEDIKSGKDGVSFVLVFKLSRFARNAADVLSTLQTMQDFGVNLICVEDGIDSSKDAGKLMISVLSAVAEIERENIRVQTMEGRIQKAREGKWNGGFAPYGYQLVDGKLFINEEEAVAIRTIFEQYVNTTIGANGLSKYLENHGIRKIPRQNGKNPLFDAGLIRKILKNPVYKGKIAFGRRTLEKVHGTRNEYKQVEQDEYLIAEGIHEAIISDELWQAAQVKLKSQAKKYEHVNKGKDVRTHLLSGIVKCPICGVGMFGNKCIKKKKDGTKYKDFYYYGCKHRQMIRGHKCTFNKQIREELLDDAVAELIIKIVSNPKFASIMQEKINMKVDTSEIEKEIDNYQKELRKSHSIKFKLIEEIDNLNVDDKHYMRRKQDLDDRLYRMYDKIEELESLLIDAKAKKQTIEAEKLTGDNIYKVLIYFDKLYNVMNDVERRQLITALISEIQIYEEKQPNGQWLKSITFKLPIIDEDLNISLDNDKQVDESYPNDLHGNII

SEQ ID NO: 5570 - protein, 379 aa, synthetic construct
MHLFLQFIKNKKDAEFVGVYYDQGISGKLAKRPGFQQMLEDCRTGKIDVIHTKSISRFARNTELLLAVSRELKTIQVDIFFEEQNLHTLSNEGEVMLTVLASYAEEELRNMSENQRWAFQKKFQRGELVINTKRFLGYDKDENGELIINPEEAKIVKRIYNLYLSGMGVHVIAKLFNEEEVPTVDGGRWYSSTITNILKNEKYKGDAILQKYYFAEIKAKQRLNQGQVQQYLITDNHEAIVSREDWEAVQKRLKHNRKANLSIDYNRRYPLSGLLKCEHCGSTLKRQKYYKGKVVWVCSKYIREGKASCIGMRVPDTAVQDWSIHEPTVVKEENIGGKKYYSYSSKENDTSRAEATHSENPDGGLLPSVHRPRRTAIKL

SEQ ID NO: 5571 - protein, 435 aa, synthetic construct
MAAYCRVSTDQDEQLSSYENQVRYYQDYIRQNTLYELVDIYADEGISGTNTKKRTEFNRLIADCRKGKVDRIIVKSISRFSRNTLDCLKYVRELKELGIGVTFEKENIDSLDAKGEVLLTILSSLAQDESRSISENATWGIRKKFERGEIRVDTTKFVGYDKGENGNLVINEEQAKIVRRIFRDFLQGETPESIARSLKEEGVPGWNGKVNWYPTTIQRMFQNEKYMGDALLQKTYTVDFLTKKRSENQGQVNQYYIEGNHEAIIDKEEWEFVQLEIERRNRFRQDNHINFYIIQCEQNPFTCKVFCKECGSLFGRKNWTTSRGKRPVWQCNNRYKVKGIQGCTNRHIDEETLQQAFLRAIEFLQENKEKLCEKWSNFSDEQKLEKYHAAQLDELLDSVQEEFNGRKMCQVLEKITLGEDGCITVKFLEGTKVNL

SEQ ID NO: 5572 - protein, 520 aa, synthetic construct
MKRADLYIRVSTDEQADKGYSQRDQEERLKRYCATNKITVGQVIYEDHSAKTFNRPEWIRLLNSLKKRSSKTDLILFTKWDRFSRNAGDAYQMISTLNKLGIEPQAVEQPLDLSIPENKMMLAIYLSAPEVENDRRALNTFYGMRRARKEGRLMGKAPFGYINRSKEDGRKYIAPKEPEATAMLWAFNEIAKGVFACDQVRQKMNTLHKTTISRSAFHVAVRNPLYYGKIFIAKFKDEEAQLVQGQHESLISKELFDRVQLILDGNKRVERPNTKILSDENLPLRGFLVCPECGRNLTGSASKGRTSRYYYYHCVSSCGFRQKAELANDIFEKSMRQFALNGTSQIVKRLLLDNYKKFVKNPFDEKKQIAQEIDKLNARLSVARNKLLSEIIDDEEYLEIKDECRQRIQSLEEQLSKDGSDTKKINIEKSLDRALKYIENIPKMYSEGEIRTRRDIIGSIFPEKLEFDGKTYRTTRMNVIANYIFQINSRLLPKKNRTNENQFHLSCLVAPSRIELLSKV

SEQ ID NO: 5573 - protein, 515 aa, synthetic construct
MYRPQELDVFIYLRKSRKDLEEEKKAMEHGQHYDTLERHRTQLLELAHKEHHNIIDILEEVVSGEYISERPMMQKLLREVESGIANAVLVMDLDRLGRGDMVDQGTIYRVFRYSETFIITPTEIIDPNDENQELTFSIKSLIAREELKTIVKRMQRGRRVSAKEGKSISRVPAYGYLRDNNLKLYPDPEKSWVIPKIFELMANGMGRQAIAQELDRLGISPPEGEYWNPSTISSITKNEVYLGHIIWGKIRYTKQNGKYIRKKVPKERWQRHDHAHTPLVSEALFQKANMAHSKRWRPPTIKTKKLSNPLAGILLCELCGHSMLYQPRKDRPNPQVRCVQSSCKGVQKGASLALVEQRILDGLKQIIESFEIQENMVQKKKIKNNIQFQQKALEKKAQQINDLQKQKGNLHDLLEKGIYDIDTFLERQKSIVVRLKTTQEEIEQLEQEINQTLEQEKHIHKFVPKIKTVLEAYYAITDVEKKNYLLKSVLKKVTYLRKQEWRRKDEFVVELYTKI

SEQ ID NO: 5574 - protein, 478 aa, synthetic construct
MTNQAEKTSYIENVAAYIRVSTQEQKLHGISIEAQEEKLNEYADSHGMKIVKFYKDEGVSGRKLIRKRPALQAMIQDAEKGNFRRIIFIKLDRFFRSVAEYHECMKRLAAGGVIWTATEEKYDLSTPSGEAFVNMKLTMAQFEADQVGERIRMINEYKVKSGQPLYGSQALPFCYQVKQSGDGDRRKYIAKRDEIIMEDLIDHFCKNRSVRAALHYINAKYSRAFSYSTIKNALTSELICGTYRGNPAYCEGYMTPAAFETMQKYIQHNPRTSQREHSYIFGGLIRCPCCGNMLVGSPTVLNRIGKSGQKLSYKYYGYRCYRGNLEKKCDFRTMAFEHRLEAIMLSEVEAVMRGKQMYLLRLQNAPQRVAQHDLAELQQELARLNYAWQKGRIKTAADYDRQYDDLMTRIDAANAERQELAANPDYRKISRILSDGWKQLYISLDNDHKRAFWRAFIEEIQLEWTKDVKRIRDITFFT

SEQ ID NO: 5575 - protein, 552 aa, synthetic construct
MTEEKQRFAVTYQRFSSVRQVGNSSLDRQTDTQKAWLRQNPNVTVIDNFVDKAMSGWSGKHLKEGSLGQLMKAIEDGIIQPGTLILVEHFSRLTRQNIDNAEELVKRIWKAGITLVTVRDNTEYPPEAVNNMSLRIRLIVEMEQAFKESEWRSAKVKASYTRREKLAKEEGKAPRIRKPFWLNPDGTLNHLHQAVKDMFNWYLDGLGQQRIVVRLREKYTDTAIQKINPSTVMRWIQSEIVRGYWRGNRVYEPAVDDQLFFDVQAIHKSRLYKNVKPDRQWPLSGLMQCGVCGRGMSIQKSGKSNPVVRCSSKQRDHSCDRKTTFPYFIVHIYMMTHVLQHAIRLHSDKSSNKGLQIELGKVERKLATTRKKLNDEKEFYNKASNEGQNTTMILQLMNETYQKVEELEEQEKSLKASLKQSNRAVSAESRDLLFTPETFNLEMHKLGFKIVVGEEELSTIGFDKPVSKMVYLGYCRKERAYKYADGSSDFVKVWPSSLVTDELLNMQMLKNYINSSSGLKYIWDHIYDDDLEEKLKKRSKEQKEKKLKEKGE

SEQ ID NO: 5576 - protein, 584 aa, synthetic construct
MTQMYSYIRWSSDRQELGTTLQRQITGAKEFAIQQGLELVEVIDAGVSAFKGKNTTDGKLGDFIAAVEAKAIPSDSWLYVENLDRLTRQEVTTAQELFLKLLRLGLTVVTGMDKRVYTIESVNRNPTDLMLSILLFSRANEESKTKQARTIGNVETLIERHKKGEPVNIKSAGKHPFWVDDSGSQYEVIKPHPKYWQIAREALDMFLEGHGIYKVKRYLDDQYPNELNGKEWDYQVIKRMRESRALIGERKLNVQKRTYILENYYPALCKSESEFLRLQELRVQNGHKSKKDPNKDNIKLMSGLSILRCARCKGTMHGYLNKGKPRYICVNGKHKQKGCSAWSVTAPLVEQCIIICLLMEYLDSSRDTSQNVSDIESAIESKQNLLETCSNKVKNLVSLVENGVGNISELSDRLIELGKERDGLIKQISNLSDKKILMEGKGSFEDTMIDFIGMIRWDTFNDITDESRNKIRNNISSIIETAFLDKIDGCLSIKVKCIGSDILYVFTGDMMKPQWKFYTEHYVDGESSLVSTNDDLLSHEKMKTIINTEKEIQNTYQKYFKTVMGLLSTVGYPEINGSAFWPNR

SEQ ID NO: 5577 - protein, 494 aa, synthetic construct
MLYHIYSRISSTKQTQGVGLDRQEQLALDYAKRNNFEVANISSDVASAYHSKHMEGKLGAFMESIATKEIVVPCGLIVESLDRLGREHELTALSRFIDIVQSGVEIHEVSTGIIYNQKDTHLLHVALSIMTRAYNESLMKAKRSNDAIQRKLGEAQNGKIIRTNVPAWIDVQGDKLVLNEHQTTVKSIFDMYLSGMSFRPIARTLNTGNVPYMAPKIAKKGPNNGSYNWTSSRILTVLASSAVYGVYTPKTGEPIENYYPACVDEATWLKAKEIRESRKVHAAKVNDLLSVLSSCCVCSLCGLSYIANLRSWETKEGKQTSVGMRCNSRQMGSTCKGKLVPNEHLEKYILPLVPNLDITKLNRTKMKTLDNLKARHQQLTEQQSTLLDLVVMGSAAAKEKFIQLEEKIEILKEKIEKAQARIVVDATEDVSLLALDTQNLEIRRKVNTALQLMELKVHVECTQTGTAKIKMQLKNVTVHEGTLKWSRKKRIDSK

SEQ ID NO: 5578 - protein, 567 aa, synthetic construct
MSHPPKAYSYIRFSTPKQAQGDSYRRQLAKAKEYCTEHNLTLVEDTIDDRGVSAFRGANMMEGALGRFLEAVKSGVIEQGSYLLVESVDRLSRQAVEEALGQFLGLINAGVVVVTLDDKAVYRKGQVETQNLLLSIMFMVRANNESETKSDRSREAWEKGRKQARENNKVMKNSRLPSWLEWEEGKIVPIAERVAIVNEMFEMAKSGCGYEQIAKAFRSKGYKTFGKMTDWRPAGIQAVIKSRAVIGEFQPHIIEKGERIPDGEPIVGYYPAIVSRSLFKDVHHIISQRNNHSGSYRKGRFNNLFSGVLRCQCGEPLRFNNKGKAGSPRNYLICPMRQVAGCKLPNLLHEKIELQLLQAASLLSEVMKQRRPEDAKTVALKEELAELQMQLEIGIKKRKKAAESMVDNDDDADFREIFLSHKANCQALEEHIAQLESEIMDRELSQKTLGRLIQPKDLKSTEQRQQFNAQLKAVLQEIRLHYDGFDLAAVFKDIDGSIVLEQAFKPKLAGSSVRDLSGEELLRTTSEAPYIDAAWVKGETDEYESHRKDASSGLDDEFEDLSLQESK

SEQ ID NO: 5579 - protein, 503 aa, synthetic construct
MKPRAWLYARFSSTQQQDGDSINRQVNAAQQWCMTNGVELQKTSFRDLAVSGWKSIKRPMFEQLIKAMAEGKIPRGSYVLFESTDRLSRRGWWHTQQLIRTITCVHDCKLVILDKGQIYTKENVNDVGQNIMLMVSADMAEKESQRKSDLVSAAYRSKRQDGDVSRWPFWIDKTDNGFVLNDNADTIRLIIELRLKGVGALGIAAELNRRGIKSSRGGSWGHTSVRVVLSNSALYGTKDFYSMKTIAKFDEHGEEIRVADNQLVQSMPDVFPPVCDFTTWQQIQINGEKPGRKGTLSPFHNILFCQCGAALGLQVGSAGERYRKCARSKVGSCDQKMIRNFDETLIECLGRITYVSSAIQKDEVPELRARLVKLEGVKDALVAAGALDALVDVYKDIAKAKDAIAAAQKVAVVPTTELKEVFAGSIDEQRIALKRLVEKVVVTRVGNTAHVKVHLTNGHFKVFGVNVGVKRASGKNTIFTKSDTEKLANWVSVATDELHPWET

SEQ ID NO: 5580 - protein, 567 aa, synthetic construct
MSRSPKAYSYIRFSTPKQAQGDSYRRQLELATEYCQKHQLQLSDKALEDFGVSAYRGSNRTNGALGRFIDAVKDGKIKEGSYLLVESVDRLSRQAIEDALRQFLEMIGLGIVIVTLIDGRVYKSGDVDITSLLVSIVSMARANDESKTKSKRSREAWENGRKHARENNQVMKNSRLPSWLKLEEGKIIAIPERVKVVNEMFELAKSGCGYEQIAKIFLEKGYKTFGKKADWRPAGIQAVIKSESVIGVFHPHQIKDGKRIPEGDPIWGYYPAIVEPMLFNEVKHIINQRNNHSGSYRKGTYNNLFSGILRCQCGESLRYQNKGRAGSPRNYLVCPKQNITGCNLPNMLYDKVEPQLLQAVSILSEVMQRRVGENEKFLSLQEQLATLIAQLDVESRKKDKAAQSILDFDDDATFRNAFVKSKASCKVLEEKIRELENELMSLELSEKTILNLLKPEELISTEQRQLFNSQLKAVLKEIKFSYDGYDLAAVFKGLDDKFMLEQAFKPKLAGSSVRDLSGEELLRTTSEAPYIDAAWVKGEIEEYALHRKDVSSGLDDEFEDLSLQESK

SEQ ID NO: 5581 - protein, 567 aa, synthetic construct
MSRSPKAYSYIRFSTPKQAQGDSYRRQLELATEYCQKHQLQLSDKALEDFGVSAYRGSNRTNGALGRFIDAVKDGKIKEGSYLLVESVDRLSRQAIEDALRQFLEMIGLGIVIVTLIDGRVYKSGAVDITSLLVSIVSMARANDESKTKSKRSSEAWENGRKHARENNQVMKNSRLPSWLKLEEGKIIAIPERVKVVNEMFELAKSGCGYEQIAKIFLEKGYKTFGKKADWRPAGIQAVIKSESVIGVFHPHQIKDGKRIPEGDPIWGYYPAIVEPMLFNEVKHLINQRNNHSGSYRKGTYNNLFSGILRCQCGESLRYQNKGRAGTPRNYLVCPKQNITGCNLPNMLYDKVEPQLLQAVSILSEVMQRRVGENEKFLSLQEQLAALRAQLDVESRKKDKAAQSILDFDDDATFRNAFVKSKASCKVLEEKIRELENELMSLELSEKTILNLLKPEELISTEQRQLFNSQLKAVLKEIKFSYDGYDLAAVFKGLDDQFMLEQAFKPKLAGSSVRDLSGEELLRTTSEAPYIDAAWVKGEIEEYALHRKDVSSGLDDEFEDLSLQESK

SEQ ID NO: 5582 - protein, 571 aa, synthetic construct
MSRPPKAYSYIRFSTTKQAQGDSYRRQIQQAIDYCTEHNLQLDEKAIEDFGVSAFRGSNRIDGALGRFIEAVKGGAIEKGSYLLVESMDRLSRQTILKALSQFIEILNAGIVIVTLSDGEIFRVTDDGKDFDFAKLIISIVYMARANDESEMKSLRSRAAWSNGRKAARESKKVMKNARLPSWLTREGERIVPIPERTAIVSEMFEMAQSGCGYEQIAKVFLEKGYKTFGKEADWRPAGIQAVIKSRAVIGEFQPHVIENGERVPDGEPILGYYPTIVSPAVFEEVQHLIGKRSKHSGSYRKGTYSNLFSGVLRCQCGESLRYGNKGRAGSPRYYLMCPKHNTHGCSMPHLLYSKVEPQLLQAVSLLAVVMEQRKTTTEKMMALKDGLATLRRELELEVKRRKKAAQSMLDNDNDADFRELFIQCKANCQALEEQISQLENELMSRELSEKTLSQNLSSEDLDSTDQRQRFNGQLKAVLREIQFSYDGYDLAAVFKDIDGEFMLEQAFEPKLVGSTVRDRDGMTLIKTIAEAPYIDANWVKDEIDEYESFQKESDSEFDDDFEDLSSEESK

SEQ ID NO: 5583 - protein, 568 aa, synthetic construct
MSRPVKAYSYIRFSTPKQAQGDSYRRQLQQAMDYCAEHNLQLDDKTIDDFGTSAFRGANMSEGALGRFVDAVKHGEIEQGSYLLVESVDRLSRQAVEEALEQFLAIVRAGIVIVTLSDKQVFRRGQVDFTKLIVSIVYMARANDESEMKSRRSRAAWSNGREQARKNNKVIANSRLPSWLTRDGEQIVPISERVAIVNEMFEMAKSGCGYEQIAKVFLDKGYKTFGKEADWRPAGIQAVIKSQAVIGVFQPHVIENGHRVPADEPILGYYPTIVSPALFEEVQHLISKRNKHSGSYRKGTFNNLFSGVLRCQCGESLRYQNKGRAGSPRNYLVCPKQNTAGCKLPNMLYGKVEPQLLQAVFLLNRVMKQRVEGEDKTIALRTTLAELRVQLEVETQKRKKAAQLVLDNDNDADYRVLFEQCKKKTQALEKQIQRAESDLMSRELSVKTLKYFVDPEDLRSTEQRQRFNGQLKTALKEIRFRFDGGYLWAEYMDIDGGRVLTQIFEDKLAGSSIYDGSSYLVRKTQTEAPYGVDPSVMQQEMDDYIRNLQKNDDGTDPDFEDLSSEYSK

SEQ ID NO: 5584 - protein, 541 aa, synthetic construct
MPKAISYIRFSTKIQSVGDSTKRQSKYINDWLKRNPDYYLDESLRFQDLGISGFSGANAKSGAFGEFLAAVESGYIEAGSVLLVESLDRVSRQDIDTAGEQLRKILRSGVEVVTLVDNEWYTKESLKDSLSMIKAMLVMERAHEESAMKSTRLRSVWAAKRERAAKGEIMSKRCAAWLKVSEDRSHFEFIPENVKAVQRVFQLRLEGLSHVKIAKQMNDEGFSTLNQFKSVTGGWSQSSVTELLSNRSVIGFKVPSKSMAVKGVSEIPNYYPSIITDEQFYAVQQLKQGSGRKPSSDLPLLTNLFKGVLRCSECGFIVVVAGVSAKRSGIYKCSMKSEGRCNSVGFSRLQTDKALVQGLLYNTNRLSLNRDSGSAIGTLQSELEQLHKQRERLIKLAMLADDTESMAKDLKALNSQIKDVEKAVSEVHQREQSSQLETISHLDLTVKKDRIEAQIIIKRIVKEIRLNTPGKKCDVFLHNGLKLLNFPLDRVVDGAQWLEVLPLIDGDEFDFEGFTTKPRHIVLEEAPEWVKEIEAQPNQPL

SEQ ID NO: 5585 - protein, 499 aa, synthetic construct
MSKRAVIYARYSSDRQRDESIEGQVRVCEDYAKRNDLTIIHIYADRAMTGRTDQRPEFQKMIRDAALQIFDVVLVYKLNRFARNRYDSAKYKHKLKKQGVRVISAMENIADDPSGILLESVIEGLAEYYSAELAENVTRGMTENALEGKWPGGTVPLGFKLDENRHLIIDEPNATTVRDIYQRILNGQTMASVIKGLNEQNKLTAKGKPFSKNSLRTILKNERYRGTFLWNGIRKENAIPSIVDSSVFEAVQKIMNFRKKSRSCPRQENYLLSGKLYCGSCGEKMVGISGTSKGNTLYYYYACDGKLKKKGCLRKNIRADVLEKIVVDQTTKILSNDEALKAIAAQAVDIQELRKESLNVQSLKNQIKDIEKKLKNCIDAVENGLASESIGNRIEEYEHTLKRLKFALSQELLNGGVQKLTKNRIEYFFMAVREKVKTADRYKSILLSSLIRCVILYDDYIEIQYNYRSELPLLENPVRVKCSNTHSLVDHQGFEPRTP

SEQ ID NO: 5586 - protein, 512 aa, synthetic construct
MPSAFSYVRFSSGKQAKGSSEHRQRAMLGQWLEQHPSFTLSDLRFEDLGRSGFSGEHLDHGLGQLLAAIDSGAIKSGDVILVEAVDRIGRLEPLEMLPLFSRIVKAGVSVITLEDGHVYDRSSVNETSLFLLVAKIQQAHEYSNRLSRRINASYTARREKAKAGLGIKRETPVWLTTDGQLVPHVAPHIAQAFQDYADGLGERRICRKLRESGLEEFSKTNATTVRRWLKNRTAIGYWNDIPDVYPHVVDPALFYQVQQRLDAPKVDRAKPSAHYLTGLVKCAVCGRNYNYKQRKHTDPAMLCTSRARLAGEGCSNSKTYPVIVLDQVRKLTSLPFLQHAMESASSQADPSSQRLAVIDGEIGELSRKISEATKALLVLGFTPEIQESLEQLKTAREALEEERATLLLPQAEKLTTAQLEAFSNGLLDDEPMKLNHVLQTAGYSMVVHPDGSIDVDGKRFVYEGASRKEKVYKLRLIGEDKQWSLPILTPQMATYKSLFMAAVRLPGDPSEV

SEQ ID NO: 5587 - protein, 618 aa, synthetic construct
MAGIKEEKKIYLVGIYCRLSKDDGTDNESASIATQKSILTDYVKKQGWHIAKTYVDDGYSGTNFQRPSFQNMIKDIESGLINCVITKDLSRLGRNYLDCGLYLEVFFPEHNVRYIAVNDGVDTLNKSAMDITPFRNILNEMYAADISVKIKSAYRARFQQGKFMGTTAPYGYIKDPADHNHLLIDDKVAHVVKEIFDLALKGNGVAKICRHLNKQHILRPAAYAAERGETGFERHFEGNEDKRYIWSGNSVRSILRSPIYAGNLVGYKRIAANMKSKKRPSKLPEEWEVIPNTHEGIVTQEEFDIVQQLITSRRLPQNKGGFVNIFAGVIKCVDCGCALRAMNVHRRKRPEIIDCVQYSCNNYARNGRSECSAHNIEARDLFNAVLADINCFADMAVNDEKAVRAIEKRLTETDQSRAKALEKERKKLNKRLAELDRLFSSLYEDKVMERITERNFEMMSGKYQKEQLEIEARLKEVTETLNESYEKSRGIRDFLALIRNYQGLKELDATVINALIDKILVSEREKMADGTVKQEIKIYYKFIGFVDELHIIPTKRWAAMPAKNCTVCGVEYVPGSGASRYCPACAKKIRREKSNESKCRSREQKRIACMNCPQKMTD

SEQ ID NO: 5588 - protein, 580 aa, synthetic construct
MVRRKTALRGVSASTRITKVAIYIRVSTIHQVDKDSIPMQKKDLIAYCQLILGTDNYEIFEDAGYSGKNTDRPAFQDMMGRIRKGEFTHVLVWKIDRISRNLLDFAEMYEELQSLRVTFVSKNEQFDTSTAIGEAMLKIVLVFAELERNMTSERVTATMISRANNGQWNGGRIPFGYSYDSGTSTFSIREDEAVVCRRLKDLYLDNKSLVYTARALNADGYKTRAGADWTPTAVWIIASSPFYAGIYRYNRYKGTENRTLNPEEEWVMIPEHHPAIFTLEEHEAMKSSLKTNARYVDNPVGKPHATANIHIFQGIAYCGKCGNKMVSTPGKKHADGYRPSNYSCPLHRRSKKCDNATVNDMIVGEFAINYILNMLNAKKTFSNIDTPEELQRHLLTGSTFSDISSIEEDGLNDFFNLLSRYGSDNSYVFAIKTPRRKKASVNPELAALRKEKEKQERALQRLQDLYLYSDKSMSEKDFILRKSEISDRLKDINAQLGLITQNPDSLLSDEEFIKQASHLLIQKELKGRKYIYYKNLATSVDPEILRTYMETILDSMYIIDGRISSIVFKNGLTHKFIYKN

SEQ ID NO: 5589 - protein, 501 aa, synthetic construct
MEIQIREGSREQKRKLKVCAYCRVSTDADEQENSLENQVRHYETVIKANPDYEYAGVYSDFAISGFKEKRPGLQKMLADAEKGKIDLILTKSVSRFARNTSIVLEATRKLKELNVGVFFELQNINTLSGEGELMLTILAAFAQAESESGSAGAKMVYQRKYEAGIPVQYLERSFGYTKDERGVFVADEAEAVWVRKIYKMAAEGYTPASIKRYLNENGIKTVGGVQWVDSTVFRLLENEIYKGDYIMHKHFVNEERKLVRNRGEVDAWYIEDDHEAIVSPELWQKAQDALAAKRDYLAEGSVIEEFTEENYPYMNKIYCAKCGYPLYKRIYSKGNRLNWGCSGTKRYGKSFCDGINIPDGVLRSAWHFEENTYIDEKASDKGVKEFTYLKEHSWKRRHKKKQPSAIPENTETEYPYREKIFCALCGSRLVRYVNPQNHKVTWVCNRRKRKGKEACDGTRVPDTVIKGWGEIKNDIYIQRKDNKNGKKRYSYTSKKPSGIRV

SEQ ID NO: 5590 - protein, 678 aa, synthetic construct
MVKKAAILARVSRDRQETESQIKDLQFDAELEGYVVPEEYIFSEKITGMDSYDKEERESLQNLKSVIETKQDIEVVFMWELTRLSRNPYFLIEQLRWFNYRKIPIYFHDLEKWTINRETLVEDFETTNRIFGAATYGQQEWEKIKKRTKRGRDAKARKGLFVGHIADGYKVTLVGLEKHIVLDEERVPLIKDIFNMYTEQQMSTDRIARELNERGILTFNALEAKRNEGNDRFSQVYKKKNTNIELLKSEIKWTASSIGQLLKNRWYIGERQYNKVTYGVPSIISEEQFEKAQHQLIYNKKVITKRRESVYPLKGLLVCGKCGQLMYGHKVRINSSYYCSSLETGKKCGAEGICKQNIDGIIWDYIQYIQFYMLRHYGMAKLSTIFGLENIDKELLQESIDKKKLKIKQKKQRIEDLSIGLAELIIQKSSSVNATIINVFSKKQIQIEKDIDSIENEIKELEVQIAEDERIIDRNASIDETISDKIGEVERSHDMKRVYDIIHQLILRVTLYNLEDYYKLIEIEVSSHRKFYAIYNSRKLKGRYIQVPFTNDDFSYNKETNRFQHRYKFIGMLNTMEIEKEGKMLTREMISKHSEGDIDKLIEVSRERSLPYLLCDFSTTELIGFLGNWHYIRNIRRIELEPSDEEFQKWKEDYKKWDKVRNMRKKEKRKLLKSEVKE

SEQ ID NO: 5591 - protein, 676 aa, synthetic construct
MDKRVIIYCRVSTQQQTTDRQKEELLKFAAENHWNVEEEDIFIDVISGFKKGEFRPEYAKMLERVEHGDIDIILFSEFSRLARNATELLEQIKLFIDRGIHLYFDKQKLWVKDNDKDVGSIILLHVLAVMSSYEIELFVERSLSGKITKVQAGHGGGDERAYGYMHNENKQIVINPIESKIVARIFEMYVGGYSSIQISEILNAEKVPAPYIRKLNEYKKNREAKGLEVKEYKFDTDNLKWRISTINRLMHNELYKGNRRITFYKPDPTNPLPLSERQDREIVYEYSEHMESLRIVSDELFQQAQDKLSKAHYNKNNAVRHENLLKHLMVCGECGANFSVGKSNETSKNYISGGRTYKCYGRVNRKDKPRTCTNGAELRQWKLDGLVLQLSIQMFAEINIQQTNTLRIENIGKEIEELIQIKSSKNTELVEAENLYKKTLKRLIAIEDDEVANNLISDAKHKYDETKNVLRKAMDKLSREITTKRITIDNLKRLNANPLLINKMDEIRKNKDLVKTMIDEYIDKITIFRLHELWLLVVVAYKGGEEMWGTIKCARYKKEEMFYDELHCHYGVEFQGWLLNNTEHCFSYDKSTRTITYHGGSEIYVEFKSGEYDYDTFNQMIQETGWMGCFPFYAYEDSGKDLSAPSNEDFGKSLQENRIDWKAHNEKVLERLLSKS

SEQ ID NO: 5592 - protein, 537 aa, synthetic construct
MKIADLYIRVSTDEQADKGYSQRDQHERLEKYCQQNEITIGQVIFEDHSAKNFNRPEWNNYIQNIKKRSLRSNLILFTKWDRFSRNAGDAYQMIKLLLSNNISPQAIEQPLDMSIPENKMMLAIYLAAPEVENDRRALNTFYGMRRAQKEGRLMGTASYGYINKCSEDGRKYIALKEPEASNMRWAFNEIAKGKYSINQIRLKMNTMAGTKISRTSFYRAIKNPLYCGKIYIKPYKDEDACTVDGKHESLISESLFNKVQMVLSGITTTERPKGKINAAKEFPLRGFLKCPRCGGHISGSGSKGKKSIYYYYHCNSTCGYRYRSNIINCAFEKELQKYEYHEGVNTLLKEIIFTNFKYIQEDIDAQKKEISSQIQSLNNRLNNAREKYLEDRLDYDDYQLIKNECKKKIDDLEISLQNHKLSNKNSDIKLKLDRVIKIVPNLYKLYVQGNDETKNTILCSILAEKLEFHENSFRTPKLNSALSHILLISNKLKDKKKGKSTFENAFSRKVTAEGFEPSLSEPKSEVLSIKLCSRIHQ

SEQ ID NO: 5593 - protein, 495 aa, synthetic construct
MKTAYLYVRVSTDEQKRKGYSLPEQEDRLLKYCKYNNIEVKGIYREDYSAKNFNRPEWKELFSEIKKKSSEDKNILFVKWDRFSRNVEYAYEMIGKLRKYKTTAMAIDQPIDFSVPESTVMLAVYLAVPEAENTRRAQNTSNGIRRAKLMGRYPNKAPIGFINVTLIDGKKAIVPKEPEAEIIKWAFSQAVQNHHKISEISKIANEKGLICSRSYFFRILRNPIYCGIISVKLNSNERQMIKGLHEPLISEALFDQVQSVINTKRKMTAKRDDLKEMFFLRGFLTCPVCGRKLTGSFSKGKQNRYPYYHCDNRCKIRIGAVLLNDSYQNKLQELILADNTMELFKNILENQNIKTQKANYLYAQQLVDRKIKEEKLTLSRGRKLFIAGILKIDDYNELKQESQINTKNLKKEERDITLNLRVIDKMNQMENKTFREIFQKFVEFDTSDKKHLVNLIPPIDIDYKTGDLSLEFKPAFSKILSKKSNRKNNRKNEFH

SEQ ID NO: 5594 - protein, 587 aa, synthetic construct
MKKNFSSKIADLYIRVSTDEQADKGYSQRDQAERLQVYCAKYGIAVENVIFEDHSAKNFDRPEWSKYLKNLKKRNRSDREPRLILFTKWDRFSRNIGEAYHMISVLEGLEVDPQAIEQPLDLKIPENKIVLAIYLSTPEVENDRRALNVFYGMRRARKEGRIMGIPPYGYVNRCTEDGTKYIGVKHPEAENIVWAFEEIAKGELPSEHVRKLMNKREGKDLTRNAFMVAVRNPVYTGKVFISEFENEAAHYVKGKHVPLITEELFDRVQKVLEGKSRRNNSEQGENRVLHNESFPLRGVLICPRCGNTLTASTSKGNTKRYSYYHCNSKCGFRHNSDAVNEKFIENLREFEILPEYRDTLKVILLKNYRKHCSNVDGERQAITEEIDKITQKLSKARDLFLTDRLDEEDYAQVKLECKHKVDELEETLKGLTKASKDQDVPGKLSAALDSISNIAKRYIDASVKDRRNIASSIYYHKLEFDGRRFRTPKSNAFLNLIKLSKNDLDKQKKSHQNLKNPDDHEVSAKGFEPLTVCLEGRCSIQLSYAPLKVDSRLVNKHIKKSGRQDSNLRPPGPKPGAMTGLRYAPNI

SEQ ID NO: 5595 - protein, 525 aa, synthetic construct
MQAVYLYIRVSTDEQAVKGYSQRSQLDRLVLYCKDHNLIVTKTIFEDYSAKTFNRPEWNKLFAELKLTKNQSSLILFTYWDRFSRNIMDAYKMLERLQSMKVSIQAIEQQLDFSIPESKIMLAMYWATSEVENDKRSRNVRLGMQKARLEGRWINKAPLGYRNKITSDGKKYIAIYEPEAYFIREAFTAIVRQNKYCLNDIYKESVSNGLNCSRSAFYRLVRNPIYCGKIKIPAFENKPEKIVEGAHERLIPVVLFDHVQRIIKDADLNHPKKLTSKRIANENLIFRGILQCPNCGKTLTGSGSQGHIKKYYYYHCMGHCSYRVRADLINLSFLSFLKKNRVVEPFLELADSISKEIYSEEHHDYTQKKEEIKKEMEKLIDRGFNAQKLFSDGNIDYDDYILIRSRCQESLKDNTDKLRQQALKIVAEKHTEKGTGYIINHLGEFYENSDTITKQRIIRLCFPEKVKVIEGNIDKMLSESVKVIFGLTVPTSKIKEIHGQQIEQRIVEFFKELYFLGYEQNLKNI

SEQ ID NO: 5596 - protein, 540 aa, synthetic construct
MKQPYNTTIYNTALYMRLSRDDENYGDSVSIETQRTILQQYAKEQGLHVVGEYVDDGWSGTNFERPDFQRMMDDVEAGKVNCIVTKDLSRFGREHVMMDYYLEFLFPEKRVRYIAVAENEDTEKGLSDFVPFKNLFNEWFAKDTSRKVKAAFKAKFATGQRIGAYAPIGYRKHPEIKNKLIIDEETRWIVEKIFDLAIHGRGAASITRILITEKVPTPGFINFQRDGTFANIYAGAPEEKSYAWTIAQVKSIMKDETYIGHTIHYRETNISFKNKRRVRKPQSEWVRVENTQEPIISEQVFRQVQEQIANRRRKCKDGTTQIFSGLVKCADCGWSLSYGENRQNSKPYGHYHCSKYGQGTRQCSMHYIRYDVLYAYVLSRLQYWSGLVQHDEERLLKRLLNANDKGQAAARKKQAAELNKAEKRKAEVDTLFARMYEDWAAGRITEYNFSMLSGKYQSEQAELDEKIERLQSAIATESQNAADAEKWIALMKECVNPTELTAELLNTLIEKIVVHEAVKGEDGSREQEVEIFYRFIGKID

SEQ ID NO: 5597 - protein, 548 aa, synthetic construct
MELKNIVNSYNITNILGYLRRSRQDMEREKRTGEDTLTEQKELMNKILTAIEIPYELKMEIGSGESIEGRPVFKECLKDLEEGKYQAIAVKEITRLSRGSYSDAGQIVNLLQSKRLIIITPYKVYDPRNPVDMRQIRFELFMAREEFEMTRERMTGAKYTYAAQGKWISGLAPYGYQLNKKTSKLDPVEDESKVVELIFDLFLNGLNGKDYSYNAIATHLTNLQIPSPAGKKKWNRFTVKAILENEVYIGTVKYKVREKEKDGKRTIRPENEQIIVPDAHTPIIDKDQFEEANKKIENKIPLLPNRSDYKLNELAGVCICADCGGPLSKYEAKRKRQNKNGTESLYHVKVLRCLNNKCMNVRYNDVEEAILDYFRLFQSLNDKELTNLIEDMVHSHENKNNIKSQKQINEQFEQREKELQNKLNFIFDKYESGIYSDEIFLQRKATLDKEMKELKKAKDELNGLTDIKSGIDISKVRSQMKNLIQIYETSNDKEEKNNLLRIALEKVIVKMTAKRKGPVPAQFEITPILRFGLLTGDKLTDTKESSFS

SEQ ID NO: 5598 - protein, 630 aa, synthetic construct
MKKCFIYHRVSSELQLSGTGIERQEQNLNAYVERINLLAEMDDPEATIISDQGVSAFKGLNMSEGELGRWMDQVRAGMWDDSHLVLESIDRFSRQNPFQVVGYLAELDRHNITIHDVSLNMLINRGNSAMLPIVAMSAQRAYEESKIKSDRIRDGWRRKREQAFKQGTIVTNKRPQWIDIVEDRYELNDKVAIVREIFRLYQTGIGTPTIAKMLNERGSEWLFVSGRLWRGESIHKLLRNKRVTGSIFISEIIRDYSSTSNPVDQKRYEMDVYPIAISKEEFDLVQELLKSRRPGAKVTGGKALKKFYDPNTNKPYLDRDGNVIELEVDTGKEIIQSNIFNGICRCARCGEAMYHNVVVAKRDSKKKGKFNEEYRYIRCIAERDGLCDNKALKYEVVEQFVIEHIKNLDFTKILKPNEINPEIELVRLKIEEEEAHIEDYKLNIERIRNTGKKIPFAVLVELEESEDRLKELKERQTTFTEVQVDTDYLKTVDPSVLFDVKNIEVRARMAAELSKIVDSIQLYRTGKHYVITINYKKVEVLKHVLFVEAKKEPVLVSGVAIERFGDTVAYSTPSFSIVVEGVTSPRLINIEEEPLSIIDYSLLLNYVDAVDPNNAVGVWMRNQFNFLTSN

SEQ ID NO: 5599 - protein, 638 aa, synthetic construct
MKPKLYSYVRFSSVKQREGNSLERQQDTALKIAARYNLELDTTAFHDLGMSAFKGRNAHEGKLSEFIKQIGVKVPVGSWLVVENLDRISRDDAWTALDIFKSILSKGIVVVTGMDEKVYKYADVKNNPTDLIISLLMFTRAHDESLTKKNRVEAQARSLIRYNLTRKAGTPAKAIESVGQNVWWVDTKSGYVTPHPMYFPAAQKIIELKQNGETLLGIQRYLNEHYPAPKKRIYKDQTGQALKPKTEQWGKHLIRTFLNPTVYGQKVFTLDKRDESGVVIYGPDSEQPLKETFVIPDYYPALISEIDYLTLSKLDRHRAVTRSSSKYPEGNPEPEIPLLSGIGILFCGKCGSFMFKSGSNENKYRYICGSKIVQGKPCGKKGFTSYQLEHTILQLIADHVWNNHQEDKTAWYESEIEKASESIDKLLKLATLTDSLEELAEQIRSYKHKKATLEREFQQYKISRSEIQTTGWDQFRNFDVHDTKNPDRKRIRLKIKQAIKRINCYDIDGRHGHFEVTFADEAKQRIVIKFNRNRSPGVSYVEAQTVNDHDLLKMQGFVMHSFIDELISPDKFAQQIKDKHEVSILNPTFITKLEDGVNRDEGNGLAIKVDSTTSKSYATVNGIKYEINSLEDLEKLSQ

SEQ ID NO: 5600 - protein, 562 aa, synthetic construct
MEKRKLYSYIRWSSDKQAKGSSLQRQLETARRVAHENGLELVEIIDAGLSAFKSKHLEKGSLGAFIEAVKEGEVANDSWLTVESLDRISRDTILKAQRLFMELLELGITIYTGMDNRIYTKESVTDNPMELMLSIMTFSRANQESMVKSLRQKSAAQLKIDKFKAGGLAENGYPYAIRSSGANVFWADVSDGTVKPHDYYFPIAKLIVNLRLKGWGYMRIAKYLNENYTPPRGTAKRKHFKDMWSPKLICNFLQSRTLMGEKSIRVDGVEHILLNYYPQVMNEKEFYNLQNVINRKLASEPNNYIPLLTGIRRFKCECGAAMVAFYQYNKIRYRCDGMKSLDKRMHCGAKSFNGASIENAIVQICADKIFKDVKSHISNVGAIQAMINDAQKKYKLGMDMLLEDNAPSGLNIRLIEIENQIERLQKQLNDELIIDAGIDTSVSWDAVPENYREISNTERLEIKQKIQASTLSIVCSTVKTKGHLFEIKFIDGDVIRFFSDKRRVHVDVQGINNAAILQSEGIILHDHFDYLLDSEAFVERIRLQHKQLKDKEERTLDDIFGI

SEQ ID NO: 5601 - protein, 557 aa, synthetic construct
MKRKKAYIYTRVSTTMQVEGFSLDAQEAKIQQYANAFDIEIVKTYQDAGKSGKTMLGRTEFMNMISDIEAEKDKVDYVLVFKLSRFGRNAADTLKSLAIMESHGVNLICVDDGLDSSKDSGKLVITILSAVAEMERENIISQAMEGRRQKARAGQWNGGFAPVGYSLVNGQLQVNHEEAESVKMIFDLFANSDMGTIAIAKHLANLDIKKPIRHNSTLPYFSSSGIARILDNPVYNGKIAFGRRESTRDKISGETKVTQSENYILTDGIHEAIIDDETWKKVRKKREANAHKYKRENPNKGDSIYILSGLIKCPLCNAGLYGNKSIKRNKNKKDEYYKNYYYYACKHRKHVDGHKCTFNKQLKTGNLDHEVLSIISKLVSRPGFAKKLQEKINIQVDTSRIDSEIEQYKSLFRQLNATKMNLIQQIDTLNFEVPHFQQKSIDLDMRLNTIYDKIADVETLIERSESKREVILKDKMTADNIYKILVNFASLMDVMEDIDKKRLCQMLIEKIEIYDEKNEAGRWVKAIHFKLPIIEEDLEISLDNSTPVEAVVKLSKK

SEQ ID NO: 5602 - protein, 484 aa, synthetic construct
MKILKYAVYVRVSTDRDEQVSSVQNQVDICRYWLEKNGYEWDSNAVYFDDGISGTAWLERHAMQLILEKARRNELDTVVFKSIHRLARDLRDALEIKEILIGHGIRLVTIEENYDSLYEGGNDIKFEMFAMFAAQLPKTLSVSVSAAMQAKARRGEYIGKPGLGYHVIDKKLVINEEEAEVVREIFDLSHKGYGFKKIANILNDKGTYTKFGQLWSHATVGKILKNQKYKGDLVLNSYKTVKVDGKKKRVYTPKERLTIIEDHYPAIVSKELWNAVNSDRTSKKKTKQDTRNEFRGMMFCKHCGGPITAKYTSRFAKGSKKEWVYMKCSNYVRFNRCVNFDPVKYDDIREVIIYRLKQQEKELEIHFNPKMHQKRKDKSTEIKKQIKLLKVKKEKLIDLYIEGLIDKEMFSKRDFNFENEIKEQELALLKLTDQNKRNKEEQQIKKAFSMLDEEKDMHEVFKTLIKKITLSKDKYIEIEYTFSL

SEQ ID NO: 5603 - protein, 507 aa, synthetic construct
MKRVISYIRFSSEKQAKGDSLRRQSKMVTDWLKAHPEYYLDESLTFRDLGVSGFTGKHLKGGLGDFLTAIEKGLVKAGDTLLIESLDRLSRQDVDQASELLRNILRSGVDVVTLSDGEHYTSESLKDPLALIKSILIMQRAHEESLRKSERIQAAWDAKKEAAKAGIKISKRCPAWLKLNDDRKSFSIIPEKVETVKRCFQLRLEGKSIWAIVKALNDEGHQTLNQYKAGKFGQTSVQDLLKNRSVIGYFTPKGCEEIAGYYPAIIDETTFYKVQQLSHSRYGKRSVSDKPLSVNLFKGVIRCSECGHALIITGFSDTRSGIYRCPLRNENRCNAKGLSRKQTDGTLLALLSRLDRFDSDMTNVIDTLKLHREHISSNIEKLVQLSLEIEDLNAITNKLKQLKNELSQVDADIEKETQRLKSIDVGCLSDCDLTTKAGRIEAQLIIKSAVKEVVLNTAKRRCKVTFHNGKAITLPITENPSEDVTEAIQSLSEVTERGLIDVDEVIV

SEQ ID NO: 5604 - protein, 559 aa, synthetic construct
MTRVAIYARYSSDLQSQASIEDQIRLCEERVLESGGTIVQSYTDHAVSGASLMRPGIQMLMQDAAAGKFDEVVSEALDRISRDQEDIAAVFKRLSFAGIKINTLSEGEISQLHIGLKGTMNALFLKDLADKTRRGLRGRVEKGRSGGGKCYGYDVVAGEERGQRVVNESDAAIVRRIFEDYASGKSPKAIAFQLNEEGIAGPSGKGWGQSTINGNRQRGTGLLNNELYVGRLVWNRLRYMKDPETGKRVSKLNPEDQWITQDVPELRIIDEALWTKVKERQASLNKPGKPFWSKQRPKNLFSGLVKCGECGGGYSMISQTHMGCSSARNKGICSNRMGIHREKLEADVLSALEEHLMDPDLCKVFCEEYTKHMNKLRSEHDAALNQFRAEHERTKNKLSQMVDAICDGAPVAPIKDRMHALENRRVELEALLEDVEESPPLLHPNMSHRYRVQVGQLIETLNSQEHRAEAIDAVRSLIEKIVLTPDESENRLVSDLYGSLAGILALSDEMKSKTQLTNAALDAHKAALGLVQNDESAPEGASQVKLVAGVGFEPTTFRL

SEQ ID NO: 5605 - protein, 507 aa, synthetic construct
MKRVISYIRFSSEKQAKGDSLRRQSKMVTDWLKAHPEYYLDQDLSFRDLGVSGFTGKHLKGGLGDFLTAIEKGLVKAGDTLLIESLDRLSRQAVDRASELLRNILRSGVDVVTLSDGEHYTKESLRDPLSLIKSILIMQRSHEESLRKSERIQAAWDAKKEAAKAGIKVSKRCPAWLKLNDDRKSFSVIPDKVETVKRCFQLRLEGKSIWEIVRTLNAEGHRSMNQYKPGKFGQTSVQDLLKNRSVIGYFTPKGCEEISGYFPPIIPETVFYKVQQLSHSRHGRKPVSDKPLSVNLFKGVIRCSECGHALIITGFSDTRNGIYRCPLRNENRCSAKGLSRKQTDGTLLTLLSRLDRFDSDTTNTIDMLRLHREHISSNIEKLVQLSLEIEDLSAITIKLKQLKGELSQVDADIEKETQRLKSIDTGSLSDCDLTTKAGRIEAQLIIKSAVKEVVLNTAKRRCKVTFHNGRAITLPITENPSKDVTEAIQSLSEVTERGLIDVDEVII

SEQ ID NO: 5606 - protein, 481 aa, synthetic construct
MITTNKVAIYVRVSTTNQVEEGYSIDEQKDKLSSYCDIKDWNVYKVYTDGGFSGSNTDRPALESLIKDAKKRKFDTILVYKLDRLSRSQKDTLHLIEDVFIKNGIEFLSLQENFDTSTPFGKAMIGLLSVFAQLEREQIKERMQLGKLGRAKSGKSMMWAKTSYGYDYHKETGTVTINPAQALTIKFIFESYLRGRSITKLRDDLNEKYPKHVPWSYRAVRTILDNPVYCGFNQYKGEIYPGNHEPIISKEEYDKTQSELKIRQRTAAENVNPRPFQAKYILSGIAQCGYCGAPLKIMLGVKRKDGSRLKKYECHQRHPRTLRGVTTYNDNKKCDSGFYYKDKLEAYVLKEISKLQDDADYLDKIFSGDNAETIDRESYKKQIEELSKKLSRLNDLYIDDRITLEELQSKSAEFISMRGTLETELENDPALRKNKRKADMRKLLNAEKVFSMDYENQKVLVRRLINKVKVTAEDIVINWKI

SEQ ID NO: 5607 - protein, 568 aa, synthetic construct
MSRPIKAYSYIRFSTPKQAQGDSYRRQLQQAMDYCAEHNLQLDDKTIDDFGTSAFRGANMSEGALGRFVDAVKHGEIEQGSYLLVESVDRLSRQAVEEALEQFLAIVRAGIVIVTLSDKQVFRRGQVDFTKLIVSIVYMARANDESEMKSRRSRAAWSNGREQARKNNKVIANSRLPSWLTRDGEQIVPIPERVAIVNEMFEMAKSGCGYEQIAKVFLDKGYKTFGKEADWRPAGIQAVIKSQAVIGVFQPHVIENGERVPADEPILGYYPTIVSPALFEEVQHLISKRNKHSGSYRKGTFNNLFSGVLRCQCGESLRYQNKGRAGSPRNYLVCPKQNTAGCKLPNMLYDKIEPQLLQAVFLLNRVMKQRVEGEDKTIALRTMLAELRVQLEVETQKRKKAAQLVLDNDNDADYRVLFEQCKKKTQALEEQIQRAESDLMSRELSVKTLKYIVDPEDLRSTEQRQRFNGQLKTALKEIRFRFDGGYLWAEYMDIDGSRVLTQIFEDKLAGSSIYDGSSYLVRKTQTEAPYGVDPSVMQQEMNDYIRNLQKNDDGTDPDFEDLSSEYSK

SEQ ID NO: 5608 - protein, 557 aa, synthetic construct
MSKEKIKVYLYTRVSTSIQIEGYSLEAQKSRMKAFAIYNDYEIVGEYEDAGKSGKSIEGRIQFNRMMEDIKSEKDGVSFVLVFKLSRFARNAADVLSTLQIMQDYGVNLICVEDGIDSSKDAGKLMISVLSAVAEIERENIRIQTMEGRIQKAREGKWNGGFAPYGYKLEDGKLFINEEEAIAIRTIFDQYVNTTIGANGISKYLENHGIRKIPRQNGKNPLFDAGLIRKILKNPVYNGKIAFGRRTLEKVHGTRNEYKQVEQDEYLISEGIHEAIVSDEVWQAAQVKLKSQAKKYEHVNKGKDTRTHLLSGIVKCPICGVGMFGNKCIKKKKDGTKYKDFYYYGCKHRQMIRGHKCTFRKQIREELLDDAVAEVIVKIVSNPKFASMMQEKINMKVDTSEIETEIDNYQKELRKCHSTKFKLIEEIDNLDVEDKHYKRRKQDLDDRLYRMYDKIDELESSLIDAKAKKQTIEAEKLTGDNIYKVLIYFDKLYKVMNDVERRQLITALISEIQVYEEKQPNGQWLKSITFKLPIIEENLNIGLDNDEHVEMLSLLKK

SEQ ID NO: 5609 - protein, 557 aa, synthetic construct
MSKEKIKVYLYTRVSTSIQIEGYSLEAQKSRMKAFAIYNDYEIVGEYEDAGKSGKSIEGRIQFNRMMEDIKSGKDGVSFVLVFKLSRFARNAADVLSTLQIMQDYGVNLICVEDGIDSSKDAGKLMISVLSAVAEIERENIRIQTMEGRIQKAREGKWNGGFAPYGYKLEDGKLFINEEEAIAIRTIFDQYVNTKIGANGISKYLENHGIRKIPRQNGKNPLFDAGLIRKILKNPVYNGKIAFGRRTLEKVHGTRNEYKQVEQDEYLISEGIHEAIVSDEVWQAAQVKLKSQAKKYEHVNKGKDTRTHLLSGIVKCPICGVGMFGNKCIKKKKDGTKYKDFYYYGCKHRQMIRGHKCTFRKQIREELLDDAVAEVIVKIVSNPKFASMMQEKINMKVDTSEIETEIDNYQKELRKCHSTKFKLIEEIDNLDVEDKHYKRRKQDLDDRLYRMYDKIDELESSLIDAKAKKQTIEAEKLTGDNIYKVLIYFDKLYKVMNDVERRQLITALISEIQVYEEKQPNGQWLKSITFKLPIIEENLNIGLDNDEHVEMLSLLKK

SEQ ID NO: 5610 - protein, 557 aa, synthetic construct
MSKEKIKVYLYTRVSTSIQIEGYSLEVQKSRMKAFAIYNDYEIVGEYEDAGKSGKSIEGRIQFNRMMEDIKSGKDGVSFVLVFKLSRFARNAADVLSTLQIMQDYGVNLICVEDGIDSSKDAGKLMISVLSAVAEIERENIRIQTMEGRIQKAREGKWNGGFAPYGYKLEDGKLFINEEEAIAIRTIFDQYVNTTIGANGISKYLENHGIRKIPRQNGKNPLFDAGLIRKILKNPVYNGKIAFGRRTLEKVHGTRNEYKQVEQDEYLISEGIHEAIVSDEVWQAAQVKLKSQAKKYEHVNKGKDTRTHLLSGIVKCPICGVGMFGNKCIKKKKDGTKYKDFYYYGCKHRQMIRGHKCTFRKQIREELLDDAVAEVIVKIVSNPKFASMMQEKINMKVDTSEIETEIDNYQKELRKCHSTKFKLIEEIDNLDVEDKHYKRRKQDLDDRLYRMYDKIDELESSLIDAKAKKQTIEAEKLTGDNIYKVLIYFDKLYKVMNDVERRQLITALISEIQVYEEKQPNGQWLKSITFKLPIIEENLNIGLDNDEHVEMLSLLKK

SEQ ID NO: 5611 - protein, 557 aa, synthetic construct
MSKEKIKVYLYTRVSTSIQIEGYSLEAQKSRMKAFAIYNDYEIVGEYEDAGKSGKSIEGRIQFNRMMEDIKSGKDGVSFVLVFKLSRFARNAADVLSTLQIMQDYGVNLICVEDGIDSSKDAGKLMISVLSAVAEIERENIRIQTMEGRIKKAREGKWNGGFAPYGYKLEDGKLFINEEEAIAIRTIFDQYVNTTIGANGISKYLENHGIRKIPRQNGKNPLFDAGLIRKILKNPVYNGKIAIGRRTLEKVHGTRNEYKQVEQDEYLISEGIHEAIVSDEVWQAAQVKLKSQAKKYEHVNKGKDTRTHLLSGIVKCPICGVGMFGNKCIKKKKDGTKYKDFYYYGCKHRQMIIGHKCTFRKQIREELLDDAVAEVIVKIVSNPKFASMMQEKINMKVDTSEIETEIDNYQKELRKCHSTKFKLIEEIDNLDVEDKHYKRRKQDLDDRLYRMYDKIDELESSLIDAKAKKQTIEAEKLTGDNIYKVLIYFDKLYKVMNDVERRQLITALISEIQVYEEKQPNGQWLKSITFKLPIIEENLNIGLDNDEHVEMLSLLKK

SEQ ID NO: 5612 - protein, 547 aa, synthetic construct
MRTAYSYVRLSSKKQIQGYGQERQWQAIQAAALAHGWELSEKTFSDLGVSGWKGANIETGALSQFLQCVEDGYIEKGSVLIVENVDRLSRAGVQRAVSLLMQLLASGISIYTFTDSKLYEPDSHNPLMDLMAWALSAQRAFEESERKSQMILNAKAKAREKARLTGEIITRHCPSWLRVNQDKTAFELIPERVETVRKIFDLYVNGYGTPRIGRLLTEEGRKPLTGRAWYPRSISRILQYRAVLGEYQPTLNGKPEGDAIKNYYPAIIDEDQFNEVQAVLKEGGAGKGRRGKEMRNYFAGLLRCSCGEGMHIVSSCVKGKRYYQLRCLQYRISCFGSSWNFYKLSSFVLFALRRLPILEVMGSQDNNNIKELNAKERELTFLLEDTRRQLDNTINAIAALGLNDQLQSKFRELKTSVTNIEKQLSNVKTELETSQGKLVIQKQDSEMLTGRFLELIDSTKDIDGRIKLNQVLRRYLSKIEMHADKKEEYRYIKIYRKDGDELVSIQCDHSLKGALFESKDGLETFELLPATDAKRNEISNTLLCTPK

SEQ ID NO: 5613 - protein, 547 aa, synthetic construct
MRTAYSYVRLSSKKQIQGYGQERQWQAIQAAALAHGWELSEKTFSDLGVSGWKGANIEIGALSQFLQCVEDGYIEKGSVLIVENVDRLSRAGVQRAVSLLMQLLASGISIYTFTDSKLYEPDSHNPLMDLMAWALSAQRAFEESERKSQMILNAKAKAREKARLTGEIITRRCPSWLRVNQDKTAFELIPERVETVRKIFDLYVNGYGTPRIGRLLTEEGRKPLTGRAWYPRSISRILQYRAVLGEYQPTLNGKPEGDAIKNYYPAIIDEDRFNEVQAVLKEGGAGKGRRGKEMRNYFAGLLRCSCGEGMHIVSSCVKGKRYYQLRCLQYRISCFGSSWNFYKLSSFVLFALRRLPILEVMGSQDNNNIKELNAKERELTFLLEDTRRQLDNTINAIAALGLNDQLQSKFRELKTSVTNIEKQLSNVKTELETSQGKLVIQKQDSEMLTGRFLELIDSTKDIDGRIKLNQVLRRYLSKIEMHADKKEEYRYIKIYRKDGDELVSIQCDHSLKGALFESKDGLETFELLPATDAKRNEISNTLLCTPK

SEQ ID NO: 5614 - protein, 534 aa, synthetic construct
MNTIRPLISLRSPTAYSYIRFSSAIQAQGDSLRRQTKLAQEYCQKHSLTLSEQSFTDLGISAFNSANSQEDSGLGQFLKALEQGVIPSGSFLLVESLDRLSRAKVQTALRQLLNIIEYGITVVTLIDNRTYSSESETTDLIISLAVMERAHNESKTKSERIKAAWANKRANPTTTNRTSLAPFWLKLNKDKRTYTVIEKNAETVRRIFQMSINGHGIIGIARKLNEEKIPSPKGGSWSNTSICRILNSKAVIGEYTPNIGRTSTNTPISDYYPSIIDESTFYLSQSRKAERSKPKSAGRKTTFPNVFNQVAKCGVCGATMYYDNKSPTLKYLTCREFKKKNCTNRPIRIEFMHKFIIEQYLLPKNFQHHINMTTETSKQGDSISSIEEKIKEEEQALNQLMKIAKNLTSHIAIQHMENRDRKIMQLKEELEETKAQQAEVTLTPRIGFKQAQQLVANALQMEVNDKKPNCTDPELIREYRVTLNRSLKDVFNSLRIHNLKSASEITVECNQLTYAIDRKSLKLIHENLYWKSKV

SEQ ID NO: 5615 - protein, 653 aa, synthetic construct
MFDYDKSRFNGICIPYSRFSTTEQDKVGRKSLERQLEEAKRYARENNLYINEELMFADKGVSGFAKQGHLSKTFEKGQMSLMLEVLEDVPFKERENIYLCFHAFDRFSRQHPEVAYEQFSKILKRGFNIVTTIDDCFYSSKEADLESMLISIIKMSSAHYESEVKSVYVSDAHRRRRETLEYLYNHPTQKGKHKHIGLKQSTTPRWILESEIIYDFVDENGVVRKDSFSKFSLDEAKAVIINQIFDWKIQGLGHTKICQLLNQKKIPTFEDGNCRKAKQWHTFAISNLFKNKSTIGTFTLKTIEHEEYFCESERIFKTRSNKVDATSEMENYFPAVVTVEKYETALKVIAMNNKGEKISEPEDKTHVFSKVLRCTCGGRLVFKGTRKTGKSEKSDWFEYLRCEKAILKDGCDAENIIYKDFEMAFLRFATSSNYTVFSTTQSKLKTKLKRLSIKQSHLNSEKEQLLLEAKGLKKTFESIVTQNLDATLLLDSISKNEASLNTVRNELVKIDEQIKGVEREYEKSGKPIDKRTIKKELRSEDYPKRLLMRRAVNQQLRKNVVHMEVCSTKLLKFVIVCFDDYVIRTYAYQDEFSTDLMFNSIKINVENLDESEVYDLITHLFKEVRISLSGGNAVITNFDLKVHLSGVKEKYLK

SEQ ID NO: 5616 - protein, 599 aa, synthetic construct
MKKAYSYIRYSSPQQASGDSYRRQLAATQAYCDANGYELDTDLSIYKELGVSGFKGDQENLKQFINDCETGKVKKGSLLVVENLDRLSRQAINVAMRQFLSLLEYVDIYTLQDKKHYSNNDGRDSENQLLDIMTSLIIMSRAHEESLTKQKRLKESWANQRKNAHKIKMSGCYPHWLVRSDDKTEFYVKEDRVQIIEDMFDMCINGLGATQIVRSLNNNIEKYPPPSTKKEFWVRSTVKRLLSDRRLLGEHQLYKGHHAKREPVGEPIKDYFPQVIDEKTFVNAQISLKSRKIGAGKVKADSFSNIFRGFLRCGHCDSPVEYVNKAAKQASTLYLTCSNAKRGGDCNHSKHYRYLPLEHMLIHLSTANGFMPKPEKPSDLEQQLEIIKGKKEQANKKLSVLLEKNFTAPIILEKIEELTNDVEKYSSQIAEIEDKLLSIKPDYTYEDLYHDAVLESDLLKKFSNRAMFNSYLRKKIDNAYLYSIGLFPCIAFKMNNKSVHVLVLDERYNFGGCSLPNEKDKLIRLNGEGIEAIDEMIWKMFGNAIDFINGIDEENEELNKIIRKISLLMSKFIIDNQNQDLISEFNSLLNTSIEKSYQN

SEQ ID NO: 5617 - protein, 499 aa, synthetic construct
MRLFSYIRFSTEKQIEGDSIDRQTNSAKKYASLHGYDFQNKSFSDLGISGFKNVDRDGLTSMLEAIQSGGISRGDLIFIENVDRLTRQGFQHANDLIVKIVNSGVLLHFERESVTFKSPSDLNDMMSLMKVCMSASLAFEESQKKSERIASAKQKQRNLMKQGIAVKHKTPHWIEFDEDGKCFHLGNTKIIKRVIELRRDGFSVSKIISTMNKEGFKAPYGGTLRSSTVKQWLQSPALYGAVMVEDELIKDYYPALMSYDEATMLYNKLTNNKAPENQNNHLRGLIYCSKCDSAMGLRFTTSSGKSKKKIPTFYCIKQREGGCDAPSVSNIMPLIEKMVSHMKTIEHKVDVAAITARIDEISSNLERISKSVTTDNFKMMMDMMDKFEKEKRELQTSLTVSDDVDTDTLLSHIDNPVEFNNIARRYIDKIKVTFKGGTRRKRTFHFKLIQRNGHIVNLTRFGSGQITIGKTEVLSTFGKPESEFGEALTSLEDSDMFYE

SEQ ID NO: 5618 - protein, 574 aa, synthetic construct
MGRYFLYHRVSKKIQSIEGQGVERQVEATQQWIDIHNEMRVKEGNEPYTFGRRYEDKGRSGYTQENMRKGQLGKLFADIEKGIILPGDIIVFELIDRFSRAEPNVVRGHFENIMKAGIKVAVTKWNTVFETKMSGPSGLSARIMLEVGLHLANEESRVKSERILATNKILADQGIKTIAKTPIWLNRTIDRKRFEVVEENADVIRRIFELRKKGFGAKRIINELGPLRLARYKYNEEGELVPSSYNRPLSESSVNRYLRDQTVIGYRDGNQYCEPIVEEKLFHACQQKIRKTKGGKVTKIKNVLSGLAYCEKCGKKMVFGGESISPKGKIRSYIKCNNKAKTGGCDAKSIRYEPLERCVYNLLHTLNDREEITVDIGQFEMELASAQEQAANAQSYMIRYPNDSSWVGIYEEQKAKVYELNNMIADAKAERSGRLTEMNLDLSMHENKALFNQILKDYDVKAVLGYESTTEKPRVKLIIGAWGDFVVSTTVDNDVNPRRVRAAMKLGAEGIDFDQRARGHIKFKEPEPFVSDEVKRTTFIKNLAKTFVKTMSTKEKQFILDKVKQQTTNQDNED

SEQ ID NO: 5619 - protein, 547 aa, synthetic construct
MRTAYSYVRLSSKKQIQGYGQERQWQAIQAAALAHGWELSEKTFSDLGVSGWKGANIETGALSQFLQCVEDGYIEKGSVLIVENVDRLSRAGVQRAVSLLMQLLASGISIYTFTDSKLYEPDSHNPLMDLMAWALSAQRAFEESERKSQMILNAKAKAREKARLTGEIITRRCPSWLRVNQDKTAFELIPERVETVRKIFDLYVNGYGTPRIGRLLTEEGRKPLTGRAWYPRSISRILQYRAVLGEYQPTLNGKPEGDAIKNYYPAIIDEDQFNEVQAVLKEGGAGKGRRGKEMRNYFAGLLRCSCGEGMHIVSSCVKGKRYYQLRCLQYRISCFGSSWNFYKLSSFVLFALRRLPILEVMGSQDNNNIKELNAKERELTFLLEDTRRQLDNTINAIAALGLNDQLQSKFRELKTSVTNIEKQLSNVKTELETTQGKLVIQKQDSEMLTGRFLELIDSTKDIDGRIKLNQVLRRYLSKIEMHADKKAEYRYIKIYRKDGDELVSIQCDHSLKGALFESKDGLETFELLPATDAKRNEISNTLLCTPK

SEQ ID NO: 5620 - protein, 678 aa, synthetic construct
MRTTPKIYNYARVSTTKQTKGVGLETQQQRSVLENLSQEHNLPIHDENFVDQGLSAYHGKHKDGAFGVVLSRIESGEIASGSILVVFSLDRLSRETVNVAMEQFLSIINRGVRVYTHIDCKMFDSESQNQTADLIGSLITMQRANEESETKSKRIIAAQKIALKRWKDTGKPQGALGRSPFWIDQPTNTLNINAEGVKKAVEMKLAGYGDLKIKQYLDANFEYKQTRTKGTVKQSNTWDYTAISQLWANRSLIGEKNFHIEGVSHVFENYYPPIIDEATFRKLKMCKSEKRGRNTSSGKIPLLKGIARCGICGGAMVFVDKGDNRVNYVCNLAMKGEHDREVYNVNMLDLLTLEICKDAYLAESDKANNTFVENEKIKIETELVEEREVLDELVARFKAKKSNTILDLIGDSENQIDVLEAKLDAINNADVVLNADELVSLPEIFTDDVRTDYLHPERYTIRNNLYRFISSITLNRVVEHCSDAKIKSANCIDITWHFKNGQKRRLAMLPYQYLKADDGRKSLYLPFVYMYGSKSNIKVDDGGQFLPSIFEKLHAFDLTKCLYPSRGCYQWSKLSLECGKTYWAPLDKAMFMEKGMEVIADTVRDNGGTNKVDGVTTNYLSLMFNYPSSEEFSYDYPDSTFVELACKFGFVADRDFSLFLQDNNFNRELYSSLDFLMS

SEQ ID NO: 5621 - protein, 664 aa, synthetic construct
MFSFDKSKFKGICVPYARFSTKGQSKIGKKSLERQIEEARRYAKSNNLYINEDLIFADKGISGFAQQGNIAKAFKKGQMQVMLALLEEVPYQEREFIYVTFHNFDRFSRMSPKQARTYFDLILQKGFNVVTTIDNQLYTRHDKDLGKMLISTIKMTTAWEESQVKSIYIKDALARKKKVVEYLYTHPSQKGKYKHIGVVQPNMPRWIDHEKIELTYTDESGSKRTDSFKKFTLNKEKTKIVNYIFDLKIQGLGYARICRRLNEEGIPTFDQGKHRIAKKWHVFAVQNLICNEMVLGHITLHTHNEEEYMCEIDKVFKKRKIKQTATEKLYNYYPAAVSEAKYLEAHKNTIQQDKPKKLGRIGERTNIFAQILLCECGGTLQYRRTKKNKKKSESVSVNEYLQCNNAFVNHKCDSQTINYTMLETAFFRYVNNIDFKKICSTTNSKHALKIIDLDTDIKELTDEIESLKLREAGLAKTYMSLASAGLDGSTALIDREKTKKEIAEKVLELENLELKKKGLEIEADKDNREFVDINDYMMNKDNYSSDEKIIIRKKINDFLHSKIEWMEVVSTERQKFVIIAFHDTVIRTFAFDDRCANDLMFNEIDVDLSGLNRVQASNLMFTLIKAIRNSLKGVEAVITKADLISYLQHIKQDYLNNIGEQASV

SEQ ID NO: 5622 - protein, 653 aa, synthetic construct
MFDYDKSIFDGICIPYARFSTTEQDKVGRKSLERQLEEAKRYASQNNLYISDDLIFTDKGVSGFAKQGQLSKTFEKGQMALLLDVLEDVPFKERENIYLCFHAFDRFSRQHPEVAYEQFSRILKRGFNIVTTIDDCLYSSKEADLESMLISIIKMSSAHYESEVKSVYVSDAHRRRREMLEYLYNHPTQKGKHKHIGLKQSTTPRWIIESEIIYDFVDDNGVARKDSFSKFSLDEAKAEIINQIFDWKIQGLGHTKICQLLNQKQIPTFEDGNCRKAEKWHTFTISNLFKNKSTIGTFTLKTVEDEEYFCESERIFKTRSNKVDATSEMENYFPAVVTVEKYEAALKIIAMNNKGEKISEPEDKTHVFSKVLRCTCGGRLVFKGTRKTGKSEKADWFEYLRCEKAILKDGCDAESIIYKDFEMAFLRFATSSNYTVFSTTQSKLKTKLKRLSIKQSYLNGEKEQLLLEAKGLNKTFESIVTQNLDATLLLDSISKNKSLLNTVQNELIKIENQVKVVEREYEKAGKPIDKRIIKKELRSEDYSKRLLMRKAVNQQLRKNVVHMEVCSTKLLKFVIVCFDDYVIRTYAYQDEFSSDLMFNFIKINVENLDESEAYDLIIHLFKEVRISLSGENAVITNFDLKVHLSEIKEKYLK

SEQ ID NO: 5623 - protein, 644 aa, synthetic construct
MFNFDKSKYKGICVPYARFSTDVQDEIGRKSLERQMEEAKRFSDEYGLFFDEDIAFVDRGVSGFALSGDTAKTFQKGQMQLMLELLEEIDVAEREFIYITFHNFDRFSRMSPDVASRYFEQILDKGFNIVTTIDNEVYKRNSGNLEQMIISIIHMSTAYYESEVKSIYISDSRQRKRDVIEYLYNDETQKGKHRHVGIKACCPRWIKTKDIIYEYVAKDGSVKKEALKQFEIDEERAKIINYIFDLKIQGLGNGKICQVLNEQNIPVFHSGKYTKAKYWNLSTISNYLKNENVIGHSYLYHKAKEEVFNEKTQTFSTKRVRKIATDKLYNYYPPIMSQEKFNQAKEAVKANSVKVDRSKSSEKPHMFSNLMRCSCGTRLHYKLTKKNNVKKVDDYFEYLKCERSALNDGCEGENINYKNFEAQFINFIRYIDVNEILNHANGEEAETQGLTELEEREAAINLKITGLTKTYQSLINAGVDGSDVLVELEKAKGELQEVEFEKSKLLNSMKSQTSSSSESIKQKKSALKSKVFAEKVEARKAVNELLKQKIRWMEVYATAYAKFVIVCFVDNVIRTYAYQDEFATDLMFNTIKINTDGLKGYEADELMVLMIKTVRESLAGMNEVITNTDLKIKLTAIKSEYMNE

SEQ ID NO: 5624 - protein, 664 aa, synthetic construct
MFSFDKSKFKGICVPYARFSTKGQSKIGKKSLERQIEEARRYAKSNNLYINEDLIFADKGISGFAQQGNIAKAFKKGQMQVMLALLEEVPYQEREFIYVTFHNFDRFSRMSPKQARTYFDLILQKGFNVVTTIDNQLYTRHDKDLGKMLISTIKMTTAWEESQVKSIYIKDALARKKKVVEYLYNHPSQKGKYKHIGVVQPNMPRWIDHEKIELTYTDENGSKRTDSFKKFTLNKEKTKIVNYIFDLKIQGLGYARICRRLNEEGIPTFDQGKHRIAKKWHVFAVQNLICNEMVLGHITLHTHNEEEYMCEIDKVFKKRKIKQTATEKLYNYYPAAVSEAKYLEAHKNTIQQDKPKKLGRIGERTNIFAQILLCECGGTLQYRRTKKNKKKSESVSVNEYLQCNNAFVNHKCNSQTINYTMLETAFFRYVNNIDFKKICSTTNSKHALKIIDLDTDIKELADEIESLKLREAGLAKTYMSLASAGLDGSTALIDREKTKKEIAEKVLELENLELKKKGLEIEADKDNREFVDINDYMMNKDNYSSDEKIIIRKKINDFLHSKIEWMEVVSTERQKFVIIAFHDTVIRTFAYDDRCANDLMFNEIDVDLSGLNRVQASNLMFTLIKAIRNSLKGLEAVITKADLIRYLQHIKQDYLKNIGEQASV

SEQ ID NO: 5625 - protein, 525 aa, synthetic construct
MAYYGLLKGSNMKAYIYSRISSAIQKKGHGLDRQQDIALTYATQLGFDISEEVLQDVASGYHGKQMEGRLGVFLEGIKRGKIESPAALIVESLDRLGREHTMDALPRFIDIVNHGVEIHEVSTGIVYNREETHKIHIAIAIMERAHNESLMKSKRARAAANKRLQRAQQGENVVINVNLPCWIRSQDGKLELVPEYAVVIRRIFELYLEGKGSNKVAQILRKENHPYFTSNIHSKKIRSRVWTDQRVMDIIKKDSTCGVFRSTANPDTVIDGYYPAAIDKATFERAQVLRMSRVRTAKKSKKGLNILSGLLRCGHCGSSLQYTRSYSNKKKTRMYENLRCRDRAARMNCDSRSIPLRPLEKLILGWVGTIPLFDIKAASNDELEQKKAELTQLEQQAENLVELLATGLTRVKDKYLQLEQQIDSVKKEISSLSVTNSSSVDKIDYFQAIDLENEEYREQVQQELALIIDRVSVKCDGEYAEIDIFLNSRIHNHQRFIGKKKQLDKARQTMRTLRPSAAHVDSFVD

SEQ ID NO: 5626 - protein, 525 aa, synthetic construct
MIEQQKQYAISYQRFSSDRQRNNSSLDRQSDAIKSWLRQHPNVVLIDEYVDEAMSGWNGKHLEKGSLGKLLQAIEDGIVKKDTIILVEHFSRLSRQNIDKTEELLRRIWEHGITIATIRDNGLYPPSTINNMALRIRLIVEIEQAFKESEWRSAKVKGSYIKREKEAKRGVTPKMRRPFWLDKSGKLNEYNVVIKDIFDWYMEGLGQQRIIVRLKEKYPNAKPVQSLNPSTVMRWLQHDVVRGYWRGNKVYDAVVDDELFYNVQAVHKGRLYENVKPDRNWPLSGLMQCGICGGGMSIQKTKNTLPIIRCSTKQRDRSCKRVKTLPYFIAHTYMFSYVKKYALRKYTKSTTSNEYQNKIIQIEYELSKMIPQLEEEKNHYNEAKKEGKNTRLLREIMVETDDKIFELEKELEQLKQAFNNQNDYAISKKAVELVFTPRNFNIEMHKLGFRIVIGEDELSVVGLEEKPPKMKYLGYSRKTKTYDYEMLGMKHSWPTSSITEEILMLEGLENFVEKTPYLKKIMSKL

SEQ ID NO: 5627 - protein, 405 aa, synthetic construct
MNVVLYIRVSSVRQVNEGHSLEGQLKDLRAYCSANSHTIVKEYIESGNSASKGSPPIFNQMLNEVTSRVFNVDAVVVYSLSRFARDLLYQLSTTKRLEDSGIRLFSATENLPEDDTTFKYLTVMLGLVNEMNSKQNGINVQSRLTQTAKDGYFTGGRVPLGYRSVKCEEGKKNTRKKLVIVEEEAAVVRKIFELSLTGTSGKGLGIKAIADFLNRHGFKYRGSSWSNNTVHKILTSTTYYGEFVFRKKTDSPIVISVPAIIDKNKFIEVRKSLKEQDAQQLWVKAIRSNNLLTGLLKCGICGGGMTVCSGKSGRYKYYACTKKLKKSVDLCQSKWVPKQELDQLVESTIIEHVINVTNIQAIIDEVKTELLSGRERHKGSLLRLTRKQRAIEQKLESTYEQVALR

SEQ ID NO: 5628 - protein, 506 aa, synthetic construct
MRSVITYLRYSSAIQGAEGADSTRRQNDLFKQWLKKNSDAQVVASFSDEGLSGYKGKHLTGQFGDMLARIESGEFPEGTILLVESIDRIGRLEHLETEALMNRILGNGLEIHTLQDGLIYTKDALADDLGISIIQRVKAYIAHQESKQKSFRVSQKWEQRAKLALAGEQRLTKMVPGWIDPDTFKLNEHAETVRLIFKLLLSGESLHNIARHLQSNGIKSFSRRKDANGFSVHSVRTILRSETTIGTLPASQRNDRPAIPNYYEAAIDASTFNKAQEILGKNRIGRTPASDNPLTINIFKGLFRCQCGASVHPTGTKNKYQGVYRCNNHLDGRCDVPPLKRKPFDKWMIDNFLGMIDVGNDGEAEGKIASLQHEVEIVTTRIKKATALLLEMDDIDELKIQLKELNQKRTELQTTIDNMRRKASLTDKELPQLKDIDLTTKAGRVECQLILSKHLKGLTLGKDSVTVTLQNDTEIIVPTDPLPLNDGTSIFEIAEKELLEIDAYQL

SEQ ID NO: 5629 - protein, 644 aa, synthetic construct
MFNFDKSKYKGICVPYARFSTDVQDEIGRKSLERQIEEAKRFSNEYGLFFDEDIAFVDRGVSGFALSGDTAKTFQKGQMQLMLELLEEVDVAEREFIYITFHNFDRFSRMSPDVASRYFEQILDKGFNIVTTIDNEVYKRNSGNLEQMIISIIHMSTAYYESEVKSIYISDSRQRKRDVIEYLYNDEMQKGKHRHVGIKACCPRWIKTKDIFYEYVGKDGSVKKEALKRFEIDEERAQIINYIFDLKIQGLGNGKICQVLNEQNIPVFHSGNYTKAKYWNLSTISNYLKNENVIGHSYLYHKVKEEVFNEKTQTFSTKRVRKIATDKLYNYYPAIMSEEKFNQAKEAVKANSNNVDRSKASEKPHMFSNLMRCSCGTRLHYKLTKKNNVKKVDDYFEYLKCERSALNDGCEGENINYKNFEAQFINFIRYIDVNEILNHANGEEAETQGLTELEEREAAINLKITGLTKTYQGLINAGVDGSDVLVELEKAKGELQEVEFEKSKLLNSMKSQTSSSSESIKQKKSALKSKVFAEKVEARKAVNELLKQKIRWMEVYATAYAKFVIVCFVDNVIRTYAYQDEFATDLMFNTIKINTDGLKGYEADELMVLMIKTVRESLAGMNEVITNTDLKIKLAAVKSEYMNK

SEQ ID NO: 5630 - protein, 399 aa, synthetic construct
MNVVLYIRVSSVRQVNEGHSLEGQLKDLRAYCSANSHTIVKEYIESGNSAYKGSRPILNQMLNEVTSRVFNVDAVVVYSLSRFARDLLYQLSTIKRLEDSGIRLFSATENLPEDDTTFKYLTVMLGLVNEMNSKQNGINVQSRLTQTAKDGYFTGGRVPLGYRFVKCEEGKKNTRKKLVIVEEEAAVVRKIFELSLTGTSGKGLGIKAIADFLNRHGFKYRGSSWSNNTVHKILTSTTYYGEFVFRKKTDSPIVISVPAIIDKNKFIEVRKSLKERDAQQLWVKAIRSNNLLTGLLKCGICGGGMTVCSGKSGRYKYYACTKKLKKSVDLCQSKWVPKQELDQLVESTIIEHVINVTNIQAIIDEVKTELLSGRERHKRQSLKTYSKAKSYRAKVGKHL

SEQ ID NO: 5631 - protein, 547 aa, synthetic construct
MRTAYSYVRLSSKKQIQGYGQERQWQAIQAAALAHGWELSEKTFSDLGVSGWKGANIETGALSQFLQCVEDGYIEKGSVLIVENVDRLSRAGVQRAVSLLMQLLASGISIYTFTDSKLYEPDSHNPLMDLMAWALSAQRAFEESERKSQMILNAKAKAREKARLTGEIITRRCPSWLRVNQDKTAFELIPERVETVRKIFDLYVNGYGTSRIGRLLTEEGRKPLTGRAWYPRSISRILQYRAVLGEYQPTLNGKPEGDAIKNYYPAIIDEDQFNEVQAVLKEGGAGKGRRGKEMRNYFAGLLRCSCGEGMHIVSSCVKGKRYYQLRCLQYRISCFGSSWNFYKLSSFVLFALRRLPILEVMGSQDNNNIKELNAKERELTFLLEDTRRQLDNTINAIAALGLNDQLQSKFRELKTSVTNIEKQLSNVKTELETSQGKLVIQKQDSEMLTGRFLELIDSTKDIDGRIKLNQVLRRYLSKIEMHADKKEEYRYIKIYRKDGDELVSIQCDHSLKGALFESKDDLETFELLPANDAKRNEISNTLLCTPK

SEQ ID NO: 5632 - protein, 547 aa, synthetic construct
MATTRPVVSLRSPTAYSYIRFSSAIQAQGDSLRRQTKLAQEYCQKHSLTLSEQSFTDLGVSAFHSANSQEDSGLGQFLKALEQGVIPRGSFLLVESLDRLSRAKVQTALRQLLNIIEYGITVVTLIDNRTYNSESETTDLIISLTVMERAHNESKTKSERIKAAWANKRANPTTTNRTSLVPFWLKLNEDKRTYSIIEKNAETVRRIFQMSIDGHGVIGIARRLNDEQILSAKGGSWSSTSISRILNSKAVLGEYTPNIGRTSTNAPISDYYPSIIDEETFYLSQSRKAERSKPESAGRKTTFPNVFNQVAKCGVCGATMYYDNKSPTLKYLTCREFKKKNCTNRPIRIEFMHKFIIEQYLLPKNFQHHINMTTETSKQGDSISSIEEKIKEEEQALTQLMEIAKNFTSHIAIQQMENRDRKIMQLKKELEETKAQQAEVTLTPRIGFKQAQQLVANALQMEVHDKKPNCTDPELIREYRVTLNRSLKEIFNSLRIHNLKSASEITVECNQFTYAIDRKSLKSIHENLYWLSLCDMSHTSVKLAKLF

SEQ ID NO: 5633 - protein, 514 aa, synthetic construct
MNNNKALAVLYVRFSTKKQEAGDSQRRQIESAEQWCERNNAELSAQTYEDLGVSAFKEGGKRPALEDLINAIRMGKIPRDSYLLIEDHDRLSRRGWRYTQDLVYQLVQLGVRLVMLKTGVVYDADNINNIADNIVLMISAERAHQESERKSHLIKASREKARRDKKVTGKLPAWVSRDGDGFTFNDKKATIQELINCKLSGKSHQSTAKHLNSLKMTTGNDSAWSASGVRAIVQNHALYGAKAYFDTGKDGRMNKDPIEIVSDIFPALITYEQYQFLNKRQQAGRTSKRGAYSRLLKCGACGGAMTTRTSNYKGKPRAYKMCVKATEGSCNQVERIREPEVYLNEALHYLKYESSSTLYVSRTSEYQQRLETLNATVDLLTKNGNIEALARVYTDIKEVSDLIEESKVLDQNNVDVKVDFSLISSIEDVEQRNIELRKVLREIRFYCIEKVGQTSKWKVVIEQINGIKKYLVLDQKYGFGNTVVDYASLLTQGTEDNREPWEIEDSEEWESYSY

SEQ ID NO: 5634 - protein, 399 aa, synthetic construct
MNVVLYIRVSSVRQVNEGHSLEGQLKDLRAYCSANSHTIVKEYIESGNSAYKGSRPIFNQMLNEVTSRVFNVDAVVVYSLSSFARDLLYQLSTIKRLEDSGIRLFSATENLPEDDTTFKYLTVMLGLVNEMNSKQNGINVQSRLTQTAKDGYFTGGRVPLGYRSVKCEEGKKNTRKKLVIVEEEAAVVRKIFELSLTGTSGKGLGIKAIADFLNRHGFKYRGSSWSNNTVHKILTSTTYYGEFVFRKKTDSPIVISVPAIIDKNKFIEVRKSLKERDAQQLWVKAIRSNNLLTGLLKCGICGGGMTVCSGKSGRYKYYACTKKLKKSVDLCQSKWVPKQELDQLVESTIIEHVINVTNIQAIIDEVKTELLSGRERHKRQSLKTYSKAKSYRAKVGKHL

SEQ ID NO: 5635 - protein, 598 aa, synthetic construct
MDEKPRIAHIYSRVSKGTQVKGDGLRRQIEIASKFIEDVNMSNSRDGLPVYTLADSPIYDRGLSAYFGLNTDENAGLGAFLKAAENGQVEKGTLLIVEAIDRISRLPVDDARALFARFKKYGIDVAICRFNLIIYHDKSSDLGQDLLITTAIHLAHLESEQKSKRIRARFTHKRLLEKEGGARRTSISPSWIELSKDKTHFVLIPERARIVRKMVDLKLQGWGAHRITVYLNERGYPCWNRSKAWYTKIVEKYLKMIQLVGDFQPVEHVHGEKGMRKEPVGDVIKGYYPALITEEEWIRLKASFKRSGGRQTGAFSNLFSYMLYCPTCGTCMSYFKPNRGRIKVRCRKQIDKQGCDQRALNYEEIEPRLIKALAGLDYAKINNNSFASLQKELNTLEAQVAELEASADDIKTQMLEESDPRIISAYVNKLKAVYTEQDKAKARFEKLSTQTSDYDVNTLEQLQLERNEDRERYNGFVRSFVKYVIASDSKLDKPLRIVFKSEAVGEVPVFFNDDINNKAISDIFTAQKDVNEAAPIRLINMSRVHGNLGKLAAIDTVPVPDDLDDPLERIKYLFAVRQVVRQNPEKWQAIADEARLFE

SEQ ID NO: 5636 - protein, 399 aa, synthetic construct
MNVVLYIRVSSVRQVNEGHSLEGQLKDLRAYCSANSHTIVKEYIESGNSAYKGSRPIFNQMLNEVTSRVFNVDAVVVYSLSRFARDLLYQLSTIKRLEDSGIRLFSATENLPEDDTTFKYLTVMLGLVNEMNSKQNGINVQSRLTQTAKDGYFTGGRVPLGYRSVKCEEGKKNTRKKLVIVEEEAAVVRKIFELSLTGTSGKGLGIKAIADFLNRHGFKYRGSSWSNNTVHKILTSTTYYGEFVFRKKTDSPIVISVPAIIDKNKFIEVRKSLKERDAQQLWVKAIRSNNLLTRLLKCGICGGGMTVCSGKSGRYKYYACTKKLKKSVDLCQSKWVPKQELDQLVESTIIEHVINVTNIQAIIDEVKTELLSGRERHKRQSLKTYSKAKSYRAKVGKHL

SEQ ID NO: 5637 - protein, 529 aa, synthetic construct
MKKVYSYMRFSRPEQAKGSSIDRQSQYAEQYALEHGLELDKSLTMMDKGLSAFHGVHKTKGAFGQFLSAVTAGKVPSGSVLVVESLDRLSREDPLIAQAALTDLILAGITVVTAADNQVYSREEIQQNPFKLIMSLVVMIRANEESETKQRRSNAFLKSALNQYQTNGNIRRLGADPSWLDFNKDDNTYSFNARVDVIRRILSLYNQGIGSLKIARQLTEESIPTLSGKRNAWGQTTVANIVRSHALYGMKRINVQGVDYDLEDFYPALITKSKWLALQQHRAKRSKTMHGRGEVVHLITGHGKGFTTCGYCGGGLGAQTQKQYKRSGEYSKTVTRLHCLTHKETSSCCSSVFLEPIESAILFAACIGVEPQSLVPTVNNVNYSALINEIDNKVKHIVEQVTAGAPWELFKDAHDKLKLEKQKLIKERDSQKPDVNQSDVQKWVNKLVELADKARANDKEARLKCRTLINSICKGIVIKLRGHDLKSEPVATITFVTDEQFEFKVGKNGAVQFVDNGMAVNRRLKPLLT

SEQ ID NO: 5638 - protein, 531 aa, synthetic construct
MAIAYSYIRFSSSQQSQGDSLRRQTQLAEKYCIENNLTLSDTTFRDLGVSAFHSTNSQEDSGLGQFLSALNQGRISEGSYLLVESLDRLSRAKVQTALRQMLNIIELGVKIVTLMDNRIYDQESDTTDLIISLTIMERAHNESKTKSERIKAAWVHKRQNPTTTNRHSSTPFWLSLNADKKTYKLKEKYVEIVRKIYQLSIDGWGVIKIVRHLNESNIKAPKGGSWATTTVSRVLTSKAVLGHYEPMQNRKSLNLTIEDYYPSIIDEATYYLSRQRQNERSKPEAAGRKTNYPNPLSQIAKCKLCGSSMYYENKSKSLKYLTCREFKKGSCTNKPIRIELIYRFICEVFNSPMYYQYQAKLVEKSNKKDNNKLEELEAKKTEQENALRGLLSMSNDFSNTIIQEEIKVRSERIESFKNHIENVKAEQAVEHTRSTHINFTEALQLAVNAFRFPLEKVQVEELSCEELFNTRVRLNRILKHAFNSLSIYHCGESERITIETEVMEGFSEGLKYETTRQSIKEPLSSRVWSVR

SEQ ID NO: 5639 - protein, 653 aa, synthetic construct
MFDYDKSRFNGICIPYSRFSTTEQDKVGRKSLERQLEEAKRYARENNLYINEELMFADKGVSGFAKQGHLSKTFEKGQMSLILEVLEDVPFKERENIYLCFHAFDRFSRQHPEVAYEQFSKILKRGFNIVTTIDDCFYSSKEADLESMLISIIKMSSAHYESEVKSVYVSDAHRRRRETLEYLYNHPTQKGKHKHIGLKQSTTPRWILESEIIYDFVDENGVVRKDSFSKFSLDEAKAVIINQIFDWKIQGLGHTKICQLLNQKKIPTFEDGNCRKAKQWHTFAISNLFKNKSTIGTFTLKTIEHEEYFCESERIFKTRSNKVDATSEMENYFPAVVTVEKYETALKVIAMNNKGEKISEPEDKTHVFSKVLRCTCGGRLVFKGTRKTGKSEKSDWFEYLRCEKAILKDGCDAENIIYKDFEMAFLRFATSSNYTVFSTTQSKLKTKLKRLSIKQSHLNSEKEQLLLEAKGLKKTFESIVTQNLDATLLLDLISKNEASLNTVRNELVKIDEQIKGVEREYEKSGKPIDKRTIKKELRSEDYPKRLLMRRAVNQQLRKNVVHMEVCSTKLLKFVIVCFDDYVIRTYAYQDEFSTDLMFNSIKINVENLDESEVYDLITHLFKEVRISLSGGNAVITNFDLKVHLSGVKEKYLK

SEQ ID NO: 5640 - protein, 653 aa, synthetic construct
MFDYDKSIFDGICIPYARFSTTEQDKVGRKSLERQLEEAKRYASQNNLYISDDLIFTDKGVSGFAKQGQLSKTFEKGQMALLLDVLEDVPFKERENIYLCFHAFDRFSRQHPEVAYEQFSRILKRGFNIVTTIDDCLYSSKEADLESMLISIIKMSSAHYESEVKSVYVSDAHRRRRETLEYLYNHPTQKGKHKHIGLKQSTTPRWIIESEIIYDFIDDNGVARKDSFSKFSLDEAKAKIINQIFDWKIQGLGHTKICQFLNQKQIPTFEDGNCRKAEKWHTFAISNLFKSKSTIGTFTLKTVEDEEYFCESERIFKTRSNKVDATSEMENYFPAVVTVEKYEAALKIIAMNNKGEKISEPEDKTHVFSKVLRCTCGGRLVFKGTRKTGKSEKTDWFEYLRCEKAILKDGCDAENIIYKDFEMAFLRFATSSNYTVFSTTQSKLKTKLKRLSIKQSYLNSEKEQLLLEAKGLNKTFESIVTQNLDATLLLDSISKNKSSLNTVQNELVKIDNQVKGVEREYEKSGKPIDKRTIKKELRSEDYSKRLLMRKAVNQQLRKNVVHMEVCSTKLLKFVIVCFDDYVIRTYAYQDEFSSDLMFNFIKINVENLDESEAYDLIIHLFKEVRISLSGENAVITNFDLKIHLSGIKEKYLK

SEQ ID NO: 5641 - protein, 673 aa, synthetic construct
MIDEETLREEIFQYDKAKFKGICVPYARFSTKGQSKVGKKSLERQLSKAREYAKRNNLFINEDLIFTDKGVSGYSNQGELSKAFKKGQMATMLLLLEEVPPEERDNVYITFHNFDRFSRMSPDAAQAHFNKILNRGFKIVTTIDNQLYDRRDKGMSNMLISIIKMTTAWQESLNKSIYITDALSRKKKVIEYLYNHPSQKGRHKHIGVVQPSIPRWIDQENITYEYIDADGSKRTDTFKKFSLNQYKAEVVRKIFELKIAGLGYTRICQKLNNDGVEVFEQGRFKKAKKWHPYAVQNIITSDKVLGHITLKEMVTEEYHCKETDEIKTKKVKKEVTSKLENYYPAVVDEEVFRLANVLKFQEKKGKPLGRIGERTNIFATFMSCYCGATLQYSRSQINKRSNKAPVYREQLRCNNALVKNGCFDDYINYVELEQAFFKYVHHIDFREVCLVGDKSLETEIKNLQAEITYLNGQKKELKLKNSGLEKTFESAISQGLNADYVLVALNEAKKSADLIETKINDLKVRITKLQLSLDSKESDFLDIVEYSKRIKNSSTETKIMMRKKLNDFLHSKIKWMEVCSSKHSKFVILCFHDDVIRTFAYSENYANDLMFNTIKISYEVEDSQLNYELFLIYIHQIKRSLRGETEVVSNGDLIEALQRLKRKFYAGKGIDYV

SEQ ID NO: 5642 - protein, 634 aa, synthetic construct
MKLEHFSHTEPQIYSYSRFSNIRQEKGRSLARQKKFIDEVSAKFNLKINKDLVMTDRGLSAFHGHHKTKGALGVFLAAVEKQLIKPGSVLIVESLDRLSREQPYIAQATLASLVNADIVVVTAADEKIYSKETMAKDPLGTMILSVLEMVRAHKESLRKTEASIDFLHGQIATHEEGGVSDLAGPLPFWISRKQRPHPKIKTGFELNEHEEIIRLIVDMHFKQGMGLRPISVELLNRGIKPPSQLKHSPANSRKPKNDVWGVSTLSHIVSNQALCGRYVVNLNYQKDGKKHVEDYVLRSYYPAIMSEEEFDTFQAIKKRRYGSNKGDKSKRNGLVYLLTDYGNKSVCAKCGRSIGSQPQKQKHGIRRRLHCSKHKETANCCKSIIQDYIEDAFLISVARHIDYNLINTQVKPADIIRNSDRLEEIDLEMANVIDMRRTVKDEKIKLKLKFDYETLENEKEELIKQKLEFKQFKIAPDDIKKFIRTVNDARNYNNNEARTFVKSILMQCIRKIEVHMEKKKLECYGYPNLFENSIVNVVDVEFYTDKKLSIFVSAETNALLFSKISDEFADESLGSFTEEQLKAWNDVGFDNFQNLGERGTLVNENENSTENLWFASDLAEAFMNEIINQSEDES

SEQ ID NO: 5643 - protein, 545 aa, synthetic construct
MNKYHLYQRVSKQIQAEEGQGIQRQEQACEHWISDYNKRLLSEGKSAYSKGLIYEDRGKSAYTAANFKRGELGALINDIENGKIEKGDLIVIELIDRFSRANVDFVRSQFQRIIDAGVKIAITKWNLVFEENMESVSSVTGRILLEIGMYLAYQESSQKSSRIKASRKLLEDSGRKSIAKPPFWLARNLDLKSYTIIEENAEIIRKIFDLKLNFNYGPQKIIKSLGDLDIYRYSFDENGNLIKTTKNSPLSESSINAYIRNTNVIGKLDGKDYYPRIIDDRTFYAVQKRTRENTGGVGEIFRNVFVGVGKCGCLIRKENENGCGSLAKCGYIMAFSSRKVKNPTKGMYLKCNRKRKSTKCDSKNINYYLAQNKIYNVLKSLKFDIDQSVDISHLEEKINTIDKSMSKIREYMTQYSDDEEWENQYKIKRMEREKIENEIKASKSRITGKLSNLDIDFSKEKDRVLFNQFLKDNRITVYFTKERMEIIIGSLNNFSIKCGYDDSNRDIDHIIESYSKNGLVGIEEKSGKSEGKGLLRFNLPTVPGS

SEQ ID NO: 5644 - protein, 664 aa, synthetic construct
MFSFDKSKFKGICVPYARFSTKGQSKIGKKSLERQIEEARRYAKSNNLYINEDLIFADKGISGFAQQGNIAKAFKKGQMQVMLALLEEVPYQEREFIYVTFHNFDRFSRMSPKQARTYFDLILQKGFNVVTTIDNQLYTRHDKDLGKMLISTIKMTTAWEESQVKSIYIKDALARKKKVVEYLYNHPSQKGKYKHIGVVQPNMPRWIDHEKIELTYTDESGSKRTDSFKKFTLNKEKAKIVNYIFDLKIQGLGYARICRRLNEEGIPTFDQGKHRIAKKWHVFAVQNLICNEMVLGHITLHTHNEEEYMCEIDKVFKKRKIKQTATEKLYNYYPAAVSEAKYLEAHKNTIQQDKPKKLGRIGERTNIFAQILLCECGGTLQYRRTKKNKKKSESVSVNEYLQCNNAFVNHKCNSQTINYTMLETAFFRYVNNIDFKKICSTTNSKHALKIIDLDADIKELTDEIESLKLREAGLAKTYMSLASAGLDGSTALIDREKTKKEIAEKVLELENLELKKKGLEIEADKDNREFVDINDYMLNKDKYSSDEKIIIRKKINDFLHSKIEWMEVVSTERQKFVIIAFHDTVIRTFAYDDRCANDLMFNEIDVDLSGLNRVQASNLMFTLIKAIRNSLKGVEAVITKADLISYLQHIKQDYLNNIGEQASV

SEQ ID NO: 5645 - protein, 644 aa, synthetic construct
MFNFDKSKYKGICVPYARFSTDVQDEIGRKSLERQMEEAKRFSNEYGLFFDEDIAFVDRGVSGFALSGDTAKTFQKGQMQLMLELLEEIDVSEREFIYITFHNFDRFSRMSPDVASRYFEQILDKGFNIVTTIDNEVYRRNSGNLEQMIISIIHMSTAYYESEVKSIYISDSRQRRRDVIEYLYNDETQKGKHRHVGIKACCPRWIKTKDIIYEYVGKDGTVKKEALKRFEIDEERAQIINYIFDLKIQGLGNGKICQVLNEQNIPVFHSGNYTKAKYWNLSTISNYLKNENVIGHSYLYHKAKEEVFNEKTQTFSTKRVRKIATDKLYNYYPPIMSEEKFNQAKEAVKANSNNVDRSKASEKPHMFSNLMRCSCGTRLHYKLTKKNNVKKVDDYFEYLKCERSALNDGCTGENINYKNFEAQFINFIRYIDVNEILNHANGEEAETQGLTELEEREAAINLKITGLTKTYQGLINAGVDGSDVLVELEKAKGELQEVEFEKSKLLNSMKSQTSSSSESIKQKKSALKSKVFAEKVEARKAVNELLKQKIRWMEVYATAYAKFVIVCFVDNVIRTYAYQDEFATDLMFNTIKINTDGLKGYEADELMVLMIKTVRESLAGMNEVITNTDLKIKLAAVKSEYMSK

SEQ ID NO: 5646 - protein, 531 aa, synthetic construct
MTIAYSYIRFSSSQQSQGDSLRRQTQLAEKYCIENNLTLSDTTFRDLGVSAFHSTNSQEDSGLGQFLSALNQGRINEGSYLLVESLDRLSRAKVQTALRQMLNIIELGVKIVTLMDNRIYDQESDTTDLIISLTIMERAHNESKTKSERIKAAWVHKRQNPTTTNRHSSTPFWLSLNPDKKTYKLKEKYVEIVRKIYQLSIDGWGVIKIVRHLNESNIKAPKGGSWATTTVSRVLTSKAVLGHYEPMQNRKSLNLTIEDYYPSIIDEATYYLSRQRQNERSKPEAAGRKTNYPNPLSQIAKCKLCGSSMYYENKSKSLKYLTCREFKKGSCTNKPIRIELIYRFIYEAFNSPMYYQYQAKLVEKSNKKDTNKLEELEVKKIEQEKALRGLLSMSNDFSNTIIQEEIKVRSERIESFKKHIENVKAEQAVEHTRSTHINFTEALQLAVNAFRFPLEKVQVEELSREELFNTRVKLNRVLKHAFNSLSIYHCGESERITIETEGMEGFSKGLKYETTRQSIKEPLSSRVWSVC

SEQ ID NO: 5647 - protein, 644 aa, synthetic construct
MFNFDKSKYKGICVPYARFSTDVQDEIGRKSLERQIEEAKRFSNEYGLFFDEDIAFVDRGVSGFALSGDTAKTFQKGQMQLMLELLEEIDVAEREFIYITFHNFDRFSRMSPDVASRYFEQILDKGFNIVTTIDNEVYKRNSGNLEQMIISIIHMSTAYYESEVKSIYISDSRQRKRDVIEYLYNDETQKGKHRHVGIKACCPRWIKTKDIIYEYVGKDGSVKKEALKRFEIDEERAQIINYIFDLKIQGMGNGKICQVLNEQNIPVFHSGNYTKAKYWNLSTISNYLKNENVIGHSYLYHKAKEEVFNEKTQTFSTKRVRKIATDKLYNYYPAIMSEEKFNQAKEAVKANSVKVDRSKSSEKPHMFSNLMRCSCGTRLHYKLTKKNNVKKVDDYFEYLKCERAALNDGCKGENINYKNFETQFINFIRYIDVNEILDHANGVEAVIQGLTELEEREAAINLKITGLTKTYQSLINAGVDGSDVLVELEKAKGELQEVEFEKSKFLNSMKSQTSSSSESIKQKKSALKSKVFAEKVEARKAVNELLKQKIRWMEVYATAYAKFVIVCFVDNVIRTYAYQDEFATDLMFNTIKINTDGLKGYEADELMVLMIKTVRESLAGMNEVITNTDLKIKLAAVKSEYMNK

SEQ ID NO: 5648 - protein, 664 aa, synthetic construct
MFSFDKSKFKGICVPYARFSTKGQSKIGKKSLERQIEEARRYAKSNNLYINEDLIFADKGISGFAQQGNIAKAFKKGQMQVMLALLEEVPYQEREFIYVTFHNFDRFSRMSPKQARTYFDLILQKGFNVVTTIDNQLYTRHDKDLGKMLISTIKMTTAWEESQVKSIYIKDALARKKKVVEYLYTHPSQKGKYKHIGVVQPNMPRWIDHEKIELTYTDESGSKRTDSFKKFTLNKEKAKIVNYIFDLKIQGLGYARICRRLNEEGIPTFDQGKHRIAKKWHVFAVQNLICNEMVLGHITLHTHNEEEYMCEIDKVFKKRKIKQTATEKLYNYYPAAVSEAKYLEAHKNTIQQDKPKKLGRIGERTNIFAQILLCECGGTLQYRRTKKNKKKSESVSVNEYLQCNNAFVNHKCNSQTINYTMLETAFFRYVNNIDFKKICSTTNSKHALKIIDLDTDIKELTDEIESLKLREAGLAKTYMSLASAGLDGSTALIDREKTKKEIAEKVLELENLELKKKGLEIEADKDNREFVDINDYMINKDNYSSDEKIIIRKKINDFLHSKIEWMEVVSTERQKFVIIAFHDTVIRTFAFDDRCANDLMFNEIDVDLSGLNRVQASNLMFTLIKAIRNSLKGVEAVITKADLISYLQHIKQDYLNNIGEQASV

SEQ ID NO: 5649 - protein, 642 aa, synthetic construct
MFNFDKSKYKGICVPYARFSTDVQDEIGRKSLERQIEEAKRFSNEYGLFFDEEIAFVDRGVSGFALSGDTAKTFQKGQMQLMLELLEEIDVAEREFIYITFHNFDRFSRMSPDVASRYFEQILDKGFNIVTTIDNEVYKRNSGNLEQMIISIIHMSTAYYESEVKSIYISDSRQRKRDVIEYLYNDEKQKGKHRHVGIKACCPRWIKTKDIIYEYVGKDGSVKKEALKRFEIDEERAQIINYIFDLKIQGLGNGKICQVLNEQNIPVFHSGKYTKAKYWNLSTISNYLKNENVIGHSYLYHKAKEEVFNEKTQTFSTKRVRKIATDKLYNYYPPIMSEEKFNQAKEAVKANSNKVDRSKTSEKPHMFSNLMRCSCGTRLHYKLTKKNNVKKVDDYFEYLKCERSALNDGCTGENINYKNFEAQFINFIRYIDVNEILDHANGQETQGLTELEEREAAINLKITGLTKTYQGLINAGVDGSDVLVELEKAKGELQEVEFEKSKLLNSMKSQTSSSSESIRQKKSALKSKVFAEKVEARKAVNELLKQKIRWMEVYATAYAKFVIVCFVDNVIRTYAYQDEFATDLMFNTIKINTDGLKGYEADELMVLMIKTVRESLAGMNEVITNTDLKIKLAAVKSEYMNK

SEQ ID NO: 5650 - protein, 664 aa, synthetic construct
MFSFDKSKFKGICVPYARFSTKGQSKIGKKSLERQIEEARRYAKSNNLYINEDLIFADKGISGFAQQGNIAKAFKKGQMQVMLALLEEVPYQEREFIYVTFHNFDRFSRMSPKQARTYFDLILQKGFNVVTTIDNQLYTRHDKDLGKMLISTIKMTTAWEESQVKSIYIKDALARKKKVVEYLYNHPSQKGKYKHIGVVQPNMPRWIDHEKIELTYTDESGSKRTDSFKKFTLNKEKTKIVNYIFDLKIQGLGYARICRRLNEEGIPTFDQGKHRIAKKWHIFAVQNLICNEMVLGHITLHTHNEEEYMCEIDKVFKKRKIKQTATEKLYNYYPAAVSEAKYLEAHKNTIQQDKPKKLGRIGERTNIFAQILLCECGGTLQYRRTKKNKKKSESVSVNEYLQCNNAFVNHKCNSQTINYTLLETAFFRYVNNIDFKKICSTTNSKHALKIIDLDADIKELADEIESLKLREAGLAKTYMSLASAGLDGSTALIDREKTKKEIAEKVLELENLELKKKGLEIEADKDNREFVDINDYMLNKDNYSSDEKIIIRKKINDFLHSKIEWMEVVSTERQKFVIIAFHDTVIRTFAFDDRCANDLMFNEIDVDLSGLNRVQASNLMFTLIKAIRNSLKGVEAVITKADLISYLQHIKKDYLNNIGEQASV

SEQ ID NO: 5651 - protein, 584 aa, synthetic construct
MTEPMIYSYRRVSTLKQVDGSGMEIQTDEELLKRLSEKYGLKPSPETIDDIGVSSFRGRNVKEGELGVFMKAVSAGEVSKGSILAMQNLDRLSRQGVDAGQHIYTSLRKAGIKIYSAHDDKLFGEKSDEDVTDSINASIIFKRAWYESDVKSKRTTSTAHEQIKAFLRGEGKDNNGVKAIKVAGTSVWWVDESDGYVRPHKRLFPIAKEICKRIADGWGTNRLIGWLNSTYEPPIRRKKNTDSSPWSHSTIQRLHKNTALYGEKRFKLHLEGREDENGNTLKPEEFVLPDYYPALISKDEFLALQEARRQRTPKRGLSENKRYVSLLTGMKLTFCLNCEDEHPHPIGTLQTKKGYRRLFCIYGSRGGDSVCTGWSTQAKWIEKPLLDVCKDKIWRAPEVDNTQYLAGLSKEQDLNKKIRNLVLLVEGLEGENIPEVTDRIKMLRVELNKQKEWNEAEQSRIATKSCMSIEHLQDEWGDVTAKALKEDEHEARQKVRDLLCQSVEGILIGRNKSNEVLTIYISFVDGDERIICCRGEELLSFASIGTPAAKTNHYVKHEFPKGTDLAEAVKLVQRDAVNLYLAEY

SEQ ID NO: 5652 - protein, 559 aa, synthetic construct
MRYVAYLRVSSHNQVETGDSIDGQRNKIINWAHEGNHHIVGWYIDEAKSAYHGTRAEFSRMLDDLEQGLVRADGVIVYSLSRFSRNLLVQLQATKTLEKLGISLVSAIESFPENPEDQYVMVTMLGVMNEHQSRQNGKVVSDRLMDTARKGFFTGGIPPYGYKSIEVAGDTSNIRRKLEIVEEEADLVRHIFELAEKGNCGKGIGIKNILGILNGQGLTYRGKRWSKSTLSRVLNNPVYYGERLFGKNSKKDTVASPAPAILSKEQFDRTRESILARGVNMHNSKSVRSPSLLTGILRCAVCGGSMVVTSGKSGKYKYYQCSLQVQRDTKPKLDKEVREKLIPQVFSEQHITNVYSQARELLKEKSGASRDKMLQTTNAINRTKVKAKTLIDLLASGELQPNATVNNHLSELNTTISNLEATLKQQAALSRLPLKNVGKKQLTNFVRCIRKHIESSTDEQLKQLLLSTFKEIKVLPEKKILATGANVNILRVATNAKTGTDFSVPVFGTIWRRDRDLNPRYAINVCRFSRPVLSTTQPSLRCGTYNREWNSRCKALNYN

SEQ ID NO: 5653 - protein, 499 aa, synthetic construct
MAIAYSYIRFSSKAQAEGDSLRRQLQKTKEWCRNNDVELSDKNFQDLGISAFKEKTRPSLDDLFTAIQTGSIIEGDYIILENLDRLSRQGIDHTQEMLRKILRSGVNVVDLTNGLELNKTSLNDLVSVIRIALAADLAYQESKKKSERVLAAKATQRKLVREGKVINKRLPFWVTNSDGYQLNDKAQIVRDIIKQRTSGVGFHRIAMNLNNVYEAPKAKHWSDTTIRDIVKSRALYGSMVDKDGEVENVFPALISFTEWQAIQAEHVSSAGGYTQHNHLARLVKCECGSAMSKKIQKSKTKTKTHEYNTWKCIAATSGGCGHKGVIRDLDLDVFKSLNHLKINKSKSSSQLNKINQQIEKKTLRQQELEQALLEDDAPIAALTKAIKKTNEELKQLRSERDLLSVRTDSKLLIELQNNAVEFNIELRKLIEKIVVIPVSSNQFRIKIHQHNGHIVNCVKTRTSQRSEWTRLFGKTEEILKIATEDDGIPYTDWGETDEL

SEQ ID NO: 5654 - protein, 575 aa, synthetic construct
MTKMAYSYTRLSTEKQINGHGFTRQREAIEKVCCQYGWQLSDQTFNDLGVSAWKGANATTGALSQFIDLAKKGAIRPNSVLIVESVDRLSRQQVDKSLRLMLELLEVGVSIFTLSDSKLYTTNSDSVMLDLMMWLMTAQRAHEESEIKSLRVRAAKKKNKELIRKGIIVTRKCPEWLTVSDDKSCFLVNNERAEIVRKIFTWYSQGFSTKPIALKLNELGIPYWGKSSTWSYRHIRSLLKHRGVIGEIQLLKRIDGRDVSDGDPVEDYYPAIIDRGLWATCQQIKSSKTTAKGRIVERGMANLFRGLLKCECGSGLAINSSTVKGRTYRFLRCSQLKTTGCQAKNWHYEKTERILLIALRHSLSSFCEEDHAVSLRESQHYLARINEELQEKERQAENAINYLLDKPSRLLEARLQTLEDDIARLKAIQEQAEHRLEAVHYEKSTALDKVEELQRVLEDIANDDDSRHKANGLLRRLIDTVTLGSISNPRSKEFMELSGNECHGLIVIKRRDGLEVRVEVLKNYELSISWEGDEFTVIECSPTQQPNSQHVPQKFINVGEQTVDLWDDEGWVASS

SEQ ID NO: 5655 - protein, 545 aa, synthetic construct
MKKYHLYQRVSKQIQAEEGLGIQRQEQVCEHWISEYNKRLLDDGKSAYSKGLVYEDHGKSAYTTANFKRGELGTLMKDIESGKIAKGDLIVIELIDRFSRANVDFVRKKFQSILDAGVKVAITKWNLVFEENMEGISSVSARLLLEIGMHLAYQESSQKSTRIKASRKLLERSGKKSIAKPPFWLVRNLDLRSYTIIEENAEIVRKIFDLKLKFNYGPQKIIKSLGELEIYRYKFDDNGNLVKTTKNSPLSESSINAYIRNPNVIGKLDGKDYYPRIIDDKTYYAVQKRTRENTGGASDIFRNVFVGVGKCGCLIRNEDENGYVKFTKCGYIMAYSSRKVKNPTKGQYLKCNKKRKNTKCKSENINYYLAQNKVYSVLKSLKFDFSQSVDISHLEEKINILNKEMSKIRTFMAKYTDDDEWENHYNVKRMEREKIENEIKNSKSLITGKISSLDLDFSAEKDRVLFNQFLKDNRVIVYFTKENMEIIIGSLNNFSIKCGYDDSSRDIDHIIESYSKNGLVGIEEKVGKSEGKGLLRFNLPTVSGS

SEQ ID NO: 5656 - protein, 481 aa, synthetic construct
MITTNKVAIYVRVSTTNQAEEGYSIDEQKDKLTSYCNIKDWSIYNVYTDGGFSGSNTERPALEQLIKDAKKKAFDTVLVYKLDRLSRSQKDTLYLIEDVFIKNDIAFLSLQENFDTSTPFGKAMIGLLSVFAQLEREQIKERMQLGKLGRAKSGKPMMWAKAAYGYNYNKERSELIVNELEAIVVREIYHLYLEGMSITKIRDRINDKYPKKPAWHYRIIRGILDNPVYCGYNQYLNQIYPGNHEPIISEEVYNKTQKELKIRQRTAAEYFNPRPFQAKYMLSGIAQCGYCYAPLKIIMGMVRKDGTRYIRYECYQRHPRKTKGVTVYNNNEKCHSGAYEKHVLESYVLQEISKLQNDVSYIDELFSDPDTASIDRESYQKQIDSLTNKLKRLNDLYIDDRITLEELKEKSLEFTTTRAHLETELENDPAIKQQEKKEHMRQVLKAEDILSIDYEQQKILVKALINKVQVTAEAIVIKWKI

SEQ ID NO: 5657 - protein, 521 aa, synthetic construct
MGNVMVIPAKRQIGNTGRKQDAKPKLRVAAYCRVSTDSDEQATSYEAQVEHYTEYIKKNPEWEFAGIYADDGISGTNTKNREEFNRMIEDCEAGTIDMIITKSISRFARNTLDCLKYIRQLKEKNIPVFFEKEAINTMDAKGEVLLTIMASLAQQESQSLSQNVKLGLQFRYQNGQVQVNHNRFLGYTKDEEGNLVIDPEQAEVVKRIYREYLEGYSMDKIAAGLEADGILTGAGKPRWHTSTINKILRNEKYIGDALLQKTYTTDFLNKTRVKNTGIVPQYYVEGNHEAIIPREIYMRVQEELVRRRVVKTSANGKKRSYSCNHCFSQIIICGDCGEMFRRIHWNNRGCKSIVWRCISKLEPTGLECHARTINELDLQEIVLTALNELLGDKSKYQKQLQQNIASVIRASAAITTDGIDEKLMELQQELVKKANNKEAYDEIADQIFALREKRQHASMDTVQRDEQLQRITELQDFIKDQPSNLTVFDETLVKRWLKQIIIWPTHCTVELKSGLKVDVER

SEQ ID NO: 5658 - protein, 541 aa, synthetic construct
MKKIIAIYARKSLFTGKGDSIGAQVDTCKRFIDYKFANEDYEIKIFQDEGWSGKTTDRPDFINMVNLIKSKKIDYVITYKLDRVGRTARDLHNFLYELDNLGIVYLSATEPYDTTTSAGRFMISILAAMAQMERERLAERVKSGMIQIAKKGRWLGGQCPLGFDSKREIYIDDMGKERQMMKLTPNKEEIKIVKLIYDKYLEMGSMSQVRKYCLENSIRGKNGGDFSTNTLKQLLASPIYVKSSDNIFKYLESQNINVFGTPNGNGMLTFNKTKEIRIERDKSEWIAAVGKHKGIIDDNKWLQIQQQLQQQSEKQIKSSGRQGTTSTGLLSGIIKCEKCGSNLLIKTGHKSKKNPGTTYSYYVCGKKDNSYGHKCDNKNVRTDEADSAVITQLKLYNKKLLIKNLKEALIKNEKANTDNIEILESKLKEKEKAVSNLVKKLSLVDDENISNIILNEITNINKEINDIKLQLSNETLKINEVTQATLDTEIYIKILENFNKKIDDITDPIEKRNLLKSALESVEWNGDSGEFKINLIGSKKK

SEQ ID NO: 5659 - protein, 507 aa, synthetic construct
MKRAISYIRFSSEKQSRGDSLRRQSKMVTDWLKAHPEYHLDQDLSFRDLGVSGFTGKHLQGGLGDFLTAIEKGLVKAGDTLLIESLDRLSRQAVDRASELLRNILRSGVDVVTLSDGEHYTKESLRDPLSLIKSILIMQRSHEESLRKSERIQAAWDAKKEAAKAGIKVSKRCPAWLKLNDDRKSFSVIPEKVETVKRCFQLRLEGKSIWEIVRTMNAEGHQTLHQHKPGSFGQSSVQDLLKNRSVIGYFTPKGCEEISGYYPAIIDETTFYKVQQLSYARHGRKPASAKPLSVNLFKGVIRCSECGHALIITGFSDTRNGIYRCPLRNENRCSAKGLSRKQTDGTLLTLLSRLDRFDSDMTNVIDTLRLHREHISNNIEKLVQLSLEIEDLSAITIKLKQLKGELSQVDADIEKETQRLKSIDVGCLSDCDLTTKAGRIEAQLIIKSAVKEVVLNTAKRRCKVTFHNGKVIDLSITENPSDNVTEAIQSLSEVTERGLIDVDEVII

SEQ ID NO: 5660 - protein, 558 aa, synthetic construct
MRACLYSRYSSDLQSASSIEDQVRLCEERARHEGWEIVNAYSDAGVSGASLMRPGIQMLLSDALSGTFDLVVTEALDRLSRDQADIAGLFKRLEFAGVKIVTLSEGEITSLHIGLKGTMNEMFLRDLADKTRRGLRGRVENGKSGGGISYGYRVRKMFNALGEAIKGEREIDEEQAAIIRRIFTEYALENVSPKKIAARLNAEHTPSPSGKGWTQSTINGNRRRGTGILNNALYIGQMIWNRQKFLKDPSTGKRVARLNPETEWIRQDVPELRIIPQDLWDAAKARQTVLDEIDGPLATRKRPQYLLSGLLECGVCSGGFAKVNTERYGCANARNKGASVCTNTKTITREKLEEAVLSALQTHLLQDELVEVFCAEYTRHKNELLKAQDKALNDARNELAKLAKERENIIDAIKAGVSGALVKDDLERVAARQEELKALLDRAPEEPRPLLHPAMAKRYREEVRALRTLLSQRNGNGEAKEIVRSLIEKIVLNPVKGKKDLSLDLYGDLAGILSVATQEKTMPQKYKRPGKTACNDNNSGPSVKLVAGAGFEPTTFGL

SEQ ID NO: 5661 - protein, 507 aa, synthetic construct
MKRAISYIRFSSEKQSRGDSLRRQSKMVTDWLKAHPEYYLDQDLSFRDLGVSGFTGKHLKGGLGDFLTAIEKGLVKAGDTLLIESLDRLSRQNVDRASELLRNILRSGVDVVTLSDGEHYTRESLKDPLALIKSILIMQRSHEESLRKSERIQAAWNRKKELISEGIKISKRCPAWLRLNDDRKSFSVIPEKVETVKRCFQLRLEGKSIWEIVRTLNAEGHQTLNQYKAGSFGQTSVQDLLKNRSVIGYFTPKGCEEISGYYPAIIDETTFYKVQQLSYARHGRKPASAKPLSVNLFKGVIRCSECGHALIITGFSDTRSGIYRCPLRNENRCSAKGLSRKQTDGTLLTLLSRLDRFDSDMTNVIDTLKLHREHISNNIEKLVQLSLEIEDLSAITSKLKQLKNELSQVDADIEKETQRLKSIDVGCLSDCDLSTKAGRIEAQLIIRSAVKEVVLNTAKRRCKVTFHNGKVIDLPITENPSEDVTEAIQSLSEVTERGLIDVDEVII

SEQ ID NO: 5662 - protein, 506 aa, synthetic construct
MRTVITYLRFSSATQGAEGADSTRRQNDLFKQWLKKNSDAQVVASFSDEGLSGYKGKHLTGQFGDMLARIEAGEFPGGTILLVESIDRIGRLEHLETEALMNRIIAHGIEIHTLQDGLIYTRDALSDDLGISIIQRVKSYLAHQESKQKSFRVSEKWKQRAKLALAGKQRLTKMVPGWIDPDTLKLNEHAETVRLIFKLLLSGESLHNIARHLQSNGIKSFSRRKDANGFSVHSVRTILRSETTIGTLPASQRNDRPAIPNYYEAAIDASTFNKAQEILDKNRKGRTPASDNPLTINIFKGLFRCQCGASVHPTGTKNKYQGVYRCNNHLDGRCDVPPLKRKPFDRWMIDNFLGMIDVGNDGESERKIAALQHEVEIVTARIKKATALLLEMDDITELKTQVKGLNQKRTEIQTTIDTLKRKTSLSDKGLPQLKDIDLMTKAGRVECQLILSKHLKGLTLGKDSVTVTLQNDTEITIPTDPLPLNDGTSIFEIADKELLDIDAYQL

SEQ ID NO: 5663 - protein, 453 aa, synthetic construct
MIKGACYVRVSTDNQLENYSIEEQTDRLKAYCKAKDIQIVKIYTDGGYSGGNVNRPALQQMLQDIGKGLIDSVIVYKLDRLSRSQKDTLMLIEDCFLAKNVDFVSVNENFDTSTPFGRAMIGILSVFAQLEKDQITERFTMGRIGRAKNGYFHGGGNTPTGYDYIDGELIINDYEALQVKDLYNRFLKGYSIHNCWQYMHQKYGGWSNEVSVRNVLKNELYIGKVKFKGVAYQGNHQPIISEEIFRQVQDLFNSSRRTSDTFKRSPFKANTLLSSLVYCGKCGARFHGEHGNYSCYSRTKGDKKYIVDPNCKNKKWKIEELDKLVLDYITRLDFSKLQNSHPTPVPVTDYSLRLTEIDKQIEKLIDLYQVSGIPLESIQKKMDALTKEKEALLNVSKPKNVPVTTLAEMITARDTLMSLSDSGSLDEKRACLTMIIDRIIIDDDNVNIKLKQL

SEQ ID NO: 5664 - protein, 604 aa, synthetic construct
MKKVFVYHRVSSDQQLDGSGIARQAELLEGYLERTGICAEMDDPAPVVLSDQGVSAFKGLNISEGELGAWMEQVRNGMWDGSILVVESIDRFSRQNPFDVMGYINALMAHNVAIHDVMANIVISRSNSKDLPFVMMNAQRAYDESKYKSDRIRKGWAKKREQAFNKGTIVTNKRPQWIEVENDKYVLNHKAAVVKEIFALYQTGMGCPTIAKQLQTKKGELYKFNRPWTGELVHKILTNRRVTGKIFISEIIRNHDDIDNPVTQKKYDMDVYPVVISEDEFDLVQELLKSRRPNAGRITVKKEGQEEVLIKSNLFSGIARCTECGGSMYHNVVRAKRTPKKGDPKIEEYRYIRCLNERDGLCENKAMTYETVERFVVEHLLGMDLNTVIKEQEFNPEVEVIRIQIDQVKDQITNYENGIERRKSAGKAVSFEMREELDDAKLELEQLLARQASLATVQVDVPVLQDVNVTELYDVNNVDIRTRYENELNKIVSNIRLKRNGTSYTIDINYKQNELKRHVLFVENKKKEQTLIGEVIIEDVDGAKFYYTPSFMIMLKDGEIRFQQTNEDLSIIDYSLLLNYIDAVDRSDAVGVWMRNQFNFLTFN

SEQ ID NO: 5665 - protein, 559 aa, synthetic construct
MKTKLYSYIRFSSMRQNDGSSYERQIRMAREIAVKYDLELVNDYQDLGVSAFKGANSKTGALSRFLDAIGRSVPVGSWLFIENLDRLSRADIVSAQELFLSIIRRGITIVTGMDNKIYSLDTVTANPMDLMFSILLFIRGNEESQTKRNRTNSSALIKIKAHQENPQNPAVAIEEVGKNMWWTDTTSGYVCPDPVFFPIVQEVVELRRNGRSTAEILDHLNATYTPPPAASHKRHSNWSRAMIERLFHTRALIGIKEISVDGVKYELKDYYPRVLDDAEFYHLKKSIGVRACNYGDKEEAKPIPLLSGVNLLKCEHCGSAMVKVKGTNKRPNQYRYSCDAMRSSRIACVHTNWSFRGDQLEKAVLQLLADKIWIAEDKANPVPALKVQIDEISRKIDNLITLSAMTGATKELADQITTLNSERETLYNQIKMAEEEMYSVDSQGWEKLAEFDLEDVYNEDRIKVRFKIKQALKRIGCSRIDKYKNLFVLEYIDGKTQRVVIENSRGPRKGRIFVDLKTINDRQILESNGLVLHPCLDMLTDKNWKPEEEIPGPLQEFGI

SEQ ID NO: 5666 - protein, 543 aa, synthetic construct
MTQLKKKRIGLYARVSTEIQTNGYSIQSQLNQLKEYCQFQGYEVVDEYTDRGISGKTTQRPELQRMLKDANDGKLDCIMVYKTNRLARNTSDLLTIVEELYKINVEFFSLTEKIEIASSTGKLMLQILASFSEFERNTIVENVYNGQRQRAIEGYYQGNLPLGYDKVPDSKKELMINQHEANIVKYIFESYAKGHGYRKIANALNHKGYVTKKGKPFSISSITYIISNPFYIGKIQFAKYRHWSDKRRKGLNEEPIIADGKHAPIIDKALWDKVQFKRQESRKKPQVHGKGTNLLTGIVKCPSPKCGAAMAASNTTNTLKDGTKKRIRYYSCSNFRNKGSKVCSANSVRADVLEKYVMDQILEIIKSKKVLKQLVEKVNERSQIDVSSLNHDIAYKQSQCEELKIKMHTLTKTIEDSPDLDSILKPTILNYQDELNQINNQIHQLEQDKQAEAPHYDADMIANILQTIFKDIDKLEKSQLKSLYLTVIDRIDIRKDEHHKKQFYVTLKLNNEIIKQLFNNHPLDEVLLSTSSLFLPQTLYLTI

SEQ ID NO: 5667 - protein, 542 aa, synthetic construct
MDKMKKKLVGGYIRVSTERQVEGYSIEGQITQIEQYCQFNGYELVDIYADRGISGKSMNRPELQRMLNDAKNGKLDCVMVYKTNRLARNTSDLLTIVEELHRQNVEFFSLSERMEVKNSTGKLMLQILASFSEFERNTILENIYTGQRQRALEGYYQGNLPLGYNNIPDNKKELMINQHEANIVKYIFESYAKGHGYRKIANALNHKGYVTKKGNPFSISAVTYILSNPFYIGKIQFAKYKDWNDKRRKGLNDNPVIAEGKHTPIISQALWDKVQFKRQESRKKPQVHGKGTNLLTGIVKCPKCGAAMAASNTTNTLKDGTKKRIRYYSCSNFRNKGSKVCSANSVRADVLEKYVMDQILEIIKSKKLLKQLVEKVNERSQIDVSSLNHDIAYKQSQCEEIKAKMHTLTKTIEDSPDLDSVLKPTILNYQDELNQINNQIHQLEQDKQAEATHYDADMIANILQTIFKDIDKLEKSQLKSLYLTVIDRIDIRKDEHHKKQFYVTLKLNNDIIKQLFNNHPLDEVLLSTSSLFLPQTLYITIE

SEQ ID NO: 5668 - protein, 543 aa, synthetic construct
MNEMKKKRIGGYIRVSTEKQVMGYSIEGQITQIEQYCQFNGYELVDIYADRGISGKSMNRPELQRMLNDAKNGKLDCVMVYKTNRLARNTSDLLTIVEELHRQNVEFFSLSERMEVKNSTGKLMLQILASFSEFERNTILENIYTGQRQRALEGYYQGNLPLGYNNIPDNKKELMINQHEANIVKYIFESYAKGHGYRKIANALNHKGYVTKKGNPFSISAVTYILSNPFYIGKIQFAKYKDWNDKRRKGLNDKPVIAEGKHTPIISQSLWDKVQARKRQVSEKPQVHGKGTNLLTGIVKCPSPKCGAAMAASNTTNTLKDGTKKRIRYYSCSNFRNKGSKVCSANSVRADVLEKYVMDQILEIIKSKKVLKQLVEKVNERSQIDVSSLNHDIAYKQSQCEELKIKMHTLTKTIEDSPDLDSILKPTILNYQDELNQINNQIHQLEQDKQAGAPHYDADMIANILQTIFKDIDKLEKSQLKSLYLTVIDRIDIRKDEHHKKQFYVTLKLNNEIIKQLFNNHPLDEVLLSTSSLFLPQTLYLTI

SEQ ID NO: 5669 - protein, 507 aa, synthetic construct
MKRVISYIRFSSEKQAKGDSLRRQSKMVTDWLKAHPEYYLDQDLSFRDLGVSGFTGKHLKGGLGDFLTAIEKGLVKAGDTLLIESLDRLSRQNVDRASELLRNILRSGVDVVTLSDGEHYTRESLKDPLALIKSILIMQRSHEESLRKSERIQAAWNRKKELISEGIKISKRCPAWLKLNDDRKSFSVIPEKVETVKRCFQLRLEGKSIWEIVRTLNDEGHQTLNQYKAGKFGQTSVQDLLKNRSVIGYFTPKGCEEITGYFPSIIPETDFYKVQQLSYSRYGRKPASDKPLSVNLFKGVIRCSECGHALIITGFSDTRSGIYRCPLRNENRCSAKGLSRKQTDGTLLTLLSRLDRFDSDTTNTIDTLKLHREHLSSNIEKLVQLSLEIEDLSAITSKLKQLKGELSQVDADIEKETQRLKSIDVGCLSDCDLTTKAGRIEAQLIIKSAVKEVVLNTAKRRCKVTFHNGRAITLPITENPSEDVTEAIQSLSEVTERGLIGVDEVII

SEQ ID NO: 5670 - protein, 522 aa, synthetic construct
MRSVITYLRYSSSQQGTGDADSSRRQNELFQHWLKRNGDAHIVASFEDEARSAFKGKHLTKEFGAMMARIEANEFPEGTILLCEAIDRIGRLEHLKTESLMNRILEHGIEIHTLADNIIYTKEILSADLGVSLIQRVKSYLAHQESKQKSFRVSKKWEQRAKLALSGEQQLTRMVPGWIDPDTRKLNEHAQTVKTIFSLLLAGESLHNIARYLQANKIKSFSRRKDANGFSVHSVRTILTSESTVGTLAASKHNDRPAIPDYYEAAVNVATFNQAQEILSKNRKGRPPASDNPITINLFKGLMRCKCGASVHPTGVKNTYQGVYRCNNAVDGRCEVPTMKRKSFDRWMIENIVGLLERSGDNDTAKRVAELKYQIEMLTKRIKKAASLLLELDDVPELKVQAKELSHQRQQKQSELDSLSHHESLSDKALPQLAEIDLTSKTGRVEVQLILSKYIQTIEVQHEMIVITLRNGNVIGCSRSLQPVMSKKLVKEVMKNTTVDIIDVVSSDEDFRHSGRSVTKRG

SEQ ID NO: 5671 - protein, 507 aa, synthetic construct
MKRAISYIRFSSEKQSRGDSLRRQAKMVTDWLKAHPEYYLDESLTFRDLGVSGFTGKHLKGGLGDFLTAIEKGLVKAGDTLLIESLDRLSRQDIDIASELLRRILRAGVDVVTLSDGEHYTKESLKDPLSLIKSILIMQRAHEESLRKAERIQAAWDAKKEAAKAGIKISRRCPAWHKLNDDRKSFSVIPEKVETVKRCFQLRLEGKSIWAIVKALNDEGHQTLNQYKAGKFGQTSVQDLLKNRSVIGYFTPKGCEEIAGYYPAIIDETTFYKVQQLSHSRYGKRSVSDKPLSVNLFKGVIRCSECGHALIITGFSDTRNGIYRCPLRNENRCSAKGLSRKQTDGTLLALLSRLDRFDSDTTNTIDTLKLHREHISNNIEKLVQLSLEIEDLSAITSKLKQLKGELSQVDADIEKETQRLKSIDVGCLSDCDLTTKAGRIEAQLIIKSAVKEVVLNTAKRRCKVTFHNGKVIDLPITENPSEDVTEAIQSLSEVTERGLIDVDEVII

SEQ ID NO: 5672 - protein, 543 aa, synthetic construct
MNEMKKKRIGGYIRVSTEKQVMGYSIEGQITQIEQYCQFNGYELVDIYADRGISGKSMNRPELQRMLNDAKNGKLDCVMVYKTNRLARNTSDLLTIVEELHRQNVEFFSLSERMEVKNSTGKLMLQILASFSEFERNTILENIYTGQRQRALEGYYQGNLPLGYNNIPDNKKELMINQHEANIVKYIFESYAKGHGYRKIANALNHKGYVTKKGNPFSISAVTYILSNPFYIGKIQFAKYKDWNDKRRKGLNDKPVIAEGKHTPIISQSLWDKVQARKRQVSEKPQVHGKGTNLLTGIVKCPSPKCGAAMAASNTTNTLKDGTKKRIRYYSCSNFRNKGSKVCSANSVRADVLEKYVMDQILEIIKSKKVLKQLVEKVNERSQIDVSSLNHDIAYKQSQCEELKIKMHTLTKTIEDSPDLDSILKPTILNYQDELNQINNQIHQLEQDKQAGAPHYDADMIANILQIIFKDIDKLEKSQLKSLYLTVIDRIDIRKDEHHKKQFYVTLKLNNEIIKQLFNNHPLDEVLLSTSSLFLPQTLYLTI

SEQ ID NO: 5673 - protein, 503 aa, synthetic construct
MAEVVPVVSYARISSDGRGDEHGVQDQHKVNRQTAGRLGWTIVHEFTDNDKSAAKANVVRDAFEAMVKALRAGRLADGTPIEGVVIVAEDRLARRPGDYERFVEAFTYRDGRVFADARGPKDLYSEDTESMGLFGAVISKMEVRKMQRRMRRSHRARAEQGVPVGGPRPFGWLADRVTIHPEEGPLLREAVDAIIAGGSLRAIVMKWQQLGVRTTRGNEWSRRSLRATLSSPRLCGWREINGELVRDADGNPVMGKWEALITPDELLAVRAAFERTSREKADQYAALGMRFDQREHRYLLSGILRCGKPKGDGTGICNAPLRVRPARGGVHLYVCPAPSDGGCGGVGRRGDRVDVFISELVLAKLDESPDADTEDVPWAGEQELNDKKEQLAELTRQWNARTISNELFFMLVPSLEQRINELRREGQAFTAAKERKRARRIVDGADIRRRWYLPEDQGGLSMGTKRAMVMEAFHAVIVHPVGKGMGSWGNFDPNALEPVWRED

SEQ ID NO: 5674 - protein, 692 aa, synthetic construct
MSEQSAAKVTGSHLARTAYLYVRQSTLRQVLTNTESTTRQYALRQKAIALGWPAEQIVTIDTDQGQSGASAADREGFQRLVAEVSMGRAGIVLGLEVSRLARNNADWHRLLEICAMSGTLICDEDGLYDPTDFNDRLLLGLKGTMSEAELHFIRARLIGGQLSKARRGELQMSPPVGLLYDPTGKVVLDPDIGVQQAIHHVFSLFARTGSARATVQQFNADKLLFPVRVRTAAHKGELAWMPLQHWRVPRTLHNPRYAGAFAYGRRRERLAGNGKKSYQLVPREQWITLIRDAHPGYISWDTYETNQRLLLGNATAHGADRAAGPAREGTALLQGLAICGRCGRRMTLRYHTRRGAQIPDYQCMNRCIQDGGQRCQAIPGGVVDDAVGGLLLDTLTPHALEVALTVQAELDTRAAEADALRRGHVERARHRADLARRRYLAVDPDNRLVADSLEADWNDALRALQTAHEDYERASAAATAALNDELKDRIRLLATDFPALWSNPNTQQRDQKRMVRLLVDDVTLHKTDSIHLHVRLRGGQTHSLTIEIPPTGWQARQTHPDTIKALDGLLDTHTDAETADALNAAGHRSGENKPFTAGIVVHIRRKYHLPRHAERLRTQGLLTANELAQRLCVHRTTIKNWNRAGILNSHKANDKNERLYQPPTPGDPRLTTRQGSPLRKRVHTPPALGGAL

SEQ ID NO: 5675 - protein, 494 aa, synthetic construct
MTAVIYARYSSDNQREESIEGQIRECTAYAEKNGITVVKHYIDRALSAKTDNRPDFQQMIKDSEKRLFDIVLVWKLDRFARNRYDSAHYEYQLERNHVKLVSATEPISDSPAGIMVKSMLTGMAEYYSAELSEKVVRGMTENVLKGKYNGGTIPIGFKVDEEKFFQVDPLKAPFVVEAFQRYNDGATMKELMNWLNDSGVTTNRNQKFTYNSVQTLLTNKRYIGENHFKDIVMPDSIPAIVDKDLFEEVQLKIKKNSRAPARHKAEDDYLLTTKLFCGMCGAMMFGECGTGRNKVVHHYYKCATAKRFKTCKKKTVRKEWLEDLVVAETMKLIQDDAVIDAIVAEVMELQDQENTTLPLLEKQMREVENGIENMLNAIQAGVLTNSTKSRLEKLEAQQKELEVRIAEEKIARPRLSENQIRFWLTRFRKLDPNVKSHRETLINTFVNAVYLYDEKVLIAFNYKDGTKTITFDEIAAKDAPEGNGSDLGCFAPPR

SEQ ID NO: 5676 - protein, 520 aa, synthetic construct
MKKVITIEATPSIIRSSSDEFSLKKRRVAGYARVSTDHEVQATSYESQMRYYSEYINGRDDWEFVKMYSDEGISGTNTKLRTGFKSMVEDALDGKIDLIITKSVSRFARNTVDSLTTVRQLKEVGVEIYFEKENIWTLDSKGELLITIMSSLAQEESRSISENVTWGLRKQFAEGKVHFPYTNVLGFKAGEDGAIVVDQDEAKTVRYIFQQALIGKSPYHIAKDLTEQVIPSPSGKSHWNATTIKRMLRNEKYKGDALLQKTYTTDFLTKKKNINRGELPQYYVENNHEAIVDRETFDAVQQVLENKGRKSSTTIFSSKLVCGDCGHFFGSKVWHSTSKYRRVIYQCNEKYKGISKCSTPHVTEEEVIQWFISAVNQVLDNRIEVIDNLYVLLSIGNLEVIDEQIKVLETEAEVVSQLVANLVSENAIIRQDQDKYLKKYNQLTSKYEGIVQDIESLELQRMQKSKRNKELQDFIGTLEKLGKVLTDFDELLWESLVESVMINEDKGAKFKFKNGAVVAI

SEQ ID NO: 5677 - protein, 532 aa, synthetic construct
MRAGAKIYLYFRYSDIKQENGDSIRRQRECAQRVADKYKLEIDEESVITDRGVSAFYGNNAKKGNLAGFLKSVEQGEIEKDSILIVESFDRLSRDAPRDAHKLFDKLIDNDITIITENDGLEYNKETLAREPSRLFMMIGTMLRAHEESLTKQKRAIESIKGKVKEFRESGNVKSIGTVPHWLDYIDGSYVLNSRAENVKLIIDMYLNNEGLKSISRKLAEKGIKSPTGKDRWGITTIRTILDNKALYGFKEFEISYLVDGRKVKESFELESFYPPLISKVDYLVIQEKKKARSNSRESYGDVTYLLSSYGKGKSVCAKCGYATGTQTQKQINRKGKYMQSVMRLHCKKHSESGDCCKSFKCAELEKHFIYSIYHELDPEFLMKYKSKKVNKEGLKAEISEIDRQIKVLVSSMIELNNADLTTVFQEKLSDLNEKKIKLSNELNQTNDTKNEGDLKELKTLALKCLDVKNSVERKKLKNIIMQVLDKIVIDFETKSLSIKFTNGNVMNVYFDEKSKSYCTSLFRSKIIRRKN

SEQ ID NO: 5678 - protein, 547 aa, synthetic construct
MRTAYSYVRLSSKKQIQGYGQERQWQAIQAAALAHGWELSEKTFSDLGVSGWKGANIETGALSQFLQCVEDGYIEKGSVLIVENVDRLSRAGVQRAVSLLMQLLASGISIYTFTDSKLYEPDSHNPLMDLMAWALSAQRAFEESERKSQMILNAKAKAREKARLTGEIITRRCPSWLRVNQDKTAFELIPERVETVRKIFDLYVNGYGTPRIGRLLTEEGRKPLTGRAWYPRSISRILQYRAVLGEYQPTLNGKPDGDAIKNYYPAIIDEDRFNEVQAVLKEGGAGKGRRGKEMRNYFAGLLRCSCGEGMHIVSSCVKGKRYYQLRCLQYRISCFGSSWNFYKLSSFVLFALRRLPILEVMGSQDNNNIKELNAKERELTFLLEDTRRQLDNTINAIAALGLNDQLQSKFRELKTSVTNIEKQLSNVKTELETSQGKLVIQKQDSEMLTGRFLELIDSTKDIDGRIKLNQVLRRYLSKIEMHADKKEEYRYIKIYRKDGDELVSIQCDHSLKGALFESKDGLETFELLPATDAKRNEISNTLLCTPK

SEQ ID NO: 5679 - protein, 532 aa, synthetic construct
MAIAYSYIRFSSSQQSQGDSLRRQIQLAEKYCIENNLTLSDTNFRDLGVSAFHSTNSQEDSGLGKFLSALSQGRINEGSYLLVESLDRLSRAKVQTALRQMLNIIDLGVKIVTLMDNRIYDQESDTTDLIISLTIMERAHNESKTKSERIKAAWAHKRQNPKTTNRHSSTPFWLSLNPDKKTYSLKEKYVEIVRKIYQLSIDGWGVVKIVRHLNESNIKAPKGGSWATTTVSRVLTSKAVLGHYEPKQNRKSLNFVIEDYYPPIIQEDTYYLSKQRQNERSKPEAAGRKTDYPNPLNQIAKCKICGSSMYYENKSKSLKYLTCREFKKKNCTNKPIRIEIIYRFIYEIFNSPMNYQYQAKLIEKSKQRDTNKLKGLEAKKTEEENALRGLLSLSNDFSNTIIQEEIKARSERIESFKKQIENAKAEQAVEHTRDVHINFTEALQLAVNAFHFPLEKVKVEELPPEELFNTRVRLNRILKQAFNTLSIYHCNESKRITIEAEVMEGFPDGLKYETNQQSIREPIGNRIWSVYQ

SEQ ID NO: 5680 - protein, 529 aa, synthetic construct
MKKVYSYMRFSRPEQAKGSSIDRQSQYAEQYALEHGLELDKSLTMMDKGLSAFHGVHKTKGAFGQFLSAVTAGKVPSGSVLVVESLDRLSREDPLIAQAALTDLILAGITVVTAADNQVYSREEIQQNPFKLIMSLVVMIRANEESETKQRRSNAFLKSALNQYQTNGKIRRLGADPSWLDFNKEDGTYSFNERVDVIRRILSLYNQGIGSLKIARQLTEESIPTLSGKRNAWGQTTVANIVKSHALYGMKRINVQGVDYDLEDFYPALITKSKWLALQQHRSKRSKTMHGRGEVVHLITGHGKGFTTCGYCGGGLGAQTQKQYKRSGEYSKTVTRLHCLTHKETSSCCSSVFLEPIESAVLFAACIGVEPQSLVPTVNNVNYSALIDEIDNKVKHIVEQVTAGAPWELFKDAHDKLKLEKQKLIKERDSQKPDVNQRDVQKWVNKLVELADKARANDKEARLKCRTLINSICKSIVIKLRGHDLKSEPVVSITFVTDEQFEFKVSKNGAVQFVDNGMAVNRRLKPLLE

SEQ ID NO: 5681 - protein, 593 aa, synthetic construct
MQINDEVLKSLSNEHNLPIAQETYQDLGKSAYKGEHLENELGLFLAAVKNRTVAEGSILVVYSLDRLSRLEIGHAKQTYYDLTNNGVSVYAVVDNHLYRAHNAADDIIATITFERAHNESEIKSRRVIDAAKEGLKRWKETKQPQSSLGRSPFWIDQPTNSLNEKAEGVKVAVDLFLEGWSTIKVKQHLDKNYPYLRTRKTSIKKAQTWDYGVIDQLWRKTSLIGEKRLTIEDQKYVLSNYYPPLISLEKFNKLNRLKKPKLGRSTSTGSIHLLKGLARCGICGSAMVFVDKAQHSKNYVCSLAIKGEPLHNREVFSAELLELLTLEVCRDQYLVNSFNAQLNVEEKARVEYELAEEKKQLEDLKSRYKQKSRASLLDLIEDTEDKIEVLEQKLASFETFDLSDNLHLLNSDIFTEDVRTNFQHSSRAEIIDNLKSVLSDVTLNRVVEDSEFTKTGTVNCVSISWRFKNNQTRSISVKPFRYIGTGSNKKLFVPVRYEYTVPVIDEENRRGEKFVPEMIKKVHEKKLLNKFYPSKGRYQWDKLEFVLGEFQTGLHNFLPNFVADPDPDAFWGDMVDKARAKGVRYTVLSKNVI

SEQ ID NO: 5682 - protein, 545 aa, synthetic construct
MNKYHLYQRVSKQIQAEEGQGIQRQEQACEHWISDYNKRLLSEGKSAYSKGLIYEDRGKSAYTAANFKRGELGALINDIENGKIEKGDLIVIELIDRFSRANVDFVRSQFQRILDAGVKIAITKWNLVFEENMESVSSVTGRILLEIGMYLAYQESSQKSSRIKASRKLLEDSGRKSIAKPPFWLARNLDLKSYTIIEENAEIIRKIFDLKLNFNYGPQKIIKSLGDLDIYRYSFDENGNLIKTTKNSPLSESSINAYIRNTNVIGKLDGKDYYPRIIDDRTFYAVQKRTRENTGGVGEIFRNVFVGVGKCGCLIRKENENGCDSLAKCGYIMAFSSRKVKNPTKGMYLKCNRKRKSTKCDSENINYYLAQNKIYNVLKSLKFDIDQSVDISHLEEKINTIDKSMSKIREYMTQYSDDEEWENQYKIKRMEREKIENEIKASKSRITGKLSNLDIDFLKEKDRVLFNQFLKDNRITVYFTKERMEIIIGSLNNFSIKCGYDDSNRDIDHIIESYSKNGLVGIEEKSGKSEGKGLLRFNLPTVPGS

SEQ ID NO: 5683 - protein, 621 aa, synthetic construct
MRTSPKIYNYARVSTTKQLQGVGLETQQQRSVLETLSQEHDLPIHDENFVDQGLSAYHGKHREGALGLVLSHIESGEIPSGSILVVFSLDRLSRETVNVAMEQLLSIINRGVRVYTHIDGKMFDAKSQNLTADLIVSLITMQRANEESETKSKRIIAAQKEALKKWKIDGKPRGALGRVPFWIDQPTNSLNENAEGAKVAVDLFLEGWSTIKIKQYLDENYPYKQTRKRSIQKASTWDSGVIDQLWRKVSLIGDKRYTIDGEEHVLHNYYPSLISLEKFNKLTRLKKPKLGRSTSTGSLHLLKGLARCGVCGSAMVFVDKAQHSKNYVCSLATKGEQSHNREVFSAELLELLTLEVCRDQYLINSFNAQLNVEETARVEYELAEEKKQLEDLKSRYKQKSRASLLDLIEDTEDKIEVLEQQLASFETFDLSDNLHLLNSDIFTEDVRTNFRHSSRAEIIDNLKSVLSDVTLSRVVEASEITKTGTVNCVCITWRFKNDQTRSISVRPFRYIGTGSNKKLFVPVRYEYTVPVLNEENRRGEKFVPDMIKKLHEKKLLNKLYPSKGRYQWNNLELVLGEFQTGLHNFLPNFVADPDPDAFWGDMVDKARAKGTRYTVLSKNVL

SEQ ID NO: 5684 - protein, 575 aa, synthetic construct
MTKIAYSYTRLSTEKQIKGHGFTRQREAIEKVCCQHGWQLSDQTFNDLGVSAWKGANATTGALSQFIDLAKKGAIRPNSVLIVESVDRLSRQQVDKSLRLMLELLEVGVSIFTLSDSKLYTTNSDSVMLDLMMWLMTAQRAHEESEIKSLRVRAAKKKNKELIRKGIIVTRKCPEWLTVSDDKSCFLVNNERAEIVRKIFTWYSQGFSTKPIALKLNELGIPYWGKSSTWSYRHIRSLLKHRGVIGEIQLLKRIDGRDVADGDPVEDYYPAIIDRGLWATCQQIKSSKTTAKGRVVERGMANLFRGLLKCECGSGLAINSSTVKGRTYRFLRCSQLKTTGCQAKNWHYEKTERILLIALRRFLSSFNEEGHESAVKEAETKCALLREELMEKQRQATKLLEMLLEKDSDLMRERFDSIETQVNSLKDALKLADERAEALSYEKDIAFDKVDKLQSVLEEIANDDDARHKANGLLRRMLDTITLGAAPNPRSSVFKEFSDKEYQGLMLIKRKDGHEIKVEVLNDYKMAIAWDGDDFTVIECMPIQQFKSQTNPQSVIAISGQSVDLLNDDGWVSSF

SEQ ID NO: 5685 - protein, 399 aa, synthetic construct
MNVVLYIRVSSVRQVNEGHSLEGQLKDLRAYCSANSHTIVKEYIESGNSAYKGSRPIFNQMLNEVTSRVFNVDAVVVYSLSRFARDLLYQLSTIKRLEDSGIRLFSATENLPEDDTTFKYLTVMLGLVNEMNSKQNGINVQSRLTQTAKDGYFTGGRVPLGYRSVKCEEGKKNTRKKLVIVEEEAAVVRKIFELSLTGTSGKGLGIKAIADFLNRHGFKYRGSSWSNNTVHKILTSTTYYGEFVFRKKTDSPIVISVPAIIDKNKFIEVRKSLKERDAQQLWVKAIRSNNLLTGLLKCGICGGGMTVCSGKSGRYKYYACTKKLKKSVDLCQSKWVPKQELDQLVESTIIEHVINVTNIQAIIDEVKTELLSGRERHKRQSLKTYSKAKSYRAKVGKHL

SEQ ID NO: 5686 - protein, 653 aa, synthetic construct
MFDYDKSIFDGICIPYARFSTTEQDKVGRKSLERQLEEAKRYASQNNLYISDDLIFTDKGVSGFAKQGQLSKTFEKGQMALLLDVLEDVPFKERENIYLCFHAFDRFSRQHPEVAYEQFSRILKRGFNIVTTIDDCLYSSKEADLESMLISIIKMSSAHYESEVKSVYVSDAHRRRREMLEYLYNHPTQKGKHKHIGLKQSTTPRWIIESEIIYDFVDDNGVARKDSFSKFSLDEAKAEIINQIFDWKIQGLGHTKICQLLNQKQIPTFEDGNCRKAEKWHTFAISNLFKNKSTIGTFTLKTVEDEEYFCESERIFKTRSNKVDATSEMENYFPAVVTVEKYEAALKIIAMNNKGEKISEPEDKTHVFSKVLRCTCGGRLVFKGTRKTGKSEKADWFEYLRCEKAILKDGCDAENIIYKDFEMAFLRFATSSNYTVFSTTQSKLKTKLKRLSIKQSYLNGEKEQLLLEAKGLNKTFESIVTQNLDATLLLDSISKNKSLLNTVQNELVKIENQVKGVEREYEKSGKPIDKRIIKKELRSEDYSKRLLMRKAVNQQLRKNVVHMEVCSTKLLKFVIVCFDDYVIRTYAYQDEFSSDLMFNFIKINVENLDESEAYDLIIHLFKEVKISLSGENAVITNFDLKVHLSGIKEKYLK

SEQ ID NO: 5687 - protein, 673 aa, synthetic construct
MIGEETLREEIFQYDKAKFKGICVPYARFSTKGQSKVGKKSLERQLSKAREYAKRNNLFINEDLIFTDKGVSGYSNQGELSKAFKKGQMATMLLLLEEVPPEERDNVYITFHNFDRFSRMSPDAAQAHFNKILNRGFKIVTTIDNQLYDRRDKGMSNMLISIIKMTTAWQESLNKSIYITDALSRKKKVIEYLYNHPSQKGKHKHIGVVQPSIPRWIDQENITYEYIDADGSKRTDTFKKFSLNQYKAEVVRKIFELKIAGLGYTRICQKLNNDGVEVFEQGRFKKAKKWHPYAVQNIITSDKVLGHITLKEMVTEEYHCKETDEIKTKKVKKEVTSKLENYYPSVVDEEVFRLANVLKFQEKKGKPLGRIGERTNIFATFMSCYCGSTLQYSRSQINKRSNKTPVYREQLRCNNALVKNGCFDDYINYVELEQAFFKYVHHIDFREVCLVGDKSLETEIKNLQAEITYLNGQKKELKLKNSGLEKTFESAISQGLNADYVLVALNEAKKSADLIETKINDLKVRITKLQLSLDSKESDFLDIVEYSKRIKNSSTETKIMMRKKLNDFLHSKIKWMEVCSSKHSKFVILCFHDDVIRTFAYSENYANDLMFNTIKISYEVEDSQLNYELFLIYIHQIKRSLRGKTEVVSNGDLIEALQRLKRKFYAGKGIDYV

SEQ ID NO: 5688 - protein, 653 aa, synthetic construct
MFDYDKSIFDGICIPYARFSTTEQDKVGRKSLERQLEEAKRYASQNNLYISDDLIFTDKGVSGFAKQGQLSKTFEKGQMALLLDVLEDVPFKERENIYLCFHAFDRFSRQHPEVAYEQFSRILKRGFNIVTTIDDCLYSSKEADLESMLISIIKMSSAHYESEVKSVYVSDAHRRRRETLEYLYNHPTQKGKHKHIGLKQSTTPRWIIESEIIYDFVDDNGVARKDSFSKFSLDEAKAEIINQIFDWKIQGLGHTKICQLLNQKQIPTFEDGNCRKAEKWHTFAISNLFKNKSTIGAFTLKTVEDEEYFCESERIFKTRSNKVDATSEMENYFPAVVTVEKYEAALKVIAMNNKGEKRSEPEDKTHVFSKVLRCTCGGRLVFKGTRKTGKSEKADWFEYLRCEKAILKDGCDAENIIYKDFEMAFLRFATASNYTVFSTTQSKLKTKLKRLSIKQSYLNSEKEQLLLEAKGLNKTFESIVTQNLDATLLLDSISKNKSSLNTVQNELVKIDNQVKGVEREYKKSGKPIDKRTIKKELRSEDYSKRLLMRKAVNQQLRQNVVHMEVCSTKLLKFVIVCFDDYVIRTYAYKDEFSSDLMFNFIKINVENLDESEAYDLIIHLFKEVRISLSGENAVITNFDLKVHLSGIKEKYLK

SEQ ID NO: 5689 - protein, 653 aa, synthetic construct
MFDYDKSIFNGICIPYARFSTTEQDKVGRKSLERQLEEAKRYASQNNLYISDDLIFTDKGVSGFAKQGQLSKTFEKGQMALLLDVLEDVPFKERENIYLCFHAFDRFSRQHPEVAYEQFSRILKRGFNIVTTIDDCLYSSKEADLESMLISIIKMSSAHYESEVKSVYVSDAHRRRREMLEYLYNHPTQKGKHKHIGLKQSTTPRWIIESEIIYDFVDDNGVARKDSFSKFSLDEAKAEIINQIFDWKIQGLGHTKICQLLNQKQIPTFEDGNCRKAEKWHTFAISNLFKNKSTIGTFTLKTVEDEEYFCESERIFKTRSNKVDATSEMENYFPAVVTVEKYEAALKIIAMNNKGEKISEPEDKTHVFSKVLRCTCGGRLVFKGTRKTGKSEKADWFEYLRCEKAILKDGCDAENIIYKDFEMAFLRFATSSNYTVFSTTQSKLKTKLKRLSIKQSYLNGEKEQLLLEAKGLNKTFESIVTQNLDATLLLYSISKNKSLLNTVQNELVKIENQVKGVEREYEKSGKPIDKRIIKKELRSEDYSKRLLMRKAVNQQLRKNVVHMEVCSTKLLKFVIVCFDDYVIRTYAYQDEFSSDLMFNFIKINVENLDESEAYDLIIHLFKEVRISLSGENAVITNFDLKVHLSGIKEKYLK

SEQ ID NO: 5690 - protein, 673 aa, synthetic construct
MIGEETLREEIFQYDKAKFKGICVPYARFSTKGQSKVGKKSLERQLSKAREYAKRNNLFINEDLIFTDKGVSGYSNQGELSKAFKKGQMATMLLLLEEVPPEERDNIYITFHNFDRFSRMSPDAAQAHFNKILNRGFKIVTTIDNQLYDRRDKGMSNMLISIIKMTTAWQESLNKSIYITDALSRKKKVIEYLYNHPSQKGKHKHIGVVQPSIPRWIDQENITYEYIDADGSKRTDTFKKFSLNQYKAEVVRKIFELKIAGLGYTRICQKLNNDGVEVFEQGRFKKAKKWHPYAVQNIITSDKVLGHITLKEMVTEEYHCKETDEIKTKKVKKEVTSKLENYYPAVVDEEVFRLANVLKFQEKKGKPLGRIGERTNIFATFMSCYCGATLQYSRSQINKRSNKAPVYREQLRCNNALVKNGCFDDYINYVELEQAFFKYVHHIDFREVCLVGDKSLETEIKNLQAEITYLNGQKKELKLKNSGLEKTFESAISQGLNADYVLVALNEAKKSADLIETKINDLKVRITKLQLSLDSKESDFLDIVEYSKRIKNSSTETKIMMRKKLNDFLHSKIKWMEVCSSKHSKFVILCFHDDVIRTFAYSENYANDLVFNTIKISYEVEDSQLNYELFLIYIHQIKRSLRGETEVVSNGDLIEALQRLKRKFYAGKGIDYV

SEQ ID NO: 5691 - protein, 664 aa, synthetic construct
MFSFDKSKFKGICVPYARFSTKGQSKIGKKSLERQIEEARRYAKSNNLYINEDLIFADKGISGFAQQGNIAKAFKKGQMQVMLALLEEVPYQEREFIYVTFHNFDRFSRMSPKQARTYFDLILQKGFNVVTTIDNQLYTRHDKDLGKMLISTIKMTTAWEESQVKSIYIKDALARKKKVVEYLYNHPSQKGKYKHIGVVQPNMPRWIDHEKIELTYTDESGSKRTDSFKKFTLNKEKAKIVNYIFDLKIQGLGYARICRRLNEEGIPTFDQGKHRIAKKWHVFAVQNLICNEMVLGHITLHTHNEEEYMCEIDKVFKKRKIKQTATEKLYNYYPAAVSEAKYLEAHKNTIQQDKPKKLGRIGERTNIFAQILLCECGGTLQYRRTKKNKKKSESVSVNEYLQCNNAFVNHKCNSQTINYTMLETAFFRYVNNIDFKNICSTTNSKHALKIIDLDADIKELSDEIESLKLREAGLAKTYMSLASAGLDGSTALIDREKTKKEIAEKVLELENLELKKKGLEIEADKDNREFVDINDYMLNKDNYSSDEKIIIRKKINDFLHSKIEWMEVVSTERQKFVIIAFHDTVIRTFAFDDRCANDLMFNEIDVDLSGLNRVQASNLMFTLIKAIRNSLKGLEAVITKADLISYLQHIKQDYLNNIGEQASV

SEQ ID NO: 5692 - protein, 644 aa, synthetic construct
MFNFDKSKYKGICVPYARFSTDVQDEIGRKSLERQIEEAKRFSDEYGLFFDEDIAFVDRGVSGFALSGDTAKTFQKGQMQLMLELLEEIDVTEREFIYITFHNFDRFSRMSPDVASRYFEQILDKGFNIVTTIDNEVYKRNSGNLEQMIISIIHMSTAYYESEVKSIYISDSRQRKRDVIEYLYNDEKQKGKHRHVGIKACCPRWIKTKDIIYEYVGKDGSVKKEALKRFEIDEERAKIINYIFDLKIQGLGNGKICQVLNEQNIPVFHSGKYTKAKYWNLSTISNYLKNENVIGHSYLYHKAKEEVFNEKTQTFSTKRVRKIATDKLYNYYPPIMSEEKFNQAKEAVKANSVKVDRSKVSEKPHMFSNLMRCSCGTRLHYKLTKKNNVKKVDDYFEYLKCERSALNDGCTGENINYKNFEAQFINFIRYIDVNEILDHANGVEAETEGLTELEEREAAINLKITGLTKTYQSLINAGVDGSDVLVELEKAKGELQEVEFEKSKLLNSMKSQTSSSSESIRQKKSALKSKVFAEKVEARKAVNELLKQKIRWMEVYATAYAKFVIVCFVDNVIRTYAYQDEFATDLMFNTIKINTDGLKGYEADELMVLMIKTVRESLAGMNEVITNTDLKIKLAAVKSEHMNK

SEQ ID NO: 5693 - protein, 618 aa, synthetic construct
MESASPGLRVLGRLRLSRLTDESTSIERQRETIQRWAESQGHTVVGWAEDADVSGAVDPFDTPQLGQWLNHRVEEYDVIAAWKLDRLGRNAIQLNKLFGWCLDHNKTLVSCSESIDLSSWAGRMLASVIAGLAEGELEAIRERAKGSRVKLRESARFAGGKPPFGYRKKPRPGGGWMLEIDDSDNGDESPAGLVQRIVADVLDGKPVSRVVSKLNDDGYRTPRDYYETIKSGKPSLKLAVGEKRTSEWRSTALRNLLTNPALRGYVHHKGQVARGDDGMPLQLADEPLVDADEWEALQTIFDGHRERRSHYRRPDASPLVGLVFCYWCHAPLWHNRNVSRGHEYFYYRCPNIQQHERASMIPADQAEKAVAESFLDEAGDLPVMERVWVPGDSAEQELKEATTALDDVFAELETAKSEITRARARKRIAALDERISILEAKPKQEARWEYKQLGGTYRDAWESLGEAERWQLILKSGMTFAFGLTDKGRGPNSVWVSSVYTPEPLRQTLVSGVTQRRTLADADPHRDVSPADHTKHLPEHWATMREAGIQGIETHEDKTVVVLKTGERVEIPNWLDEIGISEITNDDDVRIVWTKDGRGFYHQPSGEWIEVPLGEPAG

SEQ ID NO: 5694 - protein, 610 aa, synthetic construct
MESASPGLRVLGRLRLSRLTDESTSIARQRETIQRWAEIQGHTVIGWAEDTDVSGAVDPFDTPQLGQWLNHRVEDYDVIAAWKLDRLGRNAIQLNKLFGWCIDHNKTLVSCSESIDLGSWSGRMLAGVIAGLAEGELEAIRERARSSRVKLREAARFAGGKPPFGYRKVRRDGGGWMLEIDEPAAELVGKIVADVLDGKPVSRVVMALNEGGYRTPRDYYETVKAGKPALKLAAGERRSSEWRSTALRNLLTNPALRGYVHHKGQIARGDDGMPLQLADEPLVDADEWEGLQAIFDGHRERRSHYRRPDASPLVGLVYCYWCHSPLWHNRNVSRGHEYFYYRCPNIQKHERASMIPAEQAEKAVAESFLDEAGDLPMMERVWVPGDSNEQALRDATTALDAVFTELETARSEITRERARKRIAALDERISNLETKPKREARWEYTQVGGTYREAWESLGENDRWQLILKSGMTFAFGLTDKGRGPNSVWVSSVYTPEPLRQTLVSGVTQRRTLADADPHRDVNPADHTKHLPERWASMREAGIQGIETHEDKTVVVLKSGGQVEIPHWLNEIGISEITNDDDVRIVWTTDGRGFYHQPSGEWVEVPLGEE

SEQ ID NO: 5695 - protein, 664 aa, synthetic construct
MFSFDKSKFKGICVPYARFSTKGQSKIGKKSLERQIEEARRYAKSNNLYINEDLIFADKGISGFAQQGNIAKAFKKGQMQVMLALLEEVPYQEREFIYVTFHNFDRFSRMSPKQARTYFDLILQKGFNVVTTIDNQLYTRHDKDLGKMLISTIKMTTAWEESQVKSVYIKDALARKKKVVEYLYNHPSQKGKYKHIGVVQPNMPRWIEHEKIELTYTDESGSKRTDSFKKFTLNKEKTKIVNYIFDLKIQGLGYARICRRLNEEGIPTFDQGKHRIAKKWHVFAVQNLICNEMVLGHITLHTHNEEEYMCEIDKVFKKRKIKQTATEKLYNYYPAAVSEAKYLEAHKNTIQQDKPKKLGRIGERTNIFAQILLCECGGTLQYRRTKKNKKKSGSASVNEYLQCNNAFVNHKCNSQTINYTMLETAFFRYVNNIDFKKICSTTNSKHALKIIDLDTDIKELADEIDSLKLREAGLAKTYMSLASAGLDGSTALIDREKTKKEIAEKVLELENLELKKKGLEIEADKDNREFVDINDYMINKDNYSSDEKIIIRKKINDFLHSKIEWMEVVSTERQKFVIIAFHDTVIRTFAFDDRCANDLMFNEIDVDLSGLNRVQASNLMFTLIKAIRNSLKGVEAVITKADLISYLQHIKQDYLNNIGEQASV

SEQ ID NO: 5696 - protein, 644 aa, synthetic construct
MFNFDKSKYKGICVPYARFSTDVQDEIGRKSLERQIEEAKRFSNEYGLFFDEEIAFVDRGVSGFALSGDTAKTFQKGQMQLMLELLEEIDVAEREFIYVTFHNFDRFSRMSPDVASRYFEQILDKGFNIVTTIDNEVYRRNSGNLEQMIISIIHMSTAYYESEVKSIYISDSRQRKRDVIEYLYNDQTQKGKHRHVGIKACCPRWIKTKDIIYEYVGKDGSVKKEALKRFEIDEERAKIINYIFDLKIQGLGNGKICQVLNEQNIPVFHSGKYTKAKYWNLSTISNYLKNENVIGHSYLYHKAKEEVFNEKTQTFSTKRVRKIATDKLYNYYPPIMSEEKFNQAKEAVKANSVKVDRSKSSEKPHMFSNLMRCSCGTRLHYKLTKKNNVKKVDDYFEYLKCERSALNDGCTGENINYKNFEAQFINFIRYIDVNEILDHANGVEAETEGLTELQEREAAINLKITGLTKTYQSLINAGVDGSDVLVELEKAKGELQEVEFEKSKLLNSMKSQTSSSSESIKQKKSALKSKVFAEKVEARKAVNELLKQKIRWMEVYATAYAKFVIVCFVDNVIRTYAYQDEFATDLMFNTIKINTDGLKGYEADELMVLMIKTVRESLAGMNEVITNTDLKIKLAAIKSEYMNK

SEQ ID NO: 5697 - protein, 644 aa, synthetic construct
MFNFDKSKYKGICVPYARFSTDVQDEIGRKSLERQMEEAKRFSDEYGLFFDEDIAFVDRGVSGFALSGDTAKTFQKGQMQLMLELLEEIDVAEREFIYITFHNFDRFSRMSPDVASRYFEQILDKGFNIVTTIDNEVYKRNSGNLEQMIISIIHMSTAYYESEVKSIYISDSRQRKRDVIEYLYNDETQKGKHRHVGIKACCPRWIKTKDIIYEYVAKDGSVKKEALKQFEIDEERAKIINYIFDLKIQGLGNGKICQVLNEQNIPVFHSGKYTKAKYWNLSTISNYLKNENVIGHSYLYHKAKEEVFNEKTQTFSTKRVRKIATDKLYNYYPPIMSQEKFNQAKEAVKANSVKVDRSKSSEKPHMFSNLMRCSCGTRLHYKLTKKNNVKKVDDYFEYLKCERSALNDGCEAENINYKNFEAQFINFIRYIDVNEILDHANGEEAETQGLTELEEREAAINLKITGLTKTYQGLINAGVDGSDVLVELEKAKGELQEVEFEKSKLLNSMKSQTSSSSESIKQKKSALKSKIFAEKVEARKAVNELLKQKIRWMEVYATAYAKFVIVCFVDNVIRTYAYQDEFATDLMFNTIKINTDGLKGYEADELMVLMIKTVRESLAGMNEVITNTDLKIKLAAIKSEYMNK

SEQ ID NO: 5698 - protein, 452 aa, synthetic construct
MKAAIYIRVSTQEQVENYSIQAQTEKLTALCRSKDWDVYDIFIDGGYSGSNMNRPALNEMLSKLHEIDAVVVYRLDRLSRSQRDTITLIEEYFLKNNVEFVSLSETLDTSSPFGRAMIGILSVFAQLERETIRDRMVMGQIKRVESGLPLTTAKGRTFGYDVVDTKLYINEEEAKHLQLIYDIFEEEKSITFLQKRLKELGFIVKSYSSYNKWLMNDLYIGYVSYSDKVHVKGIHEPIISEDQFYRVQEIFSRMGKNPNMNKESSSLLNNLIVCEKCGLGYVHRAKDTVSRGKKYHYRYYSCKTYKHTHELEKCGNKIWRADKLEEIIISRVKNYSFATRNLDKEDELDSITEKLKTEHSKKKRLFDLYINGTYEVAELDKMMADIDAQINYYNSQIEANKELKRNKKVQESLAELAAVDFDSLEFREKQIYLKSIINKIYIDGEQVTIEWI

SEQ ID NO: 5699 - protein, 452 aa, synthetic construct
MKAAIYIRVSTQEQVENYSIQAQTEKLTALCRSKDWDVYDTFIDGGYSGSNMNRPALNEMLSKLHEIDAVVVYRLDRLSRSQRDTITLIEEYFLKNNVEFVSLSETLDTSSPFGRAMIGILSVFAQLERETIRDRMVMGKIKRIEAGLPLTTAKGRTFGYDVIDTKLYINEEEAKQLRLIYDIFEEEQSITFLQKRLKKLGFKVRTYNRYNNWLTNDLYCGYVSYKDKVHVKGIHEPIISEEQFYRVQEIFSRMGKNPNMNKESSSLLNNLIVCEKCGLGYVHRAKDTVSRGKKYHYRYYSCKTYKHTHELEKCGNKIWRADKLEEIIIDRVKNYSFATRNVDKEDELDSINAKLKVEHSKKKRLFDLYINGSYEVAELDKMMADIDAQINYYNSQIEANEELKRDKKVQESLAELAAVDFDSLEFREKQIYLKSIINKIYIDGEQVTIEWI

SEQ ID NO: 5700 - protein, 452 aa, synthetic construct
MKAAIYIRVSTQEQIDNYSIQAQTEKLTALCRSKDWDVYDIFIDGGYSGSNMNRPALNEMLSKLHEIDAVVVYRLDRLSRSQKDTITLIEEYFLKNNVEFVSLSETLDTSSPFGRAMIGILSVFAQLERETIRDRMVMGKIKRIEAGLPLTTAKGRTFGYDVIDTKLYINEEEAKQLRLIYDIFEEEQSITFLQKRLKKLGFKVRTYNRYNNWLTNDLYCGYVSYKDKVHVKGIHEPIISEEQFYRVQEIFSRMGKNPNMNRDSASLLNNLVVCGKCGLGYVHRRKDTVSRGKKYHYRYYSCKTYKHTHELEKCGNKIWRADKLEELIIDRVNNYSFASRNVDKEDELDSLNEKLKTEHTKKKRLFDLYISGSYEVSELDAMMSDIDAQINYYEAQIEANEELKKNKKIQENLADLATVDFDSLEFREKQLYLKSLINKIYIDGEQVTIEWL

SEQ ID NO: 5701 - protein, 452 aa, synthetic construct
MKAAIYIRVSTQEQVENYSIQAQTEKLTALCRSKDWDVYDIFIDGGYSGSNMNRPALNEMLSKLHEIDAVVVYRLDRLSRSQRDTITLIEEYFLKNNVEFVSLSETLDTSSPFGRAMIGILSVFAQLERETIRDRMVMGKIKRIEAGLPLTTAKGRTFGYDVIDTKLYINEEEAKQLRLIYDIFEEEQSITFLQKRLKKLGFKVRTYNRYNNWLTNDLYCGYVSYKDKVHVKGIHEPIISEEQFYRVQEIFARMGKNPNMNRDSASLLNNLVVCSKCGLGFVHRRKDTMSRGKKYHYRYYSCKTYKHTHELEKCGNKIWRADKLEELIIDRVNNYSFASRNVDKEDELDSLNEKLKTEHTKKKRLFDLYISGSYEVSELDAMMADIDAQINYYEAQIEANEELKKNKQIQENLADLATVDFDSLEFREKQLYLKSLINKIYIDGEQVTIEWL

SEQ ID NO: 5702 - protein, 371 aa, synthetic construct
MIITKSISRFARNTLDCLNFVRELKELGVGVIFEKEAINTLDAKGEVLLTILSSLAQDESRSISENSTWGIRRRFENGQFKMSTKRFLGYDTDEKGKLVINREQAKIVERIYDEYLSGKTVDHIKRILEKEEVKNWNGTTKWHAKTIQSMLQNEKYKGDAILQKSYTVDFLTKKRAKNEGHIQQYHIEENHEAIIDPLIWEAVQLEYDRRSNYIEEHGTNSYSHNPERNFFAGKVVCGTCNQAFTRKGWKSKNQYRKVWQCQERYKVKGVQGCTNRHIDEVILIDVFILSWNALLDNREELKKKWETTAEFGNPLEQYRAVQFADITEDAKHIKEVDTDFILRTLDHIKVYETGRIIIRFMDGTEMECNGE

SEQ ID NO: 5703 - protein, 449 aa, synthetic construct
MKQVIGYLRQSTMKQQSLAAQKQAIEAIAEKHHIQHINFYSDKQSGRKDNRSGYRQMTQLIQQGQCDILCCYRLNRLHRNLKNALKLIKLCQTYRVHILSVHDGYFDMDQAFDRFKLNIFISLAELESDNIGEQVRNGLQEKAKQGRLITTHAPFGYEYHNGTFIINQNESPTVKAVFNYYIKGHGYKKIAQLLEEDNMYINRQPYQVRNIIINPNYCGRVNNQYGQFDNMFPSIVSTSIYEQAQRLRSQKQTKQTPSDNQLKQKIKCPCCNATLTNMTVRKKNHILRYYVCPKNMNASRFVCDFKGVNAQTLEDKVLEVCRDFYQNQRIYTKIKGAIDKRIKRQINIEKHHTLTQEQLIEKLAQGIIDAETFREQTQSLRQQPQLTTSINGHQVQHTIQNIIQKRFTLNILYPYIETIHITKDKNLIGIYFKNEPLNIVNQTMQSSIA

SEQ ID NO: 5704 - protein, 542 aa, synthetic construct
MQQLKTKRVGIYVRVSTEMQSTEGYSIDGQINQIKEYCDFHHFEVKDIYADRGISGKSMNRPELQRILKDAKEGNIDCVMVYKTNRLARNTSDLLKIVEDLHKQNVEFFSLSERMEVNTSSGKLMLQILASFSEFERNNIVENVFMGQTRRAQEGYYQGNLPLGYDKIPDSKHELMINQHEANIVKYIFECYAKGHGYRKIANALNHKGYVTKKGKPFSISSITYILANPFYIGKIQFAKYKDWSEKRRKGLNDKPVIAEGKHSPIINQDLWDKVQMRKKQVSQKPQVHGKGTNLLTGIIHCPQCGAPMAASNTTNTLKDGTKKRIRYYSCSNFRNKGSKVCSANSVRADVIEDYVMKQILEIVKSDKVIQRVVTHVNQENQVDGAALHHDIAYKQQQYDEVQIKINNLIKTIEDNPDLTSVIRPSIQKYEKQLNDIMNQINQFKNQQNEDKTLFDAKEISKLLQHIFHDIKHIEKSRLKALYLTVIDRIDIKKDGNHKKQFYVTLKLNNEIIKQLFNNKQLDEVHLSTSSLFLPQTLYLTI

SEQ ID NO: 5705 - protein, 559 aa, synthetic construct
MKGKIALYSRVSTSEQSEHGYSEKEQEQLLIKEVMKNFPGYDYETYTDSGISGKNIEGRPAMKRLLQDVKDNKIEIVLSWKLNRISRSMRDVFNIIHEFKEHGVGYKSISENIDTSNASGEVLVTMFGLIGSIERSTLASNVKMSMNAKARSGEAITGRVLGYKLSLNPLTQKNDLVIDENEAHIVREIFDLYLNHNKGLKAITTILNQKGYRTINQKPFSVFGVKYILNNPVYKGYVRFNNHQNWAVQRRSGKSDKNDVILVKGKHEAIISEDVFDQVHEKLASKSFKPGRPIGGDFYLRGLIKCPECGNNMVCRRTYYKTKKSKERTIKRYYICSLFNRSGSSACHSNAINAEVVERVINVHLNRILSQPNVIKQIASSVIEELKQKHSKQTEIKYDIDSLEKQKAKVKTQQERLLELFLDDEMDSEMLKAKQSEMNQQLEVLDQQIKEAKQANQSQGDIPNFDKLKARLILMITRFSLYLRKATPEAKNQLMKMLIDSIEITTDKQVKLVRYKIDESLIPQSLKKDWGSFFMPKFNFVINVANENRIENLSLLPLF

SEQ ID NO: 5706 - protein, 521 aa, synthetic construct
MKKVITIEPAKQVTHKVELPRFTKRRVAGYARVSTDHEDQTTSYEAQMTYYTDYINSRSDWEFVKMYSDEGISGTNTKKRLGFQEMVEDALDGKIDLILTKSVSRFARNTVDSLSTVRKLKEAGVEIYFEKENIWTFDSKGELLITIMSSLAQEESRSISENVTWGRRRQLAEGQVTFSYSQVLGFKKSDTGGFEIDHEEAKIVRYIFHQVLLGNNPNKIARELTAQGIPTPQGKRQWSYGTVKRMLRNEKYKGDALLQKSFTTDFLTKSTKLNEGELPQYYVENNHEAIIKREVFDLVQVELDKLERKRQTSNIFTGRLFCGDCGSAFGSKVWHSTSKYKRTIYQCNAKYKGEHKCQTPHVTEEEIKGWFLSAINQLLSNRDEIIANTELLIDMAKDTSSLEARLDDLEHHLETIRQDIEDLVDRNVRKAQNQDLYQEQYNTLVTAYQEKQKELQETRSVLEEQKSKQLSLDGFIQNFKEQDDLITDFNQELWQTSVERLDIKEDKKIFLTFKNGLRIDL

SEQ ID NO: 5707 - protein, 539 aa, synthetic construct
MVNKLVKPHIYLRVSNSKQQYGSGLDEQRDRIEQYIKSNHHLFTADYHEWVDIGFSAYKNKNIVDGKLGELVELVNVGKLGAGDHLIVYSIDRLSRRASWDEKTIQLIVSAGIRIHDITTPVVLDRDDPFSKIIFELILSRGHNESVVKSERSRSGWDAKHKHMVESGITMTKRLPRWLDWDATKGLVIKPREVSIIKRIFNSYVEGMSGPYLAKTLNAEKLLINDALWRPNAITKLIKDERLVGSFRGIKTQVVVPNIFPVIIEKDLFELANKRLSVNSAGIKGRVRVSKDDREVRNIITGICRCGLCGGPVSTSTNSIGVTYIRCRNRINFETCSNGGIRLDFTERALLGHIKQIDFQKLINNKHDDISELDLLNSEMELLLSDQAQCMTQIEERKKNKKSVSLPFAVALTDLNDRIGDVQGKINHISVSEPIERFEDYDIDMLCDVTNIPLRMNIRKMLTQVIETVSFVNTGGMGMIKINYVSSDLYAHLITFAKKTGEVLSVFAGNDKMIEFSDGADVVVYDKEKKTYTLNGDVV

SEQ ID NO: 5708 - protein, 542 aa, synthetic construct
MQQLKTKRVGIYVRVSTEMQSTEGYSIDGQINQIKEYCDFHHFEVKDIYADRGISGKSMNRPDLQRMLKDAKEGNIDCVMVYKTNRLARNTSDLHKIVEDLHKQNVEFFSLSERMEVNTSSGKLMLQILASFSEFERNNIVENVFMGQTRRAQEGYYQGNLPLGYDKIPNSKHELMINQHEANIVKYIFESYAKGHGYRKIANALNHKGYVTKKGKPFSISSITYILANPFYIGKIQFAKYKDWSEKRRKGLNDKPVIAEGKHSPIINQDLWDKVQMRKKQVSQKPQVHGKGTNLLTGIIRCPQCGAPMAASNTTNTLKDGTKKRIRYYSCSNFRNKGSKVCSANSVRADVIEDYVMKQILEIVKSDKVIQQVVARVNQENQVDGASLHHDIAYKQQQYDEVKIKLNNLIKTIEDNPDLTSVIRPSIQKYEKQLNDITNQINQLKNQQNEDKTLFNAKEISKLLQHIFHDIKHIEKSRLKALYLSVIDRIDIKKDGNHKKHFYVTLKLNNEIIKQLFNNKQLDEVHLSTSSLFLPQTLYLTI

SEQ ID NO: 5709 - protein, 551 aa, synthetic construct
MKLLNRTTLNAKNTDSLRAALYLRVSTGRQAENDLSIPDQRRQAQEFCKARGWQVVIEFVDAGLSGTDDRRPELQRLLDLAAGGDSPFDVVVVHSFSRFARDHFALEYHVRRLRKNGVKLVSITQNLGDDPMSVMVRQVFALFDEYQSKENAKHVLRAMQENARQGFWNGAAAPYGYAIVAAEQRGAKTKKRLAIDAVEAEVVRLMFRLVDEGNGTSGPLGVKALACYLNERGYRTRRGARWGIGPLHALLTSPTYKGEYRFNRKVWKTKEDKPEADQIMVAVAPIIDPSLFDAVQARLKSRNPKQTPPRVVTGPILLTGLATCASCGGGMTLRTGKSGRYRYYTCATCAQQGKSACPGRSIPMDKLDQIVTDQLNASLFTPERVRAILGGLMARQASRSEDHSQRLSALQNKVADCESRLSRLYEAIENGIADASDPTLKDRLAALKAERDQAKAAKDRAFAELQPETRITEEKISAFAALMRENVANGAIPFRRAYLRSVIDQVEVDDTEIRIHGRRDVLERLVMGGGATPAGVPSFVRKWRTRQDSNL

SEQ ID NO: 5710 - protein, 527 aa, synthetic construct
MKKVITIQATPSIIRSSSDDFSLKKRRVAGYARVSTDHDDQATSYESQMRYYSEYISGRDDWEFVKMYSDEGISGTNTKLRTGFKAMVEDALNGKIDLIITKSVSRFARNTVDSLTTVRQLKEVGVEIYFEKENIWTLDSKGELLITIMSSLAQEESRSISENVTWGLRKQFAEGKVHFPYTNVLGFKAGEDGAIVVDQDEAKTVRYIFQQALIGKSPYHIAKDLTEQGIPSPSGKSHWNATTIKRMLRNEKYKGDALLQKTYTIDFLTKKKNINRGELPQYYVENNHEAIVDRETFDAVQKVLDTKGKKSSTTIFSSKLICGDCGHFFGSKVWHSTSKYRRVIYQCNDKYKGEKKCETPHVTEEELKQGFVLAINQVLDNKAEVIDNIKALFSIDSLVSIDDEIRELENEADILSQMISTLVVENASVIQDQDEYQSKYQKLSSKYETTVKNIELLEVEKLAISKRNKDLQNFISVLEKQDGLVKYFDEFLWDTFVENVTITNDKQFRYFFKNGAVATLKVTIVNV

SEQ ID NO: 5711 - protein, 507 aa, synthetic construct
MKRVISYIRFSSERQAKGDSLRRQSKMVNDWLKAHPEYYLDQDLSFRDLGVSGFTGKHLKGGLGDFLTAIEKGLVKAGDTLLIESLDRLSRQDVDQASELLRNILRSGVDVVTLSDGEHYTKESLRDPLSLIKSILIMQRAHEESLRKAERIQAAWDAKKEAAKAGIKISRRCPAWLKLNDDRKSFSVIPEKVETVKRCFQLRLEGKSIWEIVRTLNAEGHQTLNQYKAGKFGQTSVQDLLKNRSVIGYFTPKGCEEISGYYPAIIDETTFYKVQQLSYARYGRKPASDKPMAVNLFKGVIRCSECGHALIITGFSDTRNGIYRCPLRNENRCSAKGLSRKQTDGTLLALLSRLDRFDSDTTNTVDTLKLHREHISSNIEKLVQLSLEIEDLSAITIKLKQLKGELSQVDADIEKETQRLKSIDVGCLSDCDLTTKAGRIEAQLIIKSAVKEVVLNTAKRRCKVTFHNGKAITLPITENPSEDVTEAIQSLSEVTERGLIDVDEVII

SEQ ID NO: 5712 - protein, 449 aa, synthetic construct
MKQAIGYLRQSTTKQQSLAAQKQTIEALAKKHNIPHITFYSDKQSGRTDKRNGYQQITELIQQGQCDVLCCYRLNRLHRNLKNALKLMKLCQKYHVHILSVHDGYFDMDKAFDRLKLNIFISLAELESDNIGEQVKNGIKEKAKQGKMITTHAPFGYQYHNGTFTINTVKAPTIKAVFSYYLQGYGYKKIAQYLEADEKFINRKPYQVRNIIMNPNYCGRVINQYGQYDNMCPSIVSTSIYEQAQALRSQKQIKRTPSDNQLKQKIKCPYCGSTLTNMTIRKKNHTLRYYVCPQNLNASRFVCEFKGINAQELEISVLTTCQDFFQNQQLYSKINHTIQQRLKRQRDIETKATINQEQLIEKLAQGKIDAEAFRKQTQSSRQHSKPILSINAYQIQKAFQNIIQQRFTLNMLNPYIDVISITKNKTLAGIYFKNEPLNIVNQTTQSSIA

SEQ ID NO: 5713 - protein, 541 aa, synthetic construct
MNEMKKKRIGAYIRVSTERQVEGYSIDGQITQIEQFCQFNGYDLVDIYADRGISGKSMNRPALQRMLQDAKNGKLDCVIVYKINRLARNTSDLLTIVEELHRQNVEFFSLSERMEVKNSTGKLLLNILASFSEFERNTILENIYTGQHQRALEGYYQGNIPLGYSNIPDNKKELMINQHEANIVNYIFESYAKGHGYRKIANALNHKGYVTKKGNPFSISAVTYILSNPFYIGKIQFAKYKDWNDKRRKGLNDKPVIAEGKHSPIIGKDLWDKVQARKKQVSKKPQVHGKGTNLLTGIIFCEKCGAAYAASNTTNTLKDGTKKRIRYYSCSNFRNKGSKVCSANSVRADVIEKYVMDQILEIVKSDKVLKQVVERVNQENQIDVASLNHDVAYKQQQFDEINTKLKNLIQTIEDNPDLTSALKPTIHQYETQLNDITNQINQLKHQQNQEKPSYDTKQIAALLQQIFQNVESMDKAQLKALYLTVIDRIDIRKDGNHKKQFYVTLKLNNEIIKQLFNDTPLDEVLLSTSSLFLPQTLFLQI

SEQ ID NO: 5714 - protein, 542 aa, synthetic construct
MQQLKQKRVGIYVRVSTEMQSTEGYSIDGQINQIKEYCNFHHFEVKDIYADRGISGKSMNRPELQRMLKDANEGHIDCVMVYKTNRLARNTSDLLKIVEDLHKQNVEFFSLSERMEVNTSSGKLMLQILASFSEFERNNIVENVFMGQTRRAQEGYYQGNLPLGYDKIPDNKHELMINQHEANIVKYIFESYAKGHGYRKIANALNHKGYVTKKGNPFSINSITYILVNPFYIGKIQFAKYKDWNEKRRKGLNDTPVVADGKHSPIISQELWDKVHSRMKQVSQKPQVHGKGTNLLTGIIHCPQCGAPMAASNTTNTLKDGTKKRIRYYSCSNFRNKGSKVCSANSVRAEVIEKYVMDQILEIVKSDKVLKQVVERVNQDNQVDVAGLNHDIAYKQQQFDEINTKLKNLIQTIEDNPDLTSALKATIHQYETQLNDITNQMNQLKHQQNQEKTSYDTKQIAALLRRIFQNIESMDKSQLKALYLTVIDRIDIRKDENHKKQFYVTLKLNNEIIKQLFNNNNLDEVLLSTSSLFLPKTLYFQI

SEQ ID NO: 5715 - protein, 449 aa, synthetic construct
MKQAIGYLRQSTLKQQSLAAQKQTIKALAKKHNIPHITFYSDKQSGRTDKRNGYQQITELIQQGQCDVLCCYRLNRLHRNLKNALKLMKLCQKYHVHILSVHDGYFDMDKAFDRLKLNIFISLAELESDNIGEQVKNGIKEKAKQGKMITTHAPFGYHYHNGTFMIDTVKAPTIKAVFNYYLQGYGYKKIAQYLEADDKFINRKPYQVRNIILNPNYCGRVINQYGQYENMFPAIVSTTIYEEAQVTRTQKQVKRKPSENQLKQKIKCPCCGSTLTNMTIRKTNHSLRYYVCPKNMNASRFACDFKGINAENIEKQVLESCQKFFRDQQLYSKIKHAIEKQLKKQKMHNTNNTLTHEKLIEKLAQGTIDVETFREQSQSINLQNKPIQAISDIRIKASLQKVIQKSFTLNMLHPYIDEIHITKNKELSGIYLKDEPLNIVNQAVQSSTA

SEQ ID NO: 5716 - protein, 465 aa, synthetic construct
MKTALYLRVSTQEQATTGYSIKGQEEKLRAYAKAKGFGNIKVFTDAGYSGSNTKRPALELLIKEVEQGKISNILIYKLDRLSRSQKDTLYLIEEKFLKNDVPLISLSESFDTSTPFGRAMVGMLSVFAQLERENIKERMIMGREQRLKKGLWHGAGGGSGRVAGYDYKDGKLVINEYEALFVKRMFQLYVEGEGYFNIYKKLSKEMPGVIKEPSNISKLLKNPVYIGMIDYNGEIYKGIHEPIIDEHTFNAVQKLRQTRTVNRDMSIIRYLLPKLLKCGYCGENMIGKTGSKKKDGTYYTYYCCYSKEIKRRKKHVDSNFSLECESVYHTAQLVEDKVINEVMNLDSTKIIHDYETKNDDHIIYEKQIKDIDTKIEKLMNLYIDSNIDKKTLDVKHKELEDEKRLIEKTMRDSKVDVNKEVVLKHLSNFKDIDWVDDREALKNTLHILIKDIRIYNDSMKVNFNI

SEQ ID NO: 5717 - protein, 434 aa, synthetic construct
MAAYCRVSTDQDEQLSSYENQVSYYRDYILKHEDYELVDIYADEGISATNTKKREAFNRLIQDCRAGKVDRILVKSISRFARNTLDCIKYVRELKELGIGVTFEKENIDSLDSKGEVLLTILSSLAQDESRSISENATWGIRKKFERGEVRVNTTKFMGYDKDENSRLVINPEQANVVKHIYNQFLDGFGPESIAKEFNAKGIKGWSGKANWYPSAILKMLQNEKYKGDALLQKTYTVDFLTKKRTENTGQVNQYYVANNHEAIISKELWETVQLEIARRKAFREEHKLVFYIMQSDDNPFTTKVFCAECGSAFGRKNWTTSRGKRKVWQCNNRYKVKGQIGCQNNHIDEEMLEKAFLKAVELLQEHRADVVVKWQKLEKGTNLLHKHYAKQMYQLLELDVFDGTIMNQVLDHIIISENGQISVKFLEGTEIDL

SEQ ID NO: 5718 - protein, 449 aa, synthetic construct
MKQAIGYLRQSTIKQQSLTAQKQTIEALAKKHNIQYITFYSDKQSGRTDKRNGYQQITELIQQRQCDVLCCYRLNRLHRNLKNALKLMKLCQTYHVHILSVHDGYFDMDKAFDRLKLNIFISLAELESDNIGEQVKNGIKEKAKQGKMITTHAPFGYHYHNGTFTIDTVKAPTIKAVFNYYLQGYGYKKIAQYLEADDKFINRKPYQVRNIILNPNYCGRVINQYGQYENMFPAIVSTTIYEEAQVTRTQKQVKRKPSENQLKQKIKCPYCHSTLTNMTVRKPDYSLRYYVCPQNMNNARFVCEFKGINAQELETSVLATCQDFFQNQQLYSKINHTIQQRLKRQRDVETKTALNHEQLIEKLAQGKIDAETFREQTRSLHQQSKPLSSISAYQIRKAFQNIIQQRFTLNMLNPYIDVISITKNKTLAGIYFKNEPLNIVNQTTQSSIA

SEQ ID NO: 5719 - protein, 569 aa, synthetic construct
MRVSSEQQLSGDGLDRQESMLTRYFDDNASCYDFDPNYELIVDRGVSAFKGHHQRESAGLGGFFKKVRNGEVEKGSVLCVESLDRFSRENPFKCVEYISILDSYQIELHDVDKKLKIGRKYPNSLSFAVMIAERSYEESRLKSVRIQKGWDKRRKMAKEEGQYMIKNCPKWIDVVNDRYVLNENHIVIREIFDLYLSGIGSYTIAVMLNRDNKTIDGMKWNSTKICHVLRNRRCKGEYTSNRVIRNFDDDTVTSTFEILNIYPRIVSDDEFHEVSTRLEKFNYTGRIRHDLKRTVFNSLLKCELCGSALGVSSTSGYTYIKCDNARANGGCTGVLMAYMPFEKAILSHIKDIDISRVINIDSTISNIDILKAEVVELESYIQSFTAGIENLKQQGRLPTFDMLDGKAQAEDRLQDVKKTLAAERDTANVSNLEFSSDIHKLENIIERSRLEVELRKVIKRIAVKANKTYITADISYYNDDNIKHILLIHKKKAIIEAMGEISQQGRWRIYSFLESGVQVFRVESNGDVWTLAAARNKSINEIQKYMTMMVGREPIDFDYYINEDMIEWI

SEQ ID NO: 5720 - protein, 527 aa, synthetic construct
MSKKKSKEKVVEYSKLEHKVAAVWTRVSTGKQADNNGSLESQKRICDEYAASKGIRIKEYFGDTNESAQTEGKLYRNMIEKVAKDKEINVILVASYDRFSRTGPEGIMTKAYLKAKGIFVVSATQATDPDSAAGTFMENIIFLFNQFENSLRRDKAVIGMTDCLRKGNWFSKPPLGYNKVKVEKDHILTVNETGRILRNAFIWKATEGIGDIEIVQRLKELGLSIDRKHLNKILHNPFYCGYIQHSLLGDEIIKGNQEILIDEATFNKVNGISNTGYEHKKITEPFPLKRHIICSDCGGYLTGYTVKARGKDYYKCNKKGCKSNHSTEKLHQKYINLLNEYNIPDEYIPILTDVLRKVFEEYNQNKGETKKVLLKRKTECENQINAVKVRLGLGEINNEIYTATMGELNSRLAEVKRGLEDAGKNLSNMMKYINQTIEMSCKLGSLWNDSNFVDRQKVQNLVFPSGIYFDKEKDDYRTENENEVFKIFRRFTETYKDEKEKATTDFARLSPSVGMRRLERPTPTSRT

SEQ ID NO: 5721 - protein, 543 aa, synthetic construct
MLMKKNFSSKIADLYIRVSTDEQADKGYSQRDQAERLQAYCAKYDIAVDNVFFEDHSAKNFDRPEWSKYLKNLKKRNKRDREPRLVLFTKWDRFSRNVGEAYHMISVLEGLEVETQAIEQPLDLKIPENKIVLAIYLSTPEVENDRRALNVFYGMRRARKEGRIMGIPPYGYINRCTEDGAKYIGVRHPEADNIVWAFEEIAKGELPSEHIRLLMNKREGKDLTRNAFMVAVRNPVYTGKVFIPEFENEEAHFVKGKHLPLITEELFEKVQIVLDGKGRKSKSEHGENRVLQNENFPLRGVLICPRCGKTLTASTSQGNTKRYNYYHCNSKCGFRHNSDIVNNKFVETLREFEILPEYRDTLKIVVLKNYKKHCGNVDDERKAVVEEMENVNQKLSKARNLFLSDRLDEDDYNEVKVECKKRSDELDESLKSLTKASKDQDVPGKLSLAIESIANIAQRYNDSCVEDKRKIASSLYYHKLEFDGKNFRTPKSNAFLNLIRLSKRGLGDKKNRHQSCKNSDDDEVIPLGFEPRTHTLKVYCSTS

SEQ ID NO: 5722 - protein, 569 aa, synthetic construct
MRQSNNRKSRDVTAFLYERLSRDDNLEGESYSIGNQKKLLTKVAKEKGYTNLVHFLDDGISGVTMDRPGFNDMMEQLAAGKAAAVFVKDLSRLGRNYIEVGRLTEEFFPEHDIRLVAVSDNIDTAEGENELAPIRNLFNEWYARDISKKRRISNKIKGNAGEPMGQPPYGYIKDPDNPKRWIVDEEAAQVVRRIYSMTLEGYGTEQIAASLEQDGILTPRAYWLKKGIKRPGKGKEQPPTKWNSSSVTKILSLQEYCGDILNFKTYSKSYKNKKRLENDRENWVIFKDVHEPIIERAIFEQVQQKRGKIRKRRTHEGERNMFSGLLVCADCGHNLHFHFNQGNPDIKYFNCSNYKGNRGSCTSTHYVRVDFLEQVVLGEIRRLTKFASQFEDEFVKAVIGHSQQAEATDRKLKEKELKALQARDEELDGLFERIYEDNVSGKLSDDRFARMSRRYEEEQKELAEKIKALRAEIDKQSSQSMTTDMFISLVRKYTRARKLTPRMLNELIEKIEVFNAEKIDGVWEQRLRIHYNCVGAIEIPELIPLPAPEVSVNTRKGVVVNYAPSTIAG

SEQ ID NO: 5723 - protein, 543 aa, synthetic construct
MSQKIAYQRLEDILKKGSRIALYARYSTDKQDENAQIHSVRNFLSDYGCELLDDNIYIDPKTSAVKISMDQRKDLQRLIKDAKENKFDCIVSYKNDRIARNTKEHNEFRTEMQRLGMPVVLSSTREIYTTGEIVPLTIKDALTQIEPVLIAERTRDTFSSKIENGEWTGGQAPYGYSYDKKTECFEPVDKKVEVVQEIFRLFKLGYGLQQIANKLTVDQRDIEQKWYKDKIKYIITNPFYAGYMTMNRYVKGMLQLKMETWTWSEKQENIPAIMSRDEWEYCFYLYVERRKSQTVRKSSTSFWLRDILHCNECQQPLKTKNQKTKSKRKNGEEVEYGKVLYECRNCGLKLETEKIHDKFKEDMGKVLKKLLEKHRENLIQQTYLQIEKEHEEIVNVQKELVNKRIKHIESIDVLDKKINQLYKDITTGKADKTNNAEDASSKEEKLVDWNEKLIEILLTGRSKKYSDLEEVKQQQQLLEDKQERLNIAMNALENQYQDELLNFSFDPENVQSMRNFLLQFVKAVYVSKDMRLDYKVYENLISE

SEQ ID NO: 5724 - protein, 489 aa, synthetic construct
MLKTIIYARYSSDKQNEQSIEGQIHECEQFAKTHDMVIIKHYIDRALSGKTDDRPSFLQMIKDSSSGLFDAVLVYKTDRFARNRYDSAVYKAKLKKNGIKIFYAKENIPDGPEGIILESMLEGFAEYYSAELSQKVKRGIKENIRKGLSFGGACPFGYKIVNKKYVIDDEQAPYVKKIFEDYAKGRRAIDIFNELNTLPNYAGKGRKWNRSSLNRMLTNKKYIGIYELEDVCVKDAIPPIIDEALFNKVQSRILFNRRHTTRAKVNYLLSGKLFCGLCEHSMTGKTGTSKTKVKYHYYVCSNRHCKQKKYRKELLEDIIIQYTVKDILNPKHFKMIAKKCLEIQQADNKINDILSMLKKQLTATKTKINNLMNAIEAGIITTSTKDRLEQLEQEKYKLEIEISTQQLNSNMLLSEEQIIYMLNEFYKKRADVSFYNQIIDCFIYKIYIYFDKICIVYNLNNSNKDVTYSDINELYKSSHLNSCGSPYDL

SEQ ID NO: 5725 - protein, 517 aa, synthetic construct
MASVTKLTKPQSKVQATLQVAAYCRVSTNSDEQEDSLVNQQDHFKSYIQQQPNWQLHQIYYDNGISGTKAQNRPGLQALLKDCQNGQVDLVLTKSISRFSRNTTDCLRIIRQLKQLDIPVIFEKENINTGSMDSELILSVLGSLAQDESQSIAHNVRLGYQQRASNGVFHYSLPPYGYQKDANRDLIIDPIERKVVLRIFNWTIEGKSPDQIAQTLNEQAISTKRNGKWHDSTIRGILQNTVYLGTTEFQKTFTDDEYHRHPNQGEQGKIIIEEHHPAIIDQATFTQVQKIIMLKRKFYPQAKAKPQRHTFSRKIYCGNCQKLFKRQSRSGKVCWGCQTHIKSAKDCPVKSIREDALHLAFCTMVNKLIFSQKFLLEPLVEQLQADQNQEQAAKLSQVETELKEAKDKQDNLQQLRKQELIEKDFFTKQDAELEQEIANLQSEIERLKQLLGGQNSKLPLTHELLKLCQRSNYLTAFNAELFEQIIESITVDQDHNLTFHLKCGLNLTEGSKHHVKP

SEQ ID NO: 5726 - protein, 786 aa, synthetic construct
MKKQPDKGKITALYERLSHDDERAGESVSIENQKRILEDYAQKNGFTNIRHFTDDGVRGTTFKRPGLDAMLEEIRAGNVATVIIKDQSRIGRDVVEVGLLKRTFDEYHVRFIAANDNLDTANGFDIMSIFRDVINEWYVADTSRKIKTVFKSRMEKGLRCSGSVSYGYLASKENKGEWVIDEEAAAVVRRIFHSVVAGESIASIARELRAEKIPIPSEHWKRVGAPVRAAKYTDPYAWSTTTISYILKRPEYTGRKVLGKTVCENYKTKSTRKTAPEEQYIFDGEIPAIVDEETWNTVQRLMGTKRRVPKRQTTPNRLTGLLYCADCGAKLTHRSSLVQGKYLDDAFVCSSYRQLTRDCTMHYIPTAKMEAAILAAIQRVSWYVRHNEAEFIERVREASDQHQENAVKEYRQKVSKAQRRCKELDGLVKKLYEGNATGKIPDKHFTRLLAEYDEEQTKLEAAIAQWQEAIESWNADRLKTDKFIELVSRYTDFSELTTPMLNEFIEKVVVHEGEGRGNSRRQRIDIYLNFIGAFEVPAHIVTPMEAEEQRRQQEEQAAKEARSQELAKAREEKRKAEKREFTARKKAGLLTPEEQAADEARLAHNRAWQKEWREKRKAAEPPKPPKPKSLKELAALQKAGADLTPEEAERLAAYREKKNRQHKAWYERQKAAQPPKPRTLKELAAAQDAGQPLTPEEAERLEASRSRKKNAYQELKAQAETDPAAAAELARRRAYHSEATKKSRQKMYEEAAAGNPEAQARYENFLAAKRENYHKKKQDEKGEQIA

SEQ ID NO: 5727 - protein, 626 aa, synthetic construct
MRNEKITPLYERLSRDDELQGESNSISNQKKMLEDFARRNGLPNPTHFTDDGVSGTRFDRPGFLAMMEEVEAGRVEAIVIKDMSRLGRDYLKVGQVMEILRQRGVRLIAINDGVDSLKGDDDFTPFRNIMNEFYARDTSRKIRSVFKSKGMSGKHLTGTVIYGYLWDEKREHWLVDEEAAEVVRHIFALAMEGYGPYQIATKLSEEKIEMPAVHLARYGEGVNKNKTFADIYRWSASTVVEILKKREYLGHTVNFKTRKHFKDKKSHYVDESEWTIFENTHEAIIDQETFDNVQRIRGNARRYPDGFGEAHPLTGLMYCADCGGKMYVHRTYNGKRVPQYTCGQYGKYPIGSLCPTQHRIKAEAVLTLIADMLRAIAEYSRNDRAEFIRTVQETQAAQQTADISKKRKRLAAAQKRAGELERLICKIYEDNALGKLPDARYEALDAQYAKEQDALNAEITELEKAVTGYEQSRKSAEKFIALIDKYENFDTLTNTMLNEFVEKILVHERARKGSQDTTQEVEIYFNFVGRYIPPALQPVPLTPEEQEELRKKEERKDRLHQNYLRRKANGKQKEWEERYNAKRKAKMEAAKAAIRAEDMAKGIFIPVSQLPRQEPRKAVLSASAAV

SEQ ID NO: 5728 - protein, 608 aa, synthetic construct
MRDFEKITALYERLSRDDELQGESNSIVNQKKILEEYASKNNLSNIIHFTDDGISGTQFDRPGFMAMMNGVNQGNIGCIIVKDMSRLGRDYLKVGQCMEILRQKGVRLIAINDNVDSFYREDDFTPFRNIMNEWYARDTSRKIQSTFKSKGESGKHTASSPPYGYIKDEKDKDKWIVDEKAAEIVRRIFNLTMQGNGPYRIAKILESEKVDIPAYHQQKLGYGLYQSKNFEYPYRWCSSTIASILKKQEYLGHTVNFKTRKHFKDKKSKYVSEDNWLIFENTHEPIIDQETFDNVQRIRGNVKRYPDGWGEYHPLTGLMYCADCGSKMYVHRTSNYKNIPYYVCSNYKKVPCGTLCSSAHRIKAEAVLTLIQETLKDIKKYLDEDNEVFIRSIQNEMEEKEKIEIEKKLTRLIDSKGRLQELERLMCRIYEDMILNKIPNSRYEILNNQYEMEQITLSKEIKDLELAISRYEKETDRARKFISLINRYENFEELTTTTINEFVEKIIVHERDRKGSQTSKQKIEIYFNFIGNYELPQMKLSEEEKQKLEEEERKINERKDKLHQNYLKRKASGKQKEYEDKYKARREQRKQEKLKALKRVGIPARDFQ

SEQ ID NO: 5729 - protein, 503 aa, synthetic construct
MIEAFSYVRFSTKSQATGTSLERQLNASRLFCTQQGLRLSNQSYHDLGISGFKNVRRPELEQMFEAIQTGVIPAGSFILIEAIDRLSRKGISHTQDILKKILQHDIKVAFVGEDAKTLQGQVLNKDSLNDLSSVIMVALAADLAHKESLRKSKLVRESKAIARERVQNGVILPGKSMFWLDYDKEQRHYVLNDRATIAKEIIELRLLGHGPRKIAKILNERQIPGPTGKEWYQPSIKRIITSPVLYGAYQSHQVIEGQYIPVALVENYYPALIDYNLFSQIQFDNKNASKGRPSRVNPFGGVFYCECGNAICFKKSYSKTAKKVKNEYHYHYCIAAREGRCKNTKAIPNFTPILINLLDKLEIKSTSTKNIRSESIISKRNKIEQLNEMLLKLDSPPVSVLKTISNLEKELQTLLERPEIIPPKQEDIVVLSTIQDPSKYNMYLKRLVKRITVYQIDGPKNLRIKVDKTDGHYQNFLIKDGETIFKSDTERLKKLLAGFKDGF

SEQ ID NO: 5730 - protein, 506 aa, synthetic construct
MRSVITYLRFSSATQGAEGADSTRRQNELFKQWLRKNSDAQVVASFNDEGLSGYKGKHLSGQFGDMLSRIESGEFPEGTILLVEAIDRIGRLEHLETEALMNRIIAHGIEIHTLQDGLIYTRDALSDDLGISIIQRVKSYLAHQESKQKSFRVSEKWKQRAKLALAGKQRLTKMVPGWIDHDTFKINEHAETVRLIFKLLLDGESLHNIARHLQSNGIKSFSRRKDANGFSVHSVRTVLRSESVIGTLPASQRNDRPAIPNYYEAAIDAATFNKAQEILDKNRKGRTPASDNPLTINIFKGLFRCQCGASVHPTGTKNKYAGVYRCNNHLDGRCDVPPLKRKPFDKWMIDNFLGMIDVGNDGESERKIAALQHEVEIVTARIKKATALLLEMDDIDELKIQLKELNQKRTELQTTIDNMRRKASLTDKELPQLKDIDLTTKAGRVECQLILSKHLKGLTLGKDSVTVTLQNDTEITIPTNPLPLNDGSPIFEIADKELLDIDAYQL

SEQ ID NO: 5731 - protein, 640 aa, synthetic construct
MRRKKDRSNGITALYERLSRDDDNAGESNSIVHQKQMLEDYAMKHGFTNLVHFTDDGWSGATFDRPSWNRLVEGVKNGEITACICKDMSRIGRDHLQVGFFTDILFREKEVRFIAINNGIDSDRQETSEFAPFLNIMNEWFVRDTSKKIKAVLKSRGSSGNAHTSNIPPYGYLKDPENPDHWIIDEEAAEVVRRIYRMTIEGKGPYQIARELSEEKIERPSYYLGKKGLGNHASNYDKENPYMWRGNQVTTLIARPEYIGKTVNFRTFKNSYKDKKTKRADKEDWVVFDDTQEPIVDEETWLLAQKLRQNVRKADPMGEPNVLTGKIYCADCGAPMYNHRQRKGRERIYYTAKGEKRTSYSNPADCYECSTYNLAYQKYDRHCTCHHISTKALKSIILKTIQETCHYVSLNEREFVYSLQEESAMKDIAVSETVKNRIERNQKRVHELDMLIRKIYEDNVIGRLPDRLFQSMLTDYENEQNELNKIIETDTADMQRIIGGQNNVERFLKLVKKYENITELTPAMINEFIDKILVHEPQGKGADRTTEVEIYLNYVGQFQVPVEQHEPTEEERIAAEKEAERLRRKRESNRKYMKKIREKSKEFAEHERIAEEKSSDSNVCVEQNATSKSNRQKVKGEKIA

SEQ ID NO: 5732 - protein, 565 aa, synthetic construct
MPEKEKIVALYVRVSTGYQVDKDSLPFQKKELKNYCEHVLHIDKKRIEIFEDAGKSGKNTKRPAFERMMEKVKSGQVSHVIVYKIDRISRNLVDFSLMYDDFKYNNVTFISLNEQFDTSSAIGEAILKIILVFAELERKLTSERVTDVMIGRAQNGQWNGARVPYGWDWDEEKQMPVHSKKEAQYGIDMYHRYLNGYSTLRIARYNNEHSIPTKRGGEWSSKTVGDFLRNPINKGDYRYNYRNSARGKKKAKEEVVYIKNVFPPLIDPTIFDEVNRRLDENYKKQNTNYMFPIRKQCNIFSGLIICGKCGAHYQVCRKDERRLDGFRPSNYVCTRKRQKAICDSLNVSEVKIGPFMINYIAAMVDISQKRKKLKDKKELEQLILSHMQFTDLAGIADDSLQETMDLLYGRSTNIWSSSPIEKESQDNENKKNKLKENLQKTDRALERLKKAYLFDDDAMDEKEFLEMKSKLEIDRVKIENEIKDIDNDAIANNVNQIDFIKTASQFLIIHKINSGEFIDYRSLAILDEESMKAFMNSVIDHIVVLNRQISEIVFKNGLSHKLLYR

SEQ ID NO: 5733 - protein, 509 aa, synthetic construct
MKRAISYIRFSSERQLKGDSLRRQARLVNDWLSKNPEYYLDQDLSFRDLGKSAFSGKHLKGGLGDFLTAIEKGLVKAGDTLLIESLDRLSRQDVDRASELLRNILRSGVDVVTLSDNEHYTKESLKDPLSLIKSILIMQRAHEESLRKSERVSAAWNRKKELISEGIKVSKRCPAWLELNDDRRTFTIIPEKVEVVKRAFDLRLQGLSFWAITRALNDEGHLSLNQYNPKPQGWSDTAVKNLLRNRAVIGCFKPAGREEVRDYYPAIISESLFYRVQQLNTGQYGRASVSSNPLSVNLFRGIIKCSKCGATVVIGGYDSKRFGMYRCPNRSANRCSAKAISRKQTDATILYMLALCDRFEAENTDTIDSLKLQREDLQRKISKMAELAVELDDMTVITDKLREMKNALSKLDHDIEEETKRLKSITTGNLKDIDRTTKEGMVETQLLIKGVLKEIVLDTSKRRCRVTFHNGKVIDLSITENPAQDITEAEKSLTEIAEKGLLDVDAFQL

SEQ ID NO: 5734 - protein, 430 aa, synthetic construct
MSTDQEEQLSSYENQVNYYREYISKHEDYELVDIYADEGISATNTKKRDAFNRLIQDCRAGKVDRILVKSISRFARNTLDCIKYVRELKELGVGVTFEKENIDSLDSKGEVLLTILSSLAQDESRSISENATWGIRKKFERGEVRVNTTKFMGYDKDMNGRLVINPQQAETVKFIYEKFLDGYSPESIAKYLNDNEISGWTGKANWYPSAIQKMLQNEKYKGDALLQKTFTVDFLTKKRVQNDGQVDQYYVENSHEAIIDKDIWELVQLELARRKAYREEHQLKSYIMQNDDNPFTTKVFCKECGSAFGRKNWTTSRGKRKVWQCNNRYRVKGQIGCQNNHIDEETLEKAVVMAVELLSENVDLLHGKWNKIIEENRPLEKHYSTKLADIINKPSWEFDSYEMCQALDSITIVEDGQITVRFLEGTEVDL

SEQ ID NO: 5735 - protein, 557 aa, synthetic construct
MKRKKAYIYTRVSTTMQVEGFSLDAQEAKIQQYANAFDIEIVKTYQDAGKSGKTMLGRTEFMNMISDIEAEKDKVDYVLVFKLSRFGRNAADTLKSLAIMESHGVNLICVDDGLDSSKDSGKLVITILSAVAEMERENIISQAMEGRRQKARAGQWNGGFAPVGYSLVNGQLQVNHEEAESVKMIFDLFANSDMGTIAIAKHLANLDIKKPIRHNSTLPYFSSSGIARILDNPVYNGKIAFGRRESTRDKISGETKVTQSENYILTDGIHEAIIDDETWKKVRKKREANAHKYKRENPNKGDSIYILSGLIKCPLCHAGLYGNKSIKRNKNKKDEYYKNYYYYACKHRKHVDGHKCTFNKQLKTGNLDHEVLSIISKLVSRPDFARKLQEKINIQVDTSRIDSEIEQYKSLFRQLNATKLNLIQQIDSLNFEDPHFQQKSIDLDMRLNTIYDKLADVEMLIETSESKREVILKDKMTADNIYKILVNFASFMDVMEDIDKKRLCQMLIEKVEIYDDKNKAGRWVKSIHFKLPIIEEDLEISLDNNTSVEAVVKLSKK

SEQ ID NO: 5736 - protein, 515 aa, synthetic construct
MATKRLDKDASIAVYLRKSREDANQEDTLSKHRQQLKEYVSSNGFNNVTWYEEIGSGDSIEGRPVFKSLLPMIEQGKFDAVLVVAQDRLSRGSQIEAGIIQEAFEESGTILLTPSRSYNWEDEGDIMLSEFESVISRNEYRAIKRRLKQGKINAAKEGRLHSGNPPFPYYWDKNTKTAEVDEEQAKIYRLMVEWYVKDGLSGVEVAEKLNEMQIPTPRKRGNWGKWRSEVVTRILLNDFHLGFVCYGRYKLNKNGNVERNPDPDSAIVVRGNHTPLKTEEEHAAIMKHIASLRTHNRQDRKTRKDSFRLSGLVRCPYCGKCQSVYKQKGKKEHLAKCYKKSQTRTAACDTTKGIYEEEVFQAVLRYMREYKEELFSPSEINEQQTESSLQSLIEIQEKIVEKSERRIEKVKEMFKNDLIEIQELKNDISTEEAAIKKAENQISELKKSSSYLDKAEEEKRRQQWSSADVERLLSGDEMQPSEINAILRRLIESISFTIEQTEAGTLDLNVTVTPK

SEQ ID NO: 5737 - protein, 488 aa, synthetic construct
MLKFIAENPVNFVIVHKVDRLARSRADDVTINLAIQQANARLVSVSENIDETPSGMLLHGIMSSIAEFYSRNLANEVVKGMSQKAKTGGTPGRAPIGYRNRAAVNDEGREVRTVVLDDARAPQISWAFEEFSTGRYTINQLLDELTARGLTTPPTPKRASRPLTASQLYKILNNPYYVGIVTFQNTSYPGRHTPLVDQNTWQKCQGVFASRLTGEKARVHNHYLKSSLFCGLCESRLIIHYSKNPAGVVYPYFVCIGRHQKRTSCTMSAINIHDVERQVENLYKLVALTPESAAMTKSRLKAAVEAGAAEAKRAQQVLLTQQTSLMGRSRKLLDAHLDGTIPGQLYREEQERVNREMTVVSDRLGALRTEFEVLEQNLDDAIALAENCYEAYRRAPDALRRTYNQAFFKRILITRDETVEGVLAEPFASIVTVSETANGASPEGEAPRTNGSYKVICSKENDLVDLRRFELLTSSMRTRRATNCAIGP

SEQ ID NO: 5738 - protein, 560 aa, synthetic construct
MTNAALAPSETGAVQPALRAALYLRVSSPRSAESDLSIPDQRRQTSSYCHSNGWEVAAEFVEPGVSGTDDRRPAFQEMIDAALERPSPFDVIVVHSFSRFFRDQFQFEFYLRKLAKNGVQLVSITQILGDDPMSEMMRKIMTLFDEYQSKENGKHTLRAMNENARQGFWNGARPPIGYRAVAAEQRGAKIKKKLEIDPLHAETVRRIFRLALEGADGRGPIGVMAIACWLNENNIRTRYGGRWGKGMVHQVLTRTTYIGEHRFNTYDVKKGRAKPETEHAIMEVPPIITVAEFEAVQRSLKARSPKMMPPRAVGGSTLLTGICFCACCGGAMTLRTGTSRSGQEYRYYTCATKATKGKTGCPGVSLPMDRLNEAVIEHLEKRLLDPARLEVLMDQLIARRDEWVTERRQHVAEMERRATEVETKLSRLYEAIENGLVDMGDPSLKARIAELTTIRDQARGDAERAVAHIERISPEITVESLHAFALVAKRKLRHDDGSYARNHIRAVAQRVEVHSKTDVRICGTRTELLRTLTAVSGVEAAVLGTRAFGPKWCRLQDSNL

SEQ ID NO: 5739 - protein, 485 aa, synthetic construct
MSKKVAIYTRVSTTNQAEEGYSIDEQIDKLKMYCEAMDWKVSEIYTDAGFSGSKLTRPAMEKMITDIGLKKFDTVIVYKLDRLSRSVRDTLYLVKDVFTKNEIDFISLSESIDTSSAMGSLFLTILSAINEFERENIKERMTMGKIGRAKSGKSMMWAKTAFGYSHNQETGILEINPLEASIVEQIFNEYLKGTSITKLRDKLNEDGHIAKELPWSYRTIRQTLDNPVYCGYIKYKNNTFEGLHKPIISHETYLKVQKELEVRQQQTYEKNNNPRPFQAKYLLSGIARCGYCGAPLRIVLGHRRKDGSRTMKYQCVNRFPRKTKGVTTYNDNKKCDSGAYDMQWIEDIVLKTLNGFQKSDKKLRKILNIKEETKVDTSGFKKQLKSINNKIQKNSDLYLNDFITMDDLKKRTEMLQGEKKLIQAKINEVDKPSTSEIFDLVKSELGEIPISKISYEDKKKIVNNLISKVDVTADNIDIIFKFQLA

SEQ ID NO: 5740 - protein, 525 aa, synthetic construct
MPSAFSYVRFSSGKQAKGSSEQRQRSMLGQWLEQHPSFTLSDLRFEDLGRSGFSGEHLDHGLGQLLAAIDSGAIKSGDVILVEAVDRIGRLEPLEMLPLFSRIVRAGVSVITLEDGHIYSKDSVNETSLFLLVAKVQQAHDYSNRLSRRINASYTARREKARAGLGVKRETPVWLTTDGQLVPHVAPHIAQAFQDYADGLGERRICRKLRESGLEEFSKTNATTVRRWLKNKTAIGYWNDIPDVYPHVVDPALFYRVQQRLDAPKVDRAKPSAHYLTGLVKCAVCGRNYNFKQRKHTDPAMLCTSRARLAGEGCSNSKTYPVIVLDQVRKLTSLPFLQHAMESASSQADPSSQRLAVIDGEIGELSRKISEATKALLVLGFTPEIQESLEQLKTAREALEEERAALLLPQAEKLTAAQLEAFSNGLLDDEPMKLNHVLQTAGYSMVVHPDGSIDVDGKRFVYEGASRKEKVYKLRLVGEDQQWSLPILTPQMATYKSLFMAAVRLPGDPSEEELRRFEEAKHSER

SEQ ID NO: 5741 - protein, 559 aa, synthetic construct
MSTSEQLKGISLERQRNLIADFASKNDFQEVIIYEDVGRSSFAEDENQKELNKFFEELEKDNFDKGDVFALENIDRLTRRGAIDALLKVNKIIQKGLKIAIISDKEQRILEEIDIYSIITFSIDASRANKESEVKSQKGLINWEHKRRLAATEKVAMTKRAPSWIDTEIYHYFDEEKKKEIKRRRYILNEEKAQTVRLIFDLFLNGNGSLKINKILNDRKIKPLNDNVEFWEPSRINKILKNPAVFGLYQPQKQGTGKRDLVDAGEPIEDYFPAVISKEIYEQCRLIAEKNLSERKGRKGENFTNVFTGLLKCEKCGSPVHLLNCGVDKRNKSQHALIYLICKKAKFTKQCSTKRMRYDAFEASIFRAVNEINLIEVLNENNPLNDLVKKQREIETAINKKNKLLENYEKSFLENDGNVPAFMISAAKKAEIEIKELEEQKREIQNEISSLNYYNANVENSIEDIKNNSSYEKRAKINLLFHEIIKSISIDLVEKYSVITFKNDITRIIDKDGFVINVDRVNKLEIVEKDTTTISAEIANNPKMLLEYFEKMRRDLSED

SEQ ID NO: 5742 - protein, 538 aa, synthetic construct
MSTSEQLKGFSLERQRNLIADFARKNGLSLEDSHILEDIGRSSFSDDTEQKELTKFFEDLEKDKFQPGDVFALENIDRLTRRGPIDALMKVNQIISKGLKLAIISDKEQRILEEIDVFSIITLSIDASRANKESQVKSDKGLQNWAFKRELAATHKIAMTAQAPAWIDTETYYIMDETKNKQVKRRRYVLNEDKAKTVRLIFELFQNGNGSLKIKNILNEQNIPTFKGIEYWEPSTISKIIRNPATYGMYQPKKQNTGKRDLVAIGEPIENYFPAVISKEIFDQCQQITATNTTRKGRRGKLFTNLFTGLLKCADCDGPIHLLNPGIDKRAKNPKPVNYLICKKGKFTKECITKRLRYEDFENVMLKAIQEINLADVLHENNPLENLIKQQRNLQADIEKKKKLLENFERNFVENDGDLPSFMIAQAKQAEIDIKSLDSEIKSIRLEISQLNVYNSNIDNAIDELKVNGTYEARSKINLILHEIIKHIVIDFELDDYGVMFKNGAKRFINNGIIQNVFRTENTKQRDDEINEILNHKN

SEQ ID NO: 5743 - protein, 579 aa, synthetic construct
MKVAIYSRKSTFTGKGDSVENQIQMCKDYMQNLRNRSNEKYEFLIYEDEGFSGGNTNRPQFKKLLKDIKEKKFKILICYRLDRISRNVSDFSNILETLQMYDIDFISIKEEFDTSTPMGRAMIYIASVFAQFERETIAERVRDNMIELAKSGRWLGGTPPLGYESKTVKYMDENLNERSLTKLSENQEELNLVKLIFDKYLELKSLSNLEAYMLANYYKTRRGSNFDKTSLKRILTNTVYVKSSDEIFSYLAEQNITVVGTPDNVHGILTYNKLKSNYTRDGNFSRSFRDTKDWIAAVSKHKGIIEPKDWLMVQSIREVNKDKFVVSSRSHNALLTGIIRCKKCGSKLRIVHGVVSKKTGKRPFYYTCSLKKDSKGSRCNNKNGKVELIDKIVVNAIKELGENKLNLINELEKQLKEKSKEFHEINEKENIDHLIEQKKKQVDNLLDKISLDPDLSDLIIPKLKDLKNELKELTDSSLKHKDDLNNLKAEEINLSFIKSLLNKCSLIDSLEHDEIRELIRGLTEEIRWDGETKDLEIDTVGSRDSNKRKKLMEPVDEKILCLSDSGTRCRQSYASCFKQ

SEQ ID NO: 5744 - protein, 506 aa, synthetic construct
MDLSKILTPGMKGVFYGRHSTHKQTMETQRRSAYDLAEKYQCTIVEEILDEGVSSRKKDREGYKRLIAAAYEKKFDFVIIYSHSRIARIPEEHDLIRATMHILDIPIIESETESLYDFGDTIFRAIKDGVAKYELDKIRINTKNAIETLAKNGRWTGGRAPFGYQYTSKKEGGTEKFDIVEAEIELVKKVFELYKNHHGFSSIARQLPENSYRGKAWTKDRVKNIITNPFYAGYIAIRRKHEKKHNALKDRSEWIMEKSPLIPAVLTIEEWEYCWNLYKTKNERKIPPKHFKTSFLLTGLLKCQNCNGDLIGKDQRTTSNQGKVYGKKVYLCKTCNYKIDADDAHQTVLRVFKSYQGIDTEKLISAVQEKVETEISNVKKSIEDLKVSWQTEKRKLQLCDIEIEKAFKKKEEKEPHIKILIITKDRILNKVHQIERWIEEKEAKIKFLEEVQKNENLIKDHLKQFQAPVSSCNEDMRALFLYLFEEIMVNKEGHLQCKLRFNLEDK

SEQ ID NO: 5745 - protein, 485 aa, synthetic construct
MKDTFQERSIALYCRVSTDEQAREGVSLDEQQERLKAYCRAMGWSEEPLLFIDDGYSAKSLDRPELNRLLKEVKKGTISKILVTKLDRLSRRLLDLLKLIDTFQEYNVSFISISESFDTNTPSGRLTLQVLGAVAEFERERIRERVFENMLHAARQGKWLTQSPYGYRLDVNKELVIYEQEAQIVRKVYDWYLNKGLGYYAIAKKLNEEGIPSRQKKEWSIRAIKLMLTNPVYKGTLVWNRIDSSKSKRVKKDDADWVVVEDACPAIIDQATWEQVQKRVNKKQMPARAQTSPHLLGGLLKCGRCGSGMSIGWSGSTKNRYRVYRCSANKNKGTCTSKQYRADDVESWFKHGLLKLADSINSQMIPHLIQKAAENEESTIEQKIRSAKNRYKRKVEAYTAGLIELEDLNEEKKRMEQIIAEAQKAENASSVDVKKLEAMVKEKINNVIDAIDVLPVPEAKSFIKTIVEKVILLDERDIEIVLNIQ

SEQ ID NO: 5746 - protein, 516 aa, synthetic construct
MYRPTNLDVFIYLRKSRKDIEEEKKAAEIGASYDTLQRHRDTLLAVARKENHNIIDIFEEVVSGESIAERPQIQKLLREVETGIADAVLVMDIDRLGRGDMLDQGILDRAFRYSGTKIITPTEVYDPESETWELVFGIKSLIAREELKTITKRMQRGRRTSAAEGKSISKKPPYGYLRDENLKLYPDPETSWVVVKIFEMMRDGYGRKAIATELDRLGVKPPDEKREFWAPTTITSIIKNEVYMGHIVWGKFRYVKQNGKYVRKKMSPERWYVKENAHEPLVSKELWEAANKAHASRRPSTVENKSLANPLAGILKCGICGFTMWYQPRPDRPNDYIRCVTPTCRGLQKGAILQLVEERILQSLAEFVDQFEVQENKMDKNEDKSVIPLKQKALEKKEKELQELNKQKNNLHDFLERGIYTVEVFLERQQNIVQRIKQTQEEIEQLKQEIDKEQLKEKNINEYIPTVKKVLEAYRSTDDIEKKNRLLKSVLEKATYLRKPEWTKKDQFIIELYPRI

SEQ ID NO: 5747 - protein, 559 aa, synthetic construct
MKTKLYSYIRFSSMRQNDGSSYERQIRMAREIAAKYDLELVNDYQDLGVSAFKGANSKTGALSRFLDAIGRSVPVGSWLFIENLDRLSRADIVSAQELFLSIIRRGITIVTGMDNKIYSLDTVTANPMDLMFSILLFIRGNEESQTKRNRTNSSALIKIKSHQENPQNPAVAIEEVGKNMWWTDTTSGYVLLHPVYFPVVQEIVELRKNGRSTAEILDHLNETYTPPPAVSNKKHSKWSRAMVERLFHTRALIGIKEVSVDGVNYELKDYYPRVIDDATFYHLKKNIGARAWNFGDKEEVKPIPLLSGIGLLKCDHCGCAMVKVKGTNKRSDQYRYTCDATRSRRLDCEHPNWSFRGDQLEKAVLQLLADKIWIAEDKANPVPALKVQVDEISRKIDNLIALSAMTGATKELADQITTLNSERETLYNQIKMAEEEMYSVDSQGWEKLAEFDLEDVYNEERLKVRFKIKQALKRIGCSRIDRNKNLFVLEYIDGKTQRVVIENSRGTRKGQIFVDLKTINDRQILESNGLVLHPCLDMLTDKDWKPEEEIPGPLQEFGI

SEQ ID NO: 5748 - protein, 506 aa, synthetic construct
MRHVITYLRYSSAIQGAEGADSTRRQNDLFKQWLKKNSDAQVVASFNDEGLSGYKGKHLSGQFGDMLSRIESGEFSEGTILLVEAIDRIGRLEHLETEALMNRILGNGIEIHTLQDGLIYTKDALADDLGISIIQRVKAYIAHQESKQKSFRVSQKWGQRAKLALAGEQRLTKMVPGWIDPDTFKCNEHAETVRLIFKLLLDGESLHNIARHLQANNISSFSRRKDANGFSVHSVRTILRSETTIGTLPASQRNDRPAIPNYYEAAIDAATFNKAQEILDKNRKGRTPASDNPLTINIFKGLFRCQCGASVHPTGTKNKYAGVYRCNNHLDGRCDVPPLKRKPFDKWMLENFLGMIDVGNDGEAERKIASLQHEVEIVTTRIKKATALLLEMDDITELKTQVKELNQKRTELQTMIDNMRRKASLTDKELPQLKDIDLMTKAGRVECQLILSKHLKGLTLGKDSVTVTLQNDTEITIPTNPLPLNDGTSIFEIADKELLDIDAFRL

SEQ ID NO: 5749 - protein, 507 aa, synthetic construct
MKRAISYIRFSSEKQSRGDSLRRQSKMVNDWLKAHPEYYLDQDLSFRDLGVSGFTGKHLKGGLGDFLTAIEKGLVKAGDTLLIESLDRLSRQAVDRASELLRNILRSGVDVVTLSDGEHYTKESLRDPLSLIKSILIMQRSHEESLRKSERIQAAWDAKKEAAKAGIKVSKRCPAWLKLNDDRKSFSVIPDKVETVKRCFQLRLEGKSIWEIVRTLNAEGHRSMNQYKPGKFGQTSVQDLLKNRSVIGYFTPKGCEEISGYFPPIIPETVFYKVQQLSHSRHGRKPVSDKPLSVNLFKGVIRCSECGHALIITGFSDTRNGIYRCPLRNENRCSAKGLSRKQTDGTLLTLLSRLDRFDSDTTNTIDMLRLHREHISSNIEKLVQLSLEIEDLSAITIKLKQLKGELSQVDADIEKETQRLKSIDTGSLSDCDLTTKAGRIEAQLIIKSAVKEVVLNTAKRRCKVTFHNGRAITLPITENPSEDVTEAIQSLSEVTERGLIDVDEVII

SEQ ID NO: 5750 - protein, 506 aa, synthetic construct
MRTVITYLRFSSATQGAEGADSTRRQNELFKQWLRKNSDAQVVASFSDEGLSGYKGKHLTGQFGDMLARIEAGEFPAGAILLVESIDRIGRLEHLETEALMNRIIAHGIEIHTLQDGLIYTRDALSDDLGISIIQRVKSYLAHQESKQKSFRVSEKWKQRAKLALAGEQHLTRNVPGWIDPDTFKCNEHAETVRLIFKLLLDGESLHNIARHLQSNDIKSFSRRKDANGFSVHSVRTVLRSESVIGTLPASQRNDRPAIPNYYEAAIDASTFNKAQEILDKNRKGRTPASDNPLTINIFKGLFRCQCGASVHPTGTKNKYQGVYRCNSHLDGRCDVPPLKRKPFDRWMIDNFLGMIDVGNDGEAEKEIASLQHEVETVTARIKKATALLLEMDDITELKTQVKELNQKRTELQTTINTMKRKTSLSDKGLPQLKDIDLMTKAGRVECQLILSKHLKGLTLGKDSVTVTLQNDTEITIPTNPLPLNDGTSIFEIAEKNLLNIDAYQL

SEQ ID NO: 5751 - protein, 601 aa, synthetic construct
MKTVAIYSRKSKFTGKGESIENQVQMCTEYIKQRLNKDTEILIYEDEGFSGGTTNRPKFKEMIKDIKSKKIHILICYRLDRISRNVADFSNTLEILQENNCSFISIREQFDTSTPMGRAMIYIASVFAQLERETIAERVRDNMLELAKNGRWTGGKIPLGFTSERVKYTDDTGLQREYSKLKINKEEIKFVEFLYKKYLELGSLHKLEVYITQNELKSRNGIMFEKSSLKLILQNPIYVKANYEVINYLKENNWTIYGEIDNKHSLLSYNKTEQSFKNGKHTKVKKSENERFVAISNIEGFINPDLWLNVQRQFDKNRTRFPRLGKTHNALLVGKLRCGKCKEYMLVQHGRVSKTTGKKLFYYTCSLKRKSHKKLCDNGNAKADYVENLVINSLKLLSKSKKKFINGLKILYKNKLKSNETSIERLSLEKSLNEKKNQIDNLVLALSKSSEIEDILLDKIKSLKNDCVEIENKIKNIETSTKEQKLNNINLSLIESIIDECSMIDQLSRNEQKRIIDILIDTIYWYGSGNGKGKIKIKFIGADENTKEIVLSEEKLQQRMLQFYSPSTCKINDFLLSFRKTKKTKGIGKGKIYRSLCRWKR

SEQ ID NO: 5752 - protein, 502 aa, synthetic construct
MNNKICMYLRKSRADEELEKTLGEGETLSKHRNALLKFAKEKKLNIVEIKEEIVSGESLFFRPKMLELLKEVEAKKYNGVLVMDMQRLGRGDMKDQGIILETFKNSNTKIITPQKTYDLNNDFDEEYTEFEAFMSRKELKMINRRMQGGRVRSVEEGNYIATNPPFGYDIDFIKKSRTLKINEDEAPAINLIFKLYIEGNGASAIADELNVLGYKTKLGNNFSQSSVLTIIKNPVYIGKIAWKRKDIKKSKTPGKVKDTRLRDVSEWIIADGKHKAIINTETWEVAQKILKSRYHIPYQLSNSPVNVFAGLITCGICGKKMVMRKARGINRLMCIYKCGNKSTRFDNVESDCLKYLREYLTDYTAEIKNQIKEDDKNIYISQIFQLKKELTTLNNQRLKLFDLLERNLYDEDTFLERSKNINDRIETVSSTLKSIEKLLKKKSKASYEEDIEFFKSVLDAYDETENISKKNSLLKSILFKIEYTKTNKGKDYEIKLFPKLRK

SEQ ID NO: 5753 - protein, 545 aa, synthetic construct
METTPTKRVALYIRVSTQEQALEGHSIQAQEQNGRQFAERMSYEVVEVYADEGISGKSTKNRFAYQRMMNDARNHRFDLLVIWKLTRLGRNMLDVLQTVEELLRYDVGLHSISEQFDVTTSTGKLMLQLLGSFGEFERNQIAENVQMSMQSLVKDKKRYAGGRRLGYVSGIDTNGQKQLVIEPEEAKIVRLIYAKYLGGAGYRAIANFLNRQGYQTVKKNAFSTTAVKDILRNKIYAGYLEYARYINWETKRRKGKNPKPILVKGTHEPIISEEDYQKVQERLVLEGKQPKWNHTGENVLTGLLRCPECGAPMAASNVTNTLKDGTKKRIRYYSCSVFRNKGASVCHANSIRAEQAETFVADRLKEIVQLPEVLPRLVAALNEEIVRQSQPLEQELVVLLERKEELKTKIEKWEAALEDSPELFPMLKDRLDELTEKRRQLHIRENEILGIFQQQGEPIQVKDVQRILTSLDRFLAQSEKKQVKALYRTFIEKITFDPNYKEILEITMKFTPAVVQQLNEQYQIAVSKTKDTAIFVLKTPFTLTI

SEQ ID NO: 5754 - protein, 457 aa, synthetic construct
MRVACYDRTSVYEEAKISNDAQYDAVKEYVLEKYEQIPQRFSDKGESGGKADRPAFRQLRAWVCASEEEGVIYVWRYDRLARQAKIALEFIELCQQHQVQVYSISEPLPASFSHASTNKLFVQLLFTFAEQQRNVIIENVRAGLAYKKQQRQYLSSAVPYGYRLVNGKIQQEAHEAKVVRHIFQLYLTKKYGYKKLCQRLTQQKFFFRERPFQPYHIYSILKNPLYYGEIKGGSLGKYLGTFEPILSKTIFLQAQEIRQSRCTAKKDTYPYLLRQKIRCPFCGRHLSSKYQWNTKKTKTLHYYHCTDRSCQGIFLRAERVESEVLEKIQAFFQYEGVYQALIAQLTQQLAEKRKDEKHKVIQQKKQEAQWLKAFEEGNCSLEELKQQLQALQKPRSTSSFLSLQQCEAKVKEWLQLKDLSSRQLLCDHVCRIEVTKEKTVCGIYFRQMTQNILEGNE

SEQ ID NO: 5755 - protein, 507 aa, synthetic construct
MKRAISYIRFSSEKQSRGDSLRRQSKMVNDWLKAHPDYYLDQDLSFRDLGVSGFTGKHLKGGLGDFLTAIEKGLVKAGDTLLIESLDRLSRQAVDRASELLRNILRSGVDVVTLSDGEHYTSESLKDPLALIKSILIMQRAHEESLRKSERIQAAWDAKKEAAKAGIKVSKRCPAWLKLNDDRKSFSIIPEKVETVKRCFQLRLEGKSIWEIVRTLNDEGHQTLNQYKAGKFGQTSVQDLLKNRSVIGYFTPKGCEEIAGYFPPIIPETDFYKVQQLSYSRYGRKPASDKPLSVNLFKGVIRCSECGHALIITGFSDTRSGIYRCPSRNENRCNAKGLSRKQTDGTLLALLSRIDRFDSDMTNTIDTLKLHREHISSNIEKLVQLSLEIEDLSAITSKLKQLKGELSQVDADIEKETQRLKSIDVGCLSDCDLTTKAGRIEAQLIIKSAVKEVVLNTAKRRCKVTFHNGKVIDLPITETPSEDVTEAIQSLSEVTERGLIDVDEVII

SEQ ID NO: 5756 - protein, 559 aa, synthetic construct
MKTKLYSYIRFSSMRQNDGSSYERQIRMAREVAAKYDLELVNDYQDLGVSAFKGANSKTGALSRFLDAIGRSVPVGSWLFIENLDRLSRADIVSAQELFLSIIRRGITIVTGMDNKIYSLDTVTANPMDLMFSILLFIRGNEESQTKRNRTNSSALIKIKAHQENPQNPAVAIEEVGKNMWWTDTTSGYVLPHPVYFPVVQEIVELRKNGRSTAEILDHLNETYAPPPAVSNKKHSKWSRAMVERLFHTRALIGIKEVSVDGVNYELKDYYPRVIDDATFYHLKKNIGARAWNFGDKEEVKPIPLLSGIGLLKCDHCGCAMVKVKGTNKRSDQYRYTCDATRSRRLDCEHPNWSFRGDQLEKAVLQLLADKIWIAEDKANPVPALKVQVDEISRKIDNLIALSAMTGATKELADQITTLNSERETLYNQIKMAEEEMYSVDSQGWEKLAEFDLEDVYNEERLKVRFKIKQALKRIGCSRIDRNKNLFVLEYIDGKTQRVVIENSRGTRKGRIFIDLKTINDRQILESNGLVLHPCLDMLTDKDWKPEEEIPGPLQEFGI

SEQ ID NO: 5757 - protein, 559 aa, synthetic construct
MKTKLYSYIRFSSMRQNDGSSYERQIRMAREVAAKYDLELVNDYQDLGVSAFKGANSKTGALSRFLDAIGRSVPVGSWLFIENLDRLSRADIVSAQELFLSIIRRGITIVTGMDNKIYSLDTVTANPMDLMFSILLFIRGNEESQTKRNRTNSSALIKIKAHQENPQNPAVAIEEVGKNMWWTDTTSGYVLPHPVYFPVVQEIVELRKNGRSTAEILDHLNETYTPPPAVSNKKHSKWSRAMVERLFHTRALIGIKEVSVDGVNYELKDYYPRVIDDATFYHLKKNIGARAWNFGDKEEVKPIPLLSGIGLLKCDHCGCAMVKVKGTNKRSDQYRYTCDAIRSRRLDCEHPNWSFRGDQLEKAVLQLLADKIWIAEDKANPVPALKVQVDEISRKIDNLITLSAMTGATKELADQITTLNSERETLYNQIKMAEEEMYSVDSQGWEKLAEFDLEDVYNEERLKVRFKIKQALRRIGCSRIDRNKNLFVLEYIDGKTQRVVIENSRGTRKGRIFVDLKTINDRQILESNGLVLHPCLDMLTDKDWKPEEEIPGPLQEFGI

SEQ ID NO: 5758 - protein, 506 aa, synthetic construct
MRSVITYLRYSSTIQGVEGADSTRRQNDLFKQWLKKNSDARIIASFSDEGLSGFKGKHLTGQFGDMLSRIEAGEFPEGTILLVEAIDRIGRLEHLETEALMNRILGNGIEIHTLQDGLIYTKDALADDLGISIIQRVKAYIAHQESKQKSFRVSQKWEQRAKLALAGEQRLTKMVPGWIDPETFKLNEHAETVRLIFKLLLDGESLHNIARHLQSNGIKSFSRRKDANGFSVHSVRTILRSETTIGTLPASQRNDRPAIPNYYEAAIDALTFSKAQEILDKNRKGRTPASDNPRTINIFKGLFRCECGATVHPTGVKNTYEGVYRCCRRFDGRCDIPQLKRKPFDKWMIENLLSMITVGDDGESERKIASLQHEVEVVTARIKKATALLLEMDDITELKAQAKELNQKRTELQTTIDSMRRKASLTDKELPQLKDIDLTTKAGRVECQLILSKHLESLTLGRGQVTVKLSNGTEIIVPTDPLPLTDGTAIFEIAEKNLLNIDVFQL

SEQ ID NO: 5759 - protein, 507 aa, synthetic construct
MKRVISYIRFSSEKQAKGDSLRRQSKMVTDWLKAHPEYYLDQDLSFRDLGVSGFTGKHLKGGLGDFLTAIEKGLVKAGDTLLIESLDRLSRQAVDRASELLRNILRSGVDVVTLSDGEHYTRESLRDPLALIKSILIMQRAHEESLRKAERIQAAWDAKKEAAKAGIKVSKRCPAWLRLNDDRKSFSVIPDKVETVKRCFQLRLEGKSIWEIVRTLNDEGHQSMSQYKPGKFGQTSVQDLLKNRSVIGYFTPKGCEEIAGYYPAIIDETTFYKVQQLSHSRYGRKPVSAKPLSVNLFKGVIRCSECGHALIITGFSDTRNGIYRCPLRNENRCSAKGLSRKQTDGTLLTLLSRLDRFDSDTTNIIDTLKLHREHISSNIEKLVQLSLEIEDLSAITSKLKQLKGELSQVDADIEKETQRLKSIDVGCLSDCDLTTKAGRIEAQLIIKSAVKEVVLNTAKRRCKVTFHNGKIIDLPITENPSEDVTEAIQSLSEVTERGLIDVDEVII

SEQ ID NO: 5760 - protein, 506 aa, synthetic construct
MRTVITYLRFSSAIQGAEGADSTRRQNDLFKQWLKKNSDAQVVASFSDEGLSGYKGKHLTGQFGDMLARIESGEFPAGTILLVESIDRIGRLEHLETEALMNRILGNGIEIHTLQDGLIYTKDALADDLGISIIQRVKAYIAHQESKQKSFRVSQKWEQRAKLALAGEQRLTKMVPGWIDPDTFKCNEHAETVRLIFKLLLDGESLHNIARHLQANNISSFSRRKDANGFSVHSVRTILRSETTIGTLPASQRNDRPAIPNYYEASIDAATFNKAQEILDKNRKGRTPASDNPLTINIFKGLFRCQCGASVHPTGTKNKYAGVYRCNNHLDGRCDVQPLKRKPFDKWMIDNFLGMIDVGNDGEAEGKIASLQHEVEIVTARIKKATALLLEMDDIDELKIQLKELNQKRTELQTTINTMKRKTSLTDKELPQLKDIDLTTKAGRVECQLILSKHLKGLTLGKDSVIVTLQNDTEITIPTNPLPLNDGTSIFEIAEKELLEIDAYQL

SEQ ID NO: 5761 - protein, 547 aa, synthetic construct
MKLLVPYIRWSTKEQDSGDSLRRQTNLIDAFYSKHKEEYYLLPAHRYVDKGKSGFHQQHKAQGSDFRRMFENVMSGTIPEGSLIVVENFDRFSRADIDTAIDDVRQILRKGVSILTLGDGELYDKSALTDPVKLIKHIIIAERAHQESLVKQKRIAQVWNHKTQLARELKKPMGKQAPGWLELSEDGSHYIVDEDKASLVNIIYDKRLSGMSMFAICKWLNEQGYPTINQRKVRISKTKKPDGNWSALSVKHILTSRSVLGYLPAKISTEDRKTVLREEIEGFYPQIVTDSKFYAVQQLLEETGKGKTSSGDHWLYVNILKGLIRCKCGLVMTPTGIRKPVYQGTYRCNGNKESRCSYGTVSRKLLDTQLCSRLFSKLSQLHDEATDTAKLDELQRRLNTVDSELEKLTETLIQLPNITQIQEALRVKQEEKDELIVQLSREKARVKSVSSLDLSGLDMESVEGRTEAQIIIKRLVKEIVVSGNEKLVDIYLHNGNMIRGFPLDGKDDHTLTLEEATDEMQPLDDMLIFGEPVTRIYPAGDMEEVDA

SEQ ID NO: 5762 - protein, 547 aa, synthetic construct
MKLLVTYIRWSTKEQDSGDSLRRQTNLIDAFYAKHKDDYYLLPAHRYVDKGKSGFHQQHKAQGSDFRRMFENVMSGVIPEGSLIVVENFDRFSRADIDTAIDDVRQILRKGVSILTLGDGELYDKSALTDPVKLIKHIIIAERAHQESLVKQKRIAQVWNHKTQLARELKKPMGKQAPGWLELSEDGSHYIVDEDKASLVNIIYDKRLSGMSMFAICKWLNEQGYPTINQRKVRISKTKKPDGNWSALSVKHILTSRSVLGYLPAKISTEDRKTVLREEIEGFYPQIVTDSKFYAVQQLLEETGKGKTSSGEHWLYVNILKGLIRCKCGLVMTPTGIRKPVYQGTYRCNGNKESRCSYGTVSRKLLDTQLCSRLFSKLSQLHDGATDTAKLDELQRRLNTVDSELEKLTETLIQLPNITQIQEALRVKQEEKDELIVQLSREKARVKSVSSLDLSGLDMESVEGRTEAQIIIKRLVKEIVVSGNEKLVDIYLHNGNMIRGFPLDGKDDHTLTLEEATDEMQSLDDMLIFGEPVTRIYPAGDMEEVDA

SEQ ID NO: 5763 - protein, 507 aa, synthetic construct
MKRVISYIHFSSEKQAKGDSLRRQSKMVTDWLKAHPEYYLDESLTFRDLGVSGFTGKHLKGGLGDFLTAIEKGLVKAGDTLLIESLDRLSRQNVDRASELLRNILRSGVDVVTLSDGEHYTRESLKDPLALIKSILIMQRSHEESLRKSERIQAAWNRKKELISEGIKISKRCPAWLKLNDDRKSFSVIPEKVETVKRCFQLRLEGKSIWEIVRTMNAEGHQTLHQHKAGSFGQTSVQDLLKNRSVIGYFTPKGCEEISGYYPAIIDETTFYKVQQLSYARYGRKPASDKPLSVNLFKGVIRCSECGHALIITGFSDTRNGIYRCPLRNENRCSAKGLSRKQTDGTLLTLLSRLDRFDSDTTNTIDMLRLHREHISSNIEKLVQLSLEIEDLSAITIKLKQLKGELSQVDADIEKETQRLKSIDVGCLSDCDLTTKAGRIEAQLIIKSAVKEVVLNTAKRRCKVTFHNSKSITLPITENPSEDVTEAIQSLSEVTERGLIDVDVVEI

SEQ ID NO: 5764 - protein, 547 aa, synthetic construct
MKLLVTYIRWSTKEQDSGDSLRRQTNLIDAFYAKHKDDYYLLPAHRYVDKGKSGFHQQHKAQGSDFRRMFENVMSGVIPEGSLIVVENFDRFSRADIDTAIDDVRQILRKGVSILTLGDGELYDKSALTDPVKLIKHIIIAERAHQESLVKQKRIAQVWNHKTQLARELKKPMGKQAPGWLELSEDGSHYIVDEDKASLVNIIYDKRLSGMSMFAICKWLNEQGYPTINQRKVRISKTKKPDGNWSALSVKHILTSRSVLGYLPAKISTEDRKTVLREEIESFYPQIVTDSKFYAVQQLLEETGKGKTSSGEHWLYVNILKGLIRCKCGLVMTPTGIRKPVYQGTYRCNGNKESRCNYGTVSRKLLDTQLCSRLFSKLSQLHDEATDTAKLDELQRRLNTVDSELEKLTETLIQLPNITQIQEALRVKQEEKDELIVQLSREKARVKSVSSLDLSGLDMESVEGRTEAQIIIKRLVKEIVVSGNEKLVDIYLHNGNMIRGFPLDGKDDHTLTLEEATDEMQSLDDMLIFGEPVTRIYPAGDMEEVDA

SEQ ID NO: 5765 - protein, 523 aa, synthetic construct
MELSRNITVIPARKRVGNTAAAEQRPKLRVAAYCRVSTDSEEQASSYEVQVAHYTQFIQKNPEWELAGIYADDGITGTNTKKREEFNRMIQDCMDGNIDMIITKSISRFARNTLDCLKYIRELKEKNIPVFFEKENINTMDSKGEVLLTIMASLAQQESQSLSQNIKLGLQYRFQNGEVRVNHSRFLGYTKDEEGNLIIEPAEAKVVKRIYREYLEGASLLQIGRGLEADSILTGAGKTKWRPETLKKILQNEKYIGDALLQKTYTVDFLNKKRVQNKGIVPQYYVENSHEPIIPRDLYMQVQEEMIRRANLHSGANRKKRVYSSKYALSSIVYCSKCGEIYRRIAWNNRGKHSTVWRCCTRVEYGPEECDAPTIQESELQEAVARAINDLLGGRDTFLPILQANIFQVLENNSSGKIAEIDRRLVEQQQKLLKLANGKKDYNAVADEIHSLREQRQKVLAQDAERDGQKKHIEEMKAFLEEQKDIPIEYDEQLVRRLVEKVTVFDEKIAVKFKSGVEIEVDR

SEQ ID NO: 5766 - protein, 583 aa, synthetic construct
MATRLYSYVRWSTDKQSGNTSLDRQTDKAKAFASLHGLEYVQILDAGISAFRGKNTTQGALAGFIEAVKAGAIPNDSYLYVENLDRLTRQDVMTALNLFTGLLSLGLTIVTGMDGKVYSQDSVKNNVTDLMMSLFLFSRANEESLTKQKRAHETALKLIDRHRAGLPVNIKSAGSAPWWIDASMGTYEAVKPHPVHWKAAQKAVELMLEGWGCFRVASYLTDNPDLYPPPRGNRGKGKKRSECWAVANLKAMRSNRALYGEKVITIDGVTHRLSNYYPAVCSQTDFARLQDVACSNRHKVGEVRQTITLLSGLGLLRCGHCGGSMSFFSKEGRIRYVCETGKNKTSACRVWSVSGLLVERCLLAPLIRGYMDLMMGKQGKREDLTQAIEAKQGELNGIESQISNITSAITMGGNIPALVASLQALEHTKSGVLVELERLTQRQALQDGKDHQLESMVDFYELLTPDLLEDTTDERRLKVREVVRAVVRSVTLSKGPDKALTLSYELQDKTAYVYTGTLTAEGKKGYTLEVVNGDIQINGTEDNEEAQRLIGVIQDAEQEYHKAISKILAGFPAPVGSHFFGKR

SEQ ID NO: 5767 - protein, 520 aa, synthetic construct
MKRITKIEENMLLEKRKLRVAAYCRVSTARDEQLVSLAAQKAHYENYIKSNDEWEFAGLYYDEGISGTKKEKRDGLLAMVAACERGTIDFVITKSISRFARNTTDCLELVRKLLDLNIYIYFEKENLNTGSMESELMLSILSSLAESESVSISENEKWGIKRRFQNGTFIISYPPYGYDNVDGEMVIVPEQAEIVKQIFADTLAGKSTHEIADELNERGVATKKGGHWTPGTINAIIGNEKYTGDVLFQKTYTDSSFNRHQNRGELDQYLMQDHHEAIISKEEFELANAVLKQRGREKGNGYDTGRYQNRYGFSGRICCGECGGKYKRRMHYKPSGQYVAWACANHLKDKESCSQKYITDDALKLAFVTMMNKLVFGHQMVLLPLLQSLRGLNDQSRLLKIEELETAIEKNKEQKQVLTNLMASGYLEPALFNKESNELAAEAETLRQEKDGLMRSVNGDMAKIEELQRLLRFTSKGTMMTEFDDETFLSFAEWITVLSRKEVVFELKCGLSLKERLVEP

SEQ ID NO: 5768 - protein, 585 aa, synthetic construct
MAYAALRKAGLVPAAAPDLRTVALYVRVSTGYQVDKDSLPFQKKELKNYCKHVLHIDESRIEIFEDAGKSGKNTNRPAFERMMKKVRAGQISHVIVYKIDRISRNLVDFSLMYDDFKYNRVTFISLNEQFDTSSAIGEAVLKIILVFAELERKLASERVMDIMIGRALSGQWNGARVPFGWDWDEEAKFPKHSEVEAVFGRLMYDMYEETRSTCKVRDYNNTHDIPTKRGGEWTSKTVADFIRNPINRGDYRYNYRESARGRKKPEEEVIYLEGVFPPLVPPEQWDRCNAIMDENAAKKRSAGFSHKRIHVHAFAGLLVCGDCGAFFQVIKKDKTRENGFSPSLYRCGARYRKRACNSPGCSDVVLGPFVFNYISGMVRVASMRSKISSPEELEQLLLTGPEFEAVAGIASEGLNATFALLSGRPATGGAAYVPDLLAAPSGCINTGEVEELKQKITRIERALERLKKAFLFDDQAMGEKEYLETKLALETERIAAENRMKDLNEATFSTDAGELAFIKSASSFLLAHQIQTGEHIQYSDFAPLVGDETMKEFLNLVIERIVIQNGRPVEITFKNGLTHKFLYRD

SEQ ID NO: 5769 - protein, 630 aa, synthetic construct
MFMTLSKYIESVRLMDKDGTKDAKIRDLLAYYERYNKTVKPGPGVFYAVIYARYSSHSQRDESIEGQVREDLEWAARNNIIVLGVYIDRKLTGKEADRRDSFQDMIRDAAKRRFQFVICWKVDRFARNRYDAAIYKARLKKYNIRVVYARESIPDGPEGILLESVLEGQAEYYSASLSENIRRGQDDNALECKVNGGGLTLGYKIGADKRFEVEPAEAAIVRMIFEHYDAGKTFKEIEDFLNSRGYKTSRGKPFNKNSFKRILRNRKYIGVYQYRDIVKEGGIPAIIEKELFESVQKKLDKNENARAHKKGDVEYLLTTKIYCGLCGKAMIGESGTGRHGGKFHYYTCVGRKRDRICKKKPVKKDWIENLVINETIRLVLCDDIIAEIADGVMAYQARERDQTVLNSLRVELNDVERAIKNLLSAIEQGIITPSTKSRLEDLEDEKGRIQNGIAEESMARPLVDRDQVVFFLERFRKGDADDPVYRQTLVDVFVNSVYVYDDKIVITYNYSGEHNKVTLEQVDEAVERAESGGAPRGDGLSGGSVESSSPPPRKAACRFIAGGFTFYDNTLYNTFLFNSFANKSPMAAAVCSESLSSACPYCPKVSMLRECPTSDFMVPSGRYFAMETNV

SEQ ID NO: 5770 - protein, 542 aa, synthetic construct
MAERVYCLYRVSTNKQVDHDENNQADIPMQRKACHDFAAKMGWVIVGEEQETGVSGYKVSADDRDKLQLIKKYAEQGKFDILLVFMFDRLGRKSDETPFVVEWFTKKGVRVWSVQEGEQRFESHTDRLTNYIRFWQADGESQKTSMRTKTALGQMVEEGRFRGGNAPYGYRLEKSGILNKRKHEVYMLVIDEDEARVVRMMFDLCISSGYGRWRLANFLNDHGIKNRKGQNWHDASVGGILHNPLYKGILRSGETYAGPFEALQIIAPDQFDLAQKLMLERTNERKERRTVPLNTTGQSLLSGNIFCGHCGGRLVLTTNGTTTRLADGTPVHKKRIRYVCYNKTRRRQECTGQTGYTMHILDGIVTEVLHQVFDKMQGASNDMIVGSAVQKQMAMIRSELQRARAENTKANKEYESLKAEVLKAIQGKSALPQDVLTEMLEDTRQKVLSTSERITTLTEELNDGNSKIEEMKAEFNRIVSWSKIFDESPMEVKKMICGYIIKKVSVFRDYRVKIEFNINVEQFLNGIDSINECATYELPMAQ

SEQ ID NO: 5771 - protein, 639 aa, synthetic construct
MSPRKKLADQQERYSGTAVIYARYSSHNQRDVSIEQQVKQCQEFAQQNSFQIIEIYADRAISGKTDKRPNFQRMMRDAEKKKFKYVIAWKSNRMGRNMLQAMMNEAKLNDLGIRVLYAEEDFDDTAAGRFALRSMMNVNQFYSENMAEDIKRGLYDNAAKCKIANGGLPLGYKKGDDLRYALDPPNDEIVREIFSRTACGDSFADIAADLNARGIKTSRGKAWGKNSFHALLTNERYTGVYIYGDIRIEGGVPQIVDKGLFFRVQEVLKTKKNPQGRHRINGDYLLTGKLFCGHCKSPMAGISGTGKNGKLHHYYICQKRRMEKSCDKANIRRDKIEHEVAVAIRNYIMRDDVLEWIADSAMTFAKEYRNQTCIGSLETQLAENKQATKNLLTAIEHGIITSTTKDRLLELEREQAILVSRLDEEQASLLHYSRDDIISAMSLYKNGNIEDKAFQAKLFDTFLIAVYLYDDHLKIEFSVTGKKTFVNLPLDTSVIDNIESFAAEECSFSLSLGPPKKCPLWIPSAEMPMVSGFSGGGPPQISQLKQKIQTGGSQKLAGSEPQNSIEIHSVLFEMRFFKKGAVFIFRKRALKLQRKENHCYAGDKCQLLLEDIRRQIERNVPNPRERMRQSDQNEINMSL

SEQ ID NO: 5772 - protein, 559 aa, synthetic construct
MKTKLYSYIRFSSMKQADGSSYERQKRTAAEIAAKYDLELVTSYQDFGVSAFKGANSRTGALSRFLDEIGRSIPVGSWLVVENLDRISRQSIIEAQELFLSIIRRGITIVTGMDGKVYSKESVNANPIDLLLSVMLFARANEESQTKRNRTNSSALIKIKAHQENPQNPAVAIEEIGKNMWWTDTTSGYVLPHPVFFPIVQEVVELRRNGRSTAEILDHLNATYTPPPAASHKRHSNWSRAMIERLFHTRALIGIKEISVDGVKYELKDYYPRVLDDAEFYHLKKSIGVRACNYGDKEEVKPIPLLSGVNLLKCDHCGSAMVKVKGTNKRPNQYRYSCDAMRSSRIACVHTNWSFRGDQLEKAVLQLLADKIWIAEDKANPVPALKVQIDEISRKIDNLITLSAMTGATKELADQITTLNSERETLYNQIKMAEEEMYSVDSQGWEKLAEFDLEDVYNEDRIKVRFKIKQALKRIGCSRIDKYKNLFVLEYIDGKTQRVVIENSRGPRKGRIFVDLKTINDRQILESNGLVLHPCLDMLTDKNWKPEEEIPGPLQEFGI

SEQ ID NO: 5773 - protein, 502 aa, synthetic construct
MENQPKRALIVTRLSRVTEATTSPERQMEICQVLCDDRGYEVVGHAEDLDVSGSVDPFDRRRRPNIARWLANEAEPFDVIVVYRVDRLTRSLRHLQKLVHWAEDNGKLVVSATEPHFDMTTPFAPVLIALIGTVAQMELEAIRERNSSAARHNIRAGRWRGGQPPWGYVSSNASGEWRLVPCPEQVELINEVAARVLGGEPLQRIAHDLTSRGIPTPKGRTEWNVTPLKRSLTSEAMLGYVMSGDKPLRNDDGSPIIRAEPILSREVFDRVKVELESRSRRGEPTKRSSSLLLRVLYCGVCQLPAYQFNGGSHSKSPRYRCSSTGKSTKCENLTVRMDLADQAFTENLLDMFGDSERLERIWDTGSDHSAELADINEVLEDLTGLLGTGPYKAGTPQRSALDARIAALASRQAELSAEAVRPSGWVWRTTGEMFADWWDNQDTESRNVWLRSMNIKMTYNNSSGAVTWGLDWGDLKKFEEQLKFGKSAQQAVRQVTEASPDL

SEQ ID NO: 5774 - protein, 559 aa, synthetic construct
MKTKLYSYIRFSSMRQNDGSSYERQIRMAREVAAKYDLELVNDYQDLGVSAFKGANSKTGALSRFLDAIGRSVPVGSWLFIENLDRLSRADIVSAQELFLSIIRRGITIVTGMDNKIYSLDTVTANPMDLMFSILLFIRGNEESQTKRNRTNSSALIKIKAHQENPQNPAVAIEEVGKNMWWTDTTSGYVLPHPVYFPVVQEIVELRKNGRSTAEILDHLNETYTPPPAVSNKKHSKWSRAMVERLFHTRALIGIKEISVDGVNYELKDYYPRVIDDATFYHLKKNIGARAWNFGDKEEVKPIPLLSGIGLLKCDHCGCAMVKVKGTNKRSDQYRYTCDATRSRRLDCEHPNWSFRGDQLEKAVLQLLADKIWIAEDKANPVPALKVQVDEISRKIDNLIALSAMTGATKELADQITTLNSERETLYNQIKMAEEEMYSVDSQGWEKLAEFDLEDVYNEERLKVRFKIKQALKRIGCSRIDRNKNLFVLEYIDGKTQRVVIENSRGTRKGRIFIDLKTINDRQILESNGLVLHPCLDMLTDKNWKPEEEIPGPLQEFGI

SEQ ID NO: 5775 - protein, 555 aa, synthetic construct
MTTVAIYARYSSDNQRDASIEDQLRLCRLRLEREGWEPAGEFADRAISGASMVRPGLQQLLERARAGCFDVVVCEALDRLSRDQADVAQIYKQLKFDGVAIVTLSEGPVSELHVGLKGTMNALFLKDLADKTRRGLRGRVEDGCSGGGNSYGYDVVKAVDANGEPDRGQRTVNTGQAAVIRRVFELFAAGHSPRKVAQALNDERIQGPSGGLWRDTTIRGHITRGTGLLNNELYVGRLVWNRQRYIKDPTSGRRVSRVNDASELIVKDVPDLRIVDDALWDCVKARQAGIRTSEPVRKLRESRFWERRRAKHLLTGMVFCATCGDAFASIGQDYLGCSRARSSKSCTNTHSIRRSELEGRILDALKCNLMAPELVEAFITEFHAEVERQRRVDVVAQSAHHKDLAAVERKLNGLYDAIADGLRTTGIKAKVEALEQDKARLESVIAATPAAAPILHPNLSKLYAARVGDLQDALRAEDLRTEALDILRGLIERVDIGPKADDGSRPVALIGAIAGMIEAAHSKRPASGEAGVLGVFTRSAKVVAGVGFEPTTFRL

SEQ ID NO: 5776 - protein, 516 aa, synthetic construct
MICLRNIFIYLRKSRKDIEEEKKAAEIGDMYDTLERHRRQLLDLAKRNNFTILDILNEDVVSGEYISERPVMQRLLREVESRRVNAVLVMDLDRLGRGDMSDQGAIDRTFRLSGTKIITPSEVYDPESESWELVFGIKSLFAREELKTTNKRLMRGRRQSATEGRHIANRPPFGYKRDKHLKLYPDPDTAWIVKKIFELTLNGWGRKRIAIELQKLGIKSPMGKDSWGTATIRQILTNEVYIGKIVWGKQKNVKIDGKYVPKKLPQEKWVVNENSHEAIISEDLFENVQDVIKHRYNPSVPQDNELKNTLAGLLKCSICGMTMKYTKPPKRPNAYIHCQNVACQGKQRSATFPLVEERILEGLEQIVDDFKLNEDMFEKKKESNSLIFLKEKAINNKKQELKNLTTQKDNLHDLLEQGIYTVETFLDRQKSVGERIRKLENELSLLEEDLQKEIEQIKNYTEYVPAIKAAIEAYRKTENATKKNRLLKSILEKATFYRDETHKRQDEFVIQLYLKY

SEQ ID NO: 5777 - protein, 484 aa, synthetic construct
MITTNKVAIYVRVSTTNQAEEGYSIEEQKDKLTSYCHIKDWSIYNIYTDGGFSGSNTERPALEKLIKDAKKKKFDTVLVYKLDRLSRSQKDTLYLIEDIFLENKIDFVSLLENFDTSTPFGKAMVGILSVFAQLEREQIKERMQLGKLGRAKSGKSMMWAKTSYGYDYHKETGTVTVNPWQSIIIADIFDWYLSGKSITKIRDALNDMYGEDNGGKVWNYRAVRMILANPVYCGYNQYKGEIYKGNHEPIISEEVFNKTQEELKIRQQLAAEYSNPRPFQAKYMLSGIAQCGYCYAPLKIIMGMVRKDGTRYIRYECYQRHPRKTKGVTVYNNNEKCHSGAYEKDEVEEYVLNEISKLQNDTNYLDELFSNPETESIDRDSYQKQIDELTKKLSRLNDLYIDDRITLEELQKKSAEFTTIRAFLEAELENDPTLKVDKQKENMRQTLATDDIIGLDYEQQKTIVRALINKVQVTAEDIAIKWKI

SEQ ID NO: 5778 - protein, 413 aa, synthetic construct
MVVRLIKAKENQKKQRVCAYVRVSTTNSSQLDSLENQKVYFETLYANREDIDFLGVYYDRGISGAKEKRPSFQAMLEACCKGQIDLIHTKSISRFARNTMTVLETSRELKALGVGIYFEEQNIHTLSNEGEVMLSVLASLAEEELDSMSSNQRWAFQKKFQRGELVINTKRFMGYDADDKGELVINEAEAQIVRRIFQLYLDGVGMHCIAKRLNQEGVPTITKAKWHDTTIRNILKNEKYKGAVLLQKYFHDGVNGSKKLNQGEREQYLIEDNHAPIVSKEAWQAVQDKLLSKSRKQGVNKHYRFTSLLKCQHCGSTLKRQVSYKKQIVWCCSKYIKEGKISCQGMRVPEIAIADWQLKAPVTVIERIEYGKKYYSYSSQESADEHHSSGQNQNQGSRLLSGIHRPRRTAIKL

SEQ ID NO: 5779 - protein, 528 aa, synthetic construct
MKVPVWSYARVSTLNQVDGFGIQRQVNTINQFIQYLVLDHRLPFVLDTDNITQMISEGKSAFKGKNWNPKTKLGQYRKMVMDGVVPDSVLIVENIDRLTRLDPFQAVEIISGLINRGTTILEIETGMTYSRYIPESITVLTMQINRANGESKRKSVMMKKSHQNRYGNVSKVRPRWFDVVEVDGIKQYRTNNTAKAIQRMYNDYVNGIGAAQIVRTYGDTDNGKPWTLVTVLRALSDKRVADDARYPSIIDKALYERVQAMKLSPSKGNTHQKHMLNLFAGMSRCPLCGQAIITKRNSHGGLFTVCLGKRTDKTCTARSIAYNALERPLLNAIIGLDFSEVYGQEESNVLTLRDQWIQNERDIAAFRERLTKASRHEKFAILDELEVMNREQDELTIRLKSVDAPKDITLTYDDDKLDMNVEYRIELNNRMKKLIQRIDIVREDVSKTNYKIFCSIKYWTELLTHLVIIDVDVQRIGRGGTNQLTTTLRSVSSLDLEGNIKGNPDMEALEYWQNVVSKATQKAIESLT

SEQ ID NO: 5780 - protein, 507 aa, synthetic construct
MKRAISYIRFSSEKQSRGDSLRRQSKMVTDWLKAHPEYYLDQDLSFRDLGVSGFTGKHLKGGLGDFLTAIEKGLVKAGDTLLIESLDRLSRQDVDQASELLRNILRSGVDVVTLSDGEHYTRESLRDPLALIKSILIMQRAHEESLRKAERIQAAWDAKKEAAKAGIKVSKRCPAWLKLNDDRKSFSVIPEKVETVKRCFQLRLEGKSIWEIVRTLNDEGHQSMSQYKPGSFGQSSVQDLLKNRSVIGYFTPKGREEIAGYFPPIIPETDFYKVQQLSYSRYGRKPASDKPLSVNLFKGVIRCSECGHALIITGFSDTRNGIYRCPLRNENRCSAKGLSRKQTDGTLLALLSRLDRFDSDTTNIIDMLRLHREHVSSNIEKLVQLSLEIEDLNAITSKLKQLKGELSQVDADIEKETQRLKSIDVGCLSDCDLTTKAGRIEAQLIIKSAVKEVVLNAAKRRCKVTFHNSKSITLPITENPSEDVTEAIQSLSEVTEKGLIDVDVVEI

SEQ ID NO: 5781 - protein, 402 aa, synthetic construct
MKQIKTIQAQKVTAIKRLKVAAYTRVSHTSLLQSLSNQVSHYSQLIQANPEWDYVGVYSDSAISGRSQAYRRDFQQLLEDCRKGKIGLILTKSISRFGRNTVELLETVRELKRLGISVRFEKEKIDTLTAEGELLLTLLASMAQEESQSISQNIRWRVKKRFEEGKPYIPQDIFGYRWNGDEYVIEPHEASIVRQVFEWYMEGLSAPKIAKRLDDRGERTRLGNRFTKRVIYNMFDQEAYCGRLILQKTFRDQFGSRSILNDGQMAKYIVENAHEAIVTPEYFQLVNQEKKRRARRRVSKHDALAKLQGKVYCEHCGLDMVLTLETKFNQEKRVRYYCRTRDAKGVETCLGRTVTEEQLFQAFGESINTEDIHHISFNSVTNEAKAIYRNGEEKHVIIQKGR

SEQ ID NO: 5782 - protein, 507 aa, synthetic construct
MKRVISYIRFSSEKQAKGDSLRRQSKMVTDWLKAHPEYYLDESLTFRDLGVSGFTGKHLKGGLGDFLTAIEKGLVKAGDTLLIESLDRLSRQAVDRASELLRNILRSGVDVVTLSDGEHYTSESLKDPLALIKSILIMQRAHEESLRKSERIQAAWDAKKEAAKAGIKVSKRCPAWLKLNDDRKSFSVIPEKVETVKRCFQLRLEGKSIWEIVRTLNDEGHQSMSQYKPGKFGQTSVQDLLKNRSVIGYFTPKGCEEIAGYYPAIIDETTFYKVQQLSHSRYGRKPVSAKPLSVNLFKGVIRCSECGHALIITGFSDTRSGIYRCPLRNENRCSAKGLSRKQTDGTLLTLLSRLDRFDSDTTNTIDTLKLHREHISSNIEKLVQLSLEIEDLNAITSKLKQLKGELSQVDADIEKETQRLKSIDVGCLSDCDLTTKAGRIEAQLIIKSAVKEVVLNTAKRRCKVTFHNGRAITLPITENPSEDVTEAIQSLSEVTERGLIDVDEVII

SEQ ID NO: 5783 - protein, 601 aa, synthetic construct
MKKNNVEIIKADSLVRRRGDNFERESKRVAAYCRVSSDSEDQKNSYESQVRHYKDYISQRSDWELAGIYADEGISGTQVGKRQDFQRLINDCVNGEIDYIVTKAIARFARNTLDTLKYVRMLKDMQIGVYFEEENIDTLTMDGELLLTILSSVAQQEVENTSAHVKKGLKMKMQRGELIGFQGCLGYDYDVETKQLSINKKEAKIVRYIFERYLEGIGGKVIARELDELGYKSPRGLDHWNDTTVLGIIKNEKYKGDILMGKTFTVDPISKRRLSNFGEEDKYYIKDNHEPIISKEDFEKAQEIRLRRAGNKKTAANVNGKRERYSKMYAFSSMLECGFCGSILSRRSWHCRSDYRKVVWHCVTSIKKGKKFCKHSKGLEELAIEGAFMEAYRKLYHSNENLMTDLLETIESELNDNSLNKELKRITNKLRTLLKKEENLVNLRLEGKISDTIYNEKYNEISSEKEFLAEEKVNIETTLKSEIDVKKRLTEFKHLLSSQKMLTEFDRAVFESIVEKIIVGGVNSDGEIDPAMLTIIFKTGETQNKDGKQFKSKRKNAKLETDKLCPQNSDEDKKLYSQGTDYTRGVCFSARESLEPFDKWK

SEQ ID NO: 5784 - protein, 627 aa, synthetic construct
MAGIRTENKIYEVGIYCRLSKDDGTDNESASIATQKSILTDYVKRQGWHLAKTYVDDGYSGTNFQRPSFQNMIKDIENGLINCVITKDLSRLGRNYLDCGLYLEVFFPEHNVRYIAVNDGVDTLNKSAMDITPFRNILNEMYSADVSVKIKSAYRARFQQGKFMGTTAPYGYVKDPADHNHLLIDDKVAHVVREIFDLALAGNGIAKIRKHINKQHILRPAAYAVEQGATGYERYFEDNEENRYIWSENSVRGILRSPIYAGNLAGYKRIAANMKSKKRPSKLPEEWEVIPDTHEGIVTQEEFDTVQQLMTSRRREQNAGGFENIFSGVIKCADCGYAMRAASANRRKRPDIIDCVQYTCNNYGRYGNVMCTAHSIEARDLFNAVLADINRFADMAVNDEKAVRAIERRLTETDQSRAKSLEKEKKKLNKRLAELDRLFSSLYEDKVMERITERNFEMMSGKYQKEQLEIEARLKEVTETLNDSYEKSQGVRDFLSLIRNYQGLKELDATIINALIDKILVSEREKLADGTVRQEIKIYYKFIGFVGELHITPTKRWTALKPKNCTVCGVEYVPSSGISKYCPACAKRIQREKSNESKRRSRERNRRACIELSAKNDRLILYSEMDD

SEQ ID NO: 5785 - protein, 452 aa, synthetic construct
MKAAIYIRVSTQEQIENYSIQAQTEKLTALCRSKDWDVYDIFIDGGYSGSNMNRPALNEMLSKLHEIDAVVVYRLDRLSRSQRDTITLIEEYFLKNNVEFVSLSETLDTSSPFGRAMIGILSVFAQLERETIRDRMVMGKIKRIEAGLPLTTAKGRTFGYDVIDTKLYINEEEAKQLRLIYDIFEEEQSITFLQKRLKKLGFKVRTYNRYNNWLTNDLYCGYVSYKDKVHVKGIHEPIISEEQFYRVQEIFARMGKNPNMNRDSASLLNNLVVCGKCGLGFVHRRKDTVSRGKKYHYRYYSCKTYKHTHELEKCGNKIWRADKLEELIIDRVNNYSFASRNVDKEDELDYLNEKLKIEHAKKKRLFDLYINGSYEVSELDSMMADIDAQINYYEAQIEANEELKKNKKIQENLADLATVDFDSLEFREKQLYLKSLINKIYIDDEQVTIEWL

SEQ ID NO: 5786 - protein, 508 aa, synthetic construct
MTTVTIIQPTISEEQNHKLRCAAYCRVSSNSEDQLNSFMAQTRYYEKAFEKSDREQLVDIYADEGITGTREDKRDEFQRMIKDCRRGKIDRIYTKSISRFARNTKDCLKNIRELKSLGITVFFEKENIDTAKLTDEMMITIMGGLAQEESVSISKNLKWSYQKRFEKGIVNVFSAPFGFKLNNGALIIDKIQAQIVEEIFDMFLNGIGYQRISEICQSKYKVYKDKFSYYGIRYILSNEKYIGDSVYQKTFTTNNLPYRKIQNNGQLNKYCIQNTHEAIISIEIFEKAQKLIESRKHKNIVSESPFRGKLICANCGTKYKRKDSRNKIYWVCRKHDNLAELCMNKRVEEKFIKQSFMRLHNKLWHDYKQILVPLQTALQDLKFRKFSGKTQVMDISKEIAKLREQTHVLARLKTKGFLDEAKYIEQTTELTAKINKLQAELKKFTRSDDEDETLDQIEMLIDFFERRDKPITEFEELAFESIVEKIIVINQHELEFHLIGGLKFKEKI

SEQ ID NO: 5787 - protein, 538 aa, synthetic construct
MSTAPNVTIIPAKVQTAESRSKYHQLRVAAYCRVSTAQEEQQNSYQVQIAYYTDLINRKKEWTLAGIFADEGISGTQTKKRTEFNRMIRMCRNKKIDLVITKSISRFARNTVDCLEYVRQLKDLGIGVIFEKENINTLTMTSEFMIALYGSFAQAESESISKNVSWGKEKAYREGKVQFQYKYLLGYKKGEDGKPEIVPEEAETVRLIYTLFLDGYSMSRIKKLLENKGILTSQGNKVWNESLIRSILKNEKYAGDALLQKTFTSDCITHKIVKNHGERPMYLVTDHHEPIIDRDTYNRVQQELARRSSKRKVSDKTITEQGKYSSKYALTELLICGKCGTPYRRTTWVSRGKKLIVWRCISRLEHGRRYCPDSPTIKEENLHRGIIRAINNYYSCRDDIKRILKANISSVLECQGQKEILATEKRLKEIDQARTDLVGLIASGGCDEDTLDGDFAKLYAEEQDLNERLKMLKLQNQTSDETQQKLDKVTKMIEHEKFELETFDNVLVRKLIECIKILSKNEILVIFKGGYEVRSEIE

SEQ ID NO: 5788 - protein, 507 aa, synthetic construct
MKRAISYIRFSSEKQSRGDSLRRQSKMVNDWLKAHPEYYLDQDLSFRDLGVSGFTGKHLKGGLGDFLTAIEKGLVKAGDTLLIESLDRLSRQNVDRASELLRNILRSGVDVVTLSDGEHYTKESLRDPLSLIKSILIMQRAHEESLRKAERIQAAWDAKKEAAKAGIKISRRCPAWLKLNDDRKSFSVIPEKVETVKRCFQLRLEGKSIWEIVRTLNAEGHQTLNQYKAGKFGQTSVQDLLKNRSVIGYFTPKGCEEISGYYPAIIDETTFYKVQQLSYARYGRKPASDKPMAVNLFKGVIRCSECGHALIITGFSDTRNGIYRCPLRNENRCSAKGLSRKQTDGTLLALLSRLDRFDSDTTNIIDTLKLHREHISSNIEKLVQLSLEIEDLSAITSKLRQLKNELSQVDADIEKETQRLKSIDVGCLSDCDLTTKAGRIEAQLIIKSAVKEVVLNTAKRRCKVTFHNGKVIDLPITENPSEDVTEAIQSLSEVTERGLIDVDVVEI

SEQ ID NO: 5789 - protein, 506 aa, synthetic construct
MRTVITYLRFSSAIQGAEGADSTRRQNDLFKQWLKKNSDAQVVASFSDEGLSGYKGKHLTGQFGDMLARIESGEFPEGTILLVEAIDRIGRLEHLETEALMNRIIAHGIEIHTLQDGLIYTRDALSDDLGISIIQRVKSYVAHQESKQKSFRVSQKWKQRAKLALAGEQRLTKMVPGWIDPDTFKCNEHAETVRLIFKLLLDGESLHNIARHLQANNISSFSRRKDANGFSVHSVRTILRSETTRGTLPASQRNDRPAIPNYYEAAIDAATFNKAQEILDKNRKGRTPASDNPLTINIFKGLFRCQCGASVHPTGTKNKYQGVYRCNNHLDGRCDVPPLKRKPFDKWMIDNFLGMIDVGNDGEAEGKIAALQHEVEIVTARIKKATALLLEMDDIDELKIQLKELNQKRTELQTTIDNMRRKASLTDKELPQLKDIDLTTKAGRVECQLILSKHLKGLTLGKDTVTVTLQNDTEITIPTDPLPLNDGTSIFEIAEKNLLNIDTFQL

SEQ ID NO: 5790 - protein, 507 aa, synthetic construct
MKRVISYIRFSSERQAKGDSLRRQSKMVNDWLKAHPEYYLDQDLSFRDLGVSGFTGKHLKGGLGDFLTAIEKGLVKAGDTLLIESLDRLSRQDVDQASELLRNILRSGVDVVTLSDGEHYTKESLRDPLSLIKSILIMQRAHEESLRKAERIQAAWDAKKEAAKAGIKISRRCPAWLKLNDDRKSFSVIPEKVETVKRCFQLRLEGKSIWEIVRTLNDEGHQSMSQYKPGKFGQTSVQDLLKNRSVIGYFTPKGCEEISGYYPAIIDETTFYKVQQLSYARYGRKPASDKPMAVNLFKGVIRCSECGHALIITGFSDTRNGIYRCPLRNENRCSAKGLSRKQADGTLLTLLSRLDRFDSDTTNTVDTLKLHREHISSNIEKLVQLSLEIEDLSAITIKLKQLKGELSQVDADIEKETQRLKSIDVGCLSDCDLTTKAGRIEAQLIIKSAVKEVVLNTAKRRCKVTFHNGKAITLPITENPSEDVTEAIQSLSEVTERGLIDVDEVII

SEQ ID NO: 5791 - protein, 507 aa, synthetic construct
MKRVISYIRFSSERQAKGDSLRRQSKMVNDWLKAHPEYYLDQDLSFRDLGVSGFTGKHLKGGLGDFLTAIEKGLVKAGDTLLIESLDRLSRQDVDQASELLRNILRSGVDVVTLSDGEHYTRESLKDPLALIKSILIMQRAHEESLRKAERIQAAWNRKKELISEGIKISRRCPAWLKLNDDRKSFSVIPEKVETVRRCFQLRLEGKSIWEIVRILNDEGHQTLNQYKAGKFGQTSVQDLLKNRSVIGYFTPKGCEEIAGYFPPIIPETDFYKVQQLSYSRYGRKPASGKPLSVNLFKGVFRCSECGHALIITGFSDTRNGIYRCPLRNENRCNAKGLSRKQTDGTLLALLSRIDRFDSDMTNTIDTLKLHREHISSNIEKLVQLSLEIEDLSAITSKLKQLKGELSQVDADIEKETQRLKSIDVGCLSDCDLTTKAGRIEAQLIIKSAVKEVVLNTAKRRCKVTFHNGKVIDLPITEDPSEDVTEAIQSLSEVTERGLIDVDEVII

SEQ ID NO: 5792 - protein, 507 aa, synthetic construct
MKRAISYIRFSSEKQSRGDSLRRQSKMVNDWLKAHPEYYLDQDLSFRDLGVSGFTGKHLKGGLGDFLTAIEKGLVKAGDTLLIESLDRLSRQNVDRASELLRNILRSGVDVVTLSDGEHYTKESLRDPLSLIKSILIMQRAHEESLRKAERIQAAWDAKKEAAKAGIKISRRCPAWLKLNDDRKSFSVIPEKVETVKRCFQLRLEGKSIWEIVRTLNAEGHQTLNQYKAGKFGQTSVQDLLKNRSVIGYFTPKGCEEISGYYPAIIDETTFYKVQQLSYARYGRKPASDKPMAVNLFKGVIRCSECGHALIITGFSDTRNGIYRCPLRNENRCSAKGLSRKQTDGTLLALLSRLDRFDSDTTNTIDTLKLHREHISSNIEKLVQLSLEIEDLSAITSKLRQLKNELSQVDADIEKETQRLKSIDVGCLSDCDLTTKAGRIEAQLIIKSAVKEVVLNTAKRRCKVTFHNGKAITLPITENPSEDVTEATQSLSEVTERGLIDVDEVII

SEQ ID NO: 5793 - protein, 507 aa, synthetic construct
MKRVISYIRFSSEKQAKGDSLRRQSKMVTDWLKAHPEYYLDQDLSFRDLGVSGFTGKHLKGGLGDFLTAIEKGLVKAGDTLLIESLDRLSRQAVDRASELLRNILRSGVDVVTLSDGEHYTSESLKDPLALIKSILIMQRAHEESLRKSERIQAAWNRKKELISEGIKISKRCPAWLKLNDDRKSFSVIPDKVETVKRCFQLRLEGKSIWEIVRTMNAEGHQTLHQHKPGSFGQSSVQDLLKNRSVIGYFTPKGCEEISGYYPAIIDETTFYKVQQLSYARHGRKPASAKPLSVNLFKGVIRCSECGHALIITGFSDTRNGIYRCPLRNENRCSAKGLSRKQTDGTLLTLLSRLDRFDSDTTNTLDTLRLHREHLSSNIEKLVQLSLAIEDLNAITNKLKQLKNELSQVDADIEKETQRLKSIDVGCLSDCDLTTKSGRIEAQLIIKSAVKEVVLNTAKRRCKVTFHNGKAITLPITENPSEDVTEAIQSLSEVTERGLIDVDEVII

SEQ ID NO: 5794 - protein, 509 aa, synthetic construct
MRRAISYIRFSSERQLKGDSVRRQSKLVTDWLDKNPEFYLDSSLSFKDLGKSAFSGKHLKGGLGDFLTAIEKGLVKAGDTLLIESLDRLSRQDIDIASELLRRILRAGVDVVTLSDGEHYTRESLKDPLSLIKSILIMQRAHEESLRKSERVQAAWNRKKELISEGIKVSRRCPAWLRLNDDRRTFTIIPDKVEVVKRAFDLRLQGLSFWAITRTLNDEGHLSLNQYTPKQKGWSDTAVKKLLRNRAVIGCFTPAGREEVQGYYPAIISESLFYRVQQLNTGQYGRASVSSNPLSVNLFRGIIKCSECGATIVLGGYALKRFGMYRCPNRSANRCSAKAISRKQTDATILYMLALCDRFETENTDTIDSLKLQREDLQRKISKMAELAIELDDMTIITEKLRDMKNALSKLNHDIEEETQRIKAITTGSLKDIDRTTKEGMIETQLLIKGVLKEIVIDAAKRRCKVTFHNGKAITLPITENPSEDVTEATQSLSEVTERGLIDVDEVII

SEQ ID NO: 5795 - protein, 506 aa, synthetic construct
MRTVITYLRFSSATQGAEGADSTRRQNDLFKQWLKKNSDAQVVASFSDEGLSGYKGKHLTGQFGDMLARIESGEFSKGTILLVESIDRIGRLEHLETEALMNRILGNGLEIHTLQDGLIYTKDALADDLGISIIQRVKAYIAHQESKQKSFRVSEKWKQRAKLALAGEQRLTKMVPGWIDPDTLKLNEHAETVRLIFKLLLSGESLHNIARHLQSNGIKSFSRRKDANGFSVHSVRTILRSETTIGTLPASQRNDRPAIPNYYEAAIDAATFNKAQEILDKNRKGRTPASDNPLTINIFKGLFRCQCGASVHPTGTKNKYAGVYRCNNNPDGRCDVPPLKRKPFDRWMIDNFLGMIDVGNDGEAEGKIASLQHEVEIVTARIKKATALLLEMDDITELKTQVKGLNQKRTELQTTIDNMRRKASLTDKELPQLKDIDLTTKAGRVECQLILSKHLKGLTLGKDSVIVTLQNDTEITIPTNPLPLNDGTSIFEIAEKELLEIDAYQL

SEQ ID NO: 5796 - protein, 547 aa, synthetic construct
MKLLVTYIRWSTKEQDSGDSLRRQTNLIDAFYSKHKNDYYLLPAHRYVDKGKSGFHQQHKNQGSDFRRMFENVMSGAIPEGSLIVVENFDRFSRADIDTAIDDVRQILRKGVSILTLGDGELYDKSALTDPVKLIKHIIIAERAHQESLVKQKRIAQVWNHKTQLARELKKPMGKQAPGWLELSDDGSHYIVDEDKASLVNIIYDKRLSGMSMFAICKWLNEQGYPTINQRKVRISKTKKPDGNWSALSVKHILTSRSVLGYLPAKISTEDRKTVLREEIESFYPQIVTDSKFYAVQQLLEETGKGKTSSGEHWLYVNILKGLIRCKCGLVMTPTGIRKPVYQGTYRCNGNKESRCNYGTVSRKLLDTQLCSRLFSKLSQLHDEATDTAKLDELQRRLNTVDSELEKLTETLIQLPNITQIQEALRVKQEEKDELIVQLSREKARVKSVSSLDLSGLDMESVEGRTEAQIIIKRLVKEIVVSGNEKLVDIYLHNGNMIRGFPLDGKDDHTLTLEEATDEMQSLDDMLIFGEPVTRIYPAGDMEEVDA

SEQ ID NO: 5797 - protein, 506 aa, synthetic construct
MRSVITYLRFSSATQGAEGADSTRRQNELFKQWLRKNSDAQVVASFNDEGLSGYKGKHLSGQFGDMLSRIESGEFSEGTVLLVEAIDRIGRLEHLETEALMNRIIAHGIEIHTLQDGLIYTRDALSDDLGISIIQRVKSYIAHQESKQKSFRVSQKWEQRAKLALAGEQRLTRNVPGWIDPDTFKCNEHAETVRLIFKLLLDGESLHNIARHLQSNDIKSFSRRKDANGFSVHSVRTVLRSESVIGTLPASQRNDRPAIPNYYEAAIDAATFNKAQEILDKNRKGRTPASDNPLTINIFKGLFRCQCGASVHPTGTKNKYAGVYRCNNHLDGRCDVPPLKRKPFDRWMIDNFLGMIDVGNDGESERKIAALQHEVEIVTARIKKATALLLEMDDITELKAQVKGLNQKRTEIQTTIDTLKRKTSLTDKELPQLKDIDLTTKAGRVECQLILSKHLKGLTLGKDTVTVTLQNDTEITIPTDPLPLNDGTSIFEIAEKNLLNIDTFQL

SEQ ID NO: 5798 - protein, 559 aa, synthetic construct
MKTKLYSYIRFSSMRQNDGSSYERQIRMAREVAAKYDLELVNDYQDLGVSAFKGANSKTGALSRFLDAIGRSVPVGSWLFIENLDRLSRADIVSAQELFLSIIRRGITIVTGMDNKIYSLDTVTANPMDLMFSILLFIRGNEESQTKRNRTNSSALIKIKSHQENPQNPAVAIEEVGKNMWWTDTTSGYVLPHPVYFPVVQEIVELRKNGRSTAEILDHLNETYTPPPAVSNKKHSKWSRAMVERLFHTRALIGIKEVSVDGVNYELKDYYPRVIDDATFYHLKKNIGARAWNFGDKEEVKPIPLLSGIGLLKCDHCGCAMVKVKGTNKRSDQYRYTCDATRSRRLDCEHPNWSFRGDQLEKAVLQLLADKIWIAEDKANPVPALKVQVDEISRKIDNLIALSAMTGATKELADQITTLNSERETLYNQIKMAEEEMYSVDSQGWEKLAEFDLEDVYNEERLKVRFKIKQALKRIGCSRIDRNKNLFVLEYIDGKTQRVVIENSRGTRKGQIFVDLKTINDRQILESNGLVLHPCLDMLTDKDWKPEEEIPGPLQEFGI

SEQ ID NO: 5799 - protein, 559 aa, synthetic construct
MKTKLYSYIRFSSMRQNDGSSYERQIRMAREIAAKYDLELVNDYQDLGVSAFKGANSKTGALSRFLDAIGRSVPVGSWLFIENLDRLSRADIVSAQELFLSIIRRGITIVTGMDNKIYSLDTVTANPMDLMFSILLFIRGNEESQTKRNRTNSSALIKIKSHQENPQNPAVAIEEVGKNMWWTDTTSGYVLPHPVYFPVVQEIVELRKNGRSTAEILDHLNETYTPPPAVSNKKHSKWSRAMVERLFHTRALIGIKEVSVDGVNYELKDYYPRVIDDATFYHLKKNIGARAWNFGDKEEVKPIPLLSGIGLLKCDHCGCAMVKVKGTNKRSDQYRYTCDATRSRRLDCEHPNWSFRGDQLEKAVLQLLADKIWIAEDKANPVPALKVQVDEISRKIDNLIALSAMTGATKELADQITTLNSERETLYNQIKMAEEEMYSVDSQGWEKLAEFDLEDVYNEERLKVRFKIKQALKRIGCSRIDRNKNLFVLEYIDGKTQRVVIENSRGTRKGQIFVDLKTINDRQILESNGLVLHPCLDMLTDKDWKPEEEIPGPLQEFGI

SEQ ID NO: 5800 - protein, 506 aa, synthetic construct
MRTVITYLRFSSAIQGAEGADSTRRQNDLFKQWLKKNSDAQVVASFSDEGLSGYKGKHLTGQFGDMLARIESGEFPEGTILLVEAIDRIGRLEHLETEALMNRIIAHGIEIHTLQDGLIYTRDALSDDLGISIIQRVKSYIAHQESKQKSFRVSQKWEQRAKLALAGEQRLTKMVPGWIDPDTFKCNEHAETVRLIFKLLLDGESLHNIARHLQANNISSFSRRKDANGFSVHSVRTILRSETTIGTLPASQRNDRPAIPNYYEAAIDAATFNKAQEILDKNRKGRTPASDNPLTINIFKGLFRCQCGASVHPTGTKNKYAGVYRCNNHLDGRCDVPPLKRKPFDRWMIDNFLGMIDVGNDGEAEGKIAALQHEVEIVTARIKKATALLLEMDDITELKTQVKGLNQKRTELQTTIDNMRRKASLTDKELPQLKDIDLTTKAGRVECQLILSKHLKGLTLGKDSVTVTLQNDTEITIPTDPLPLNDGTSIFEIAEKNLLNIDTFQL

SEQ ID NO: 5801 - protein, 507 aa, synthetic construct
MKRAISYIRFSSEKQSRGDSLRRQSKMVTDWLKAHPEYYLDQDLSFRDLGVSGFTGKHLKGGLGDFLTAIEKGLVKAGDTLLIESLDRLSRQAVDRASELLRNILRSGVDVVTLSDGEHYTSESLKDPLALIKSILIMQRAHEESLRKSERIQAAWDAKKEAAKAGIKVSKRCPAWLKLNDDRKSFSVIPDKVETVKRCFQLRLEGKSIWEIVRTLNDEGHQSMSQYKPGKFGQTSVQDLLKNRSVIGYFTPKGREEISGYYPAIIDETTFYKVQQLSYARYGRKPASDKPMAVNLFKGVIRCSECGHALIITGFSDTRNGIYRCPLRNENRCSAKGLSRKQTDGTLLALLSRLDRFDSDMANVIDSLKIHREHISSNIEKLVQLSLEIEDLNAITNKLKQLKNELSQVDADIEKETQRLKSIDVGCLSDCDLTTKAGRIEAQLIIKSAVKEVVLNTAKRRCKVTFHNGRAITLPITENPSEDVTEAIQSLSEVTERGLIDVDVVEI

SEQ ID NO: 5802 - protein, 506 aa, synthetic construct
MRTVITYLRFSSATQGAEGADSTRRQNELFKQWLRKNSDAQVVASFSDEGLSGYKGKHLTGQFGDMLARIESGEFSEGTVLLVEAIDRIGRLEHLETEALMNRIIAHGIEIHTLQDGLIYTRDALSDDLGISIIQRVKSYVAHQESKQKSFRVSQKWKQRAKLALAGEQRLTRNVPGWIDPDTFKCNEHAETVRLIFKLLLDGESLHNIARHLQSNDIKSFSRRKDANGFSVHSVRTVLRSESVIGTLPASQRNDRPAIPNYYEAAIDAATFNKAQEILDKNRKGRTPASDNPLTINIFKGLFRCQCGASVHPTGTKRTYQGVYRCNNHLDGRCDVQPLKRKPFDRWMIDNFLGMIDVGNDGESERKIAALQHEVEIVTARIKKATALLLEMDDIDELKIQLKELNQKRTELQTTIDNMRRKTSLTDKELPQLKDIDLTTKAGRVECQLILSKHLKGLTLGKDSVTVTLQNDTEITIPTNPLPLNDGSPIFEIADKELLDIDAYQL

SEQ ID NO: 5803 - protein, 506 aa, synthetic construct
MRTVITYLRFSSATQGAEGADSTRRQNELFKQWLRKNSDAQVVASFSDEGLSGYKGKHLTGQFGDMLARIESGEFSEGTVLLVEAIDRIGRLEHLETEALMNRIIAHGIEIHTLQDGLIYTRDALSDDLGISIIQRVKSYVAHQESKQKSFRVSQKWKQRAKLALAGEQRLTKMVPGWIDPDTFKCNEHAETVRLIFKLLLDGESLHNIARHLQANNISSFSRRKDANGFSVHSVRTILRSETTRGTLPASQRNDRPAIPNYYEAAIDAATFNKAQEILDKNRKGRTPASDNPLTINIFKGLFRCQCGASVHPTGTKNKYAGVYRCNSHLDGRCGVPPLKRKPFDKWMIDNFLGMIDVGNDGEAEKEIASLQHEVETVTARIKKATALLLEMDDIDELKIQLKELNQKRTELQTTIDSMRRKTSLTDKELPQLKDIDLTTKAGRVECQLILSKHLKGLTLGKDSVTVTLQNDTEITIPTNPLPLNDGTSIFEIAEKNLLNIDTFQL

SEQ ID NO: 5804 - protein, 506 aa, synthetic construct
MRHVITYLRYSSAIQGAEGADSTRRQNDLFKQWLKKNSDAQVVASFSDEGLSGYKGKHLTGQFGDMLARIESGEFPAGTILLVESIDRIGRLEHLETEALMNRILGNGIEIHTLQDGLIYTKDALADDLGISIIQRVKAYIAHQESKQKSFRVSQKWEQRAKLALAGEQRLTKMVPGWIDPDTFKCNEHAETVRLIFKLLLDGESLHNIARHLQANNISSFSRRKDANGFSVHSVRTILRSVTTIGTLPASQRNDRPAIPNYYEAAIDAATFNKAQEILDKNRKGRTPASDNPLTINIFKGLFRCQCGASVHPTGTKNKYAGVYRCNNHLDGRCDVPPLKRKPFDRWMIDNFLGMIDVGNDGEAEGKIAALQHEVEIVTARIKKATALLLEMDDITELKTQVKGLNQKRTELQTTIDNMRRKASLTDKELPQLKDIDLTTKAGRVECQLILSKHLKGLTLGKDSVTVTLQNDTEITIPTDPLPLNDGTSIFEIAEKELLEIDAYQL

SEQ ID NO: 5805 - protein, 541 aa, synthetic construct
MNFQNNDIDYSDASVTYQAVVYTRVSDRSQMIGASGLDSQETRGREYARHLGIPVVKVFSDQAISGKILDRPDVQDMLRFLRQVPKDTRYVVIIDDISRLARDVRVFFDLRDAIHKTGALLESPTMKFKHARDADGNYYEGIQALGAQYYREKIAETTRNRSWARLMKGYWTFHAPIGYKYIRSRTEGGLLVRDEPVASIVTEALEGYASGRFVIQAEVQRFLEDQPAFMRRKPNGKVRPQVVSDLLSQPLYAGYLESKIWDVPFRKALHEPLISLETYEKIKARRHSAAYAPARKDIREDFPLRGFVTCGDCEKPLTSCWSKSGTGKRYAYYLCHNKACGSYGKSIKRDQLEGDFEALLSSMRPAAPVVRMIAAMVKQAWANQNARMEDMRAELRKQIVSIEKKIDAATDRFVSIDSDITAKSLERKIESLEKERLQAQDRLQNGAKSKATPHQILELALTFLASPCKIWESGNLALQKLTLRLAFSEGLAYCRNEGFRTPKTTLPFKALSGFDTSKCKMVPGGGFEPPTRGFSIRCSTN

SEQ ID NO: 5806 - protein, 547 aa, synthetic construct
MKLLVTYIRWSTKEQDSGDSLRRQTNLIDAFYSKHKNDYYLLPAHRYVDKGKSGFHQQHKNQGSDFRRMFENVMSGAIPEGSLIVVENFDRFSRADIDTAIDDVRQILRKGVSILTLGDGELYDKSALTDPVKLIKHIIIAERAHQESLVKQKRIAQVWNHKTQLARELKKPMGKQAPGWLELSEDGSHYIVDEDKASLVNIIYDKRLSGMSMFAICKWLNEQGYPTINQRKVRISKTKKPDGNWSALSVKHILTSRSVLGYLPAKISTEDRKTVLREEIESFYPQIVTDSKFYAVQQLLEETGKGKTSSGEHWLYVNILKGLIRCKCGLVMTPTGIRKPVYQGTYRCNGNKESRCNYGTVSRKLLDTQLCSRLFSKLSQLHDEATDTAKLDELQRRLNTVDGELEKLTETLIQLPNITQIQEALRVKQEEKDEMIVQLSREKARVKSVSSLDLSGLDMESVEGRTEAQIIIKRLVKEIVVSGNEKLVDIYLHNGNMIRGFPLDGKDDHTLTLEEATDEMQSLDDMLIFGEPVTRIYPAGDMEEVDA

SEQ ID NO: 5807 - protein, 590 aa, synthetic construct
MKTVEKIERKLPVLKTRKRVAAYARVSMESERMQHSLSAQVSYYSALIQKNPEWEYAGVFADYGISGTGTKKREEFNRMLAECEAGNIDIILTKSIQRFARNTVDLLNTVRHLKDLGIEVRFEKENINSLSGDGELMLSILASFAQEESRSISENVKWGTIKRFKQGIPNGKFSIFGYEWQDDKLVIIPEEAEIIRWMYAEYMKGASRIEIGRALMDRGIYTRQGKPWVDSNVKVILTNITYTGNMLFQKEYCEDPITKHRRKNYGELPQYFVEDTHEAIIPMDEWQAVQAEFKRRRDLGPFGNKSLKLSAFSTKITCGCCGKHYRHSGKRNTAGEVYYIWTCQTKSQKGASACPSKNIPEKMLQNTTAEVLGLDEFDEDVFSQQIEEVIVIGDDTLIFRFYDGHEVTTKWQSTAKTDWWTDERRKLWGERHKRKDTNPNKHLFYEFTGFIKCGCCDANYRCQSGKRKDGTPTRSWYCTGPKDQCHNPGIRDETMKRLVTDVLGLDEFDEAAMDAQIENATILDHTVTFHFRDGHTESREFLDKRHGTPWTEERREKARESMKAAWTDERREAMSERIKKIRSEKKWPNP

SEQ ID NO: 5808 - protein, 523 aa, synthetic construct
MAKSVTTIPATLSRFTAAPINSTKKRRVAAYARVSTDNEEQLTSYEAQVDYYTNYIQGRDDWEFAGVYTDEGITGTNTKKREGFKSMVADALAGKIDLIITKSVSRFARNTVDSLTTIRSLKEHNVECYFEKEIIWTFDGKGELLLTIMSSLAQEESRSISENCTWGQRKRFADGKVTVPFNRFLGYDMGPDHNLVVNPEQAKLVKRIYGMFLQGQSPFQIARTLTEEGIPSPGGKDHWNPSNIKSILTNEKYKGDALLQKTFTVDFLTKKKKANEGEIPQYYVKDNHEAIIDPETFEMVQTLMATRKKGRNRKSSVSIFSSKVKCGDCDSWYGPKVWHSNDAYRKVIWQCNHKFDGQKCATPTLTEDEIKELFLRAANQVIDQKEQFIAIYEQVLSRSLDTTALESELSDLEAEINIAAELIEECIKENAHVALDQAEYQKRYDGLVSRFDKAKARHTKVTDLIAERTARRHQIETYLQELRSREPLTEFRETDWLAMVDYITVHSKNDIRVTFKDGTEIKA

SEQ ID NO: 5809 - protein, 506 aa, synthetic construct
MRTVITYLRFSSATQGAEGADSTRRQNDLFKQWLKKNSDAQVVASFSDEGLSGYKGKHLTGQFGDMLARIESGEFPGGTILLVESIDRIGRLEHLETEALMNRIIAHGIEIHTLQDGLIYTRDALSDDLGISIIQRVKSYIAHQESKQKSFRVSEKWKQRAKLALAGEQRLTKMVPGWIDPDTFKLNEHAETVRLIFKLLLSGESLHNIARHLQSNGIKSFSRRKDANGFSVHSVRTILRSETTIGTLPASQRNDRPAIPNYYEAAIDASTFNKAQEILGKNRIGRTPASDNPLTINIFKGLFRCQCGASVHPTGTKNKYQGVYRCNNHLDGRCDVPPLKRKPFDRWMIDNFLGMIDVGNDGEAEGKIASLQHEVEIVTTRIKKATALLLEMDDIDELKIQLKELNRKRTELQTTIDNMRRKTSLTDKELPQLKDIDLTTKAGRVECQLILSKHLKGLTLGKDSVIVTLQNDTEITIPTNPLPLHDGTSIFEIAEKELLEIDAYQL

SEQ ID NO: 5810 - protein, 502 aa, synthetic construct
MIQAFSYVRFSTKSQATGTSLERQLNASKLFCSQNNLVLSSKKYNDLGISGFKNVKRPELEQMLEAIESGDIPQGSFILIEAIDRLSRKGISHTQDVLKQILSKGVKVAFVGEDAKTLAGQILDKNSLNDLSSVILVALAADLAHKESVRKSKLIKSAKAIIRQKALDGKKVRGHTMFWITWNEQKNNFKLNDKTSVVQEIVELRLKGNGPRKIAEALNLKEIPSPSGKKWNHATISSVLRSHVLYGAYQTHQHIDGKAIPDVLIQNHYPAVINYETYLQLQSDGKKQTSGKPSKANPFSGILKCSCGQGMNFSRKVNTYNGVSKEYEYHFCLASTEGRCSNKKRIRDLVPILVNIMDKLSLKTVTRKNLHQEEITRKKEKIEQLNNMLIEMDNPPMSVFQTIQRLEKELEELYKENDKPEVSQQDVQLLSSIHDAQEYNMHLKRIVQRIVVYQLDKTGKNLRIKVLKIDGHWQNFLIKSGEVVFSADTARLKKLFSGMKED

SEQ ID NO: 5811 - protein, 506 aa, synthetic construct
MRHVITYLRYSSAIQGAEGADSTRRQNELFKQWLRKNSDAQVVASFSDEGLSGYKGKHLTGQFGDMLARIEAGEFPASTILLVESIDRIGRLEHLETEALMNRILGNGIEIHTLQDGLIYTKDALADDLGISIIQRVKAYIAHQESKQKSFRVSQKWEQRAKLALAGEQRLTKMVPGWIDPDTFKCNEHAETVRLIFKLLLDGESLHNIARHLQANNISSFSRRKDANGFSVHSVRTILRSETTIGTLPASQRNDRPAIPNYYEAAIDAATFNKAQEILDKNRKGRTPASDNPLTINIFKGLFRCQCGASVHPTGTKNKYAGVYRCNNHLDGRCDVPPLKRKPFDKWMLENFLGMIDVGNDGEAEGKIASLQHEVEIVTTRIKKATALLLEMDDIDELKIQLKELNQKRTELQTTIDNMRRKASLTDKELPQLKDIDLTTKAGRVECQLILSKHLKGLTLGKDSVTVTLQNDTEITIPTDPLPLNDGTSIFEIAEKNLLNIDAYQL

SEQ ID NO: 5812 - protein, 507 aa, synthetic construct
MKRVISYIRFSSEKQAKGDSLRRQSKMVTDWLKAHPEYYLDQDLSFRDLGVSGFTGKHLKGGLGDFLTAIEKGLVKAGDTLLIESLDRLSRQDVDQASELLRNILRSGVDVVTLSDGEHYTRESLKDPLALIKSILIMQRAHEESLRKAERIQAAWNRKKELISEGIKVSRRCPAWLRLNDDRKSFSVIPEKVETVKRCFQLRLEGKSIWEIVRTLNDEGHQTLNQYKAGKFGQTSVQDLLKNRSVIGYFTPKGCCEIAGYYPSIIPESDFYTVQQLSYARGGRKPASGKPLSVNLFKGVIRCSECGHALIITGFSDTRNGIYRCPLRNENRCNAKGLSRKQTDGTLLALLSRIDRFDSDMTNTIDTLKLHREHISSNIEKLVQLSLEIEDLSAITSKLKQLKGELSQVDADIEKETQRLKSIDVGCLSDCDLTTKAGRIEAQLIIKSAVKEVVLNTAKRRCKVTFHNGKVIDLPITEDPSEDVTEAIQSLSEVTERGLIDVDEVII

SEQ ID NO: 5813 - protein, 507 aa, synthetic construct
MKRVISYIRFSSEKQAKGDSLRRQSKMVTDWLKAHPEYYLDESLTFRDLGVSGFTGKHLKGGLGDFLTAIEKGLVKAGDTLLIESLDRLSRQAVDRASELLRNILRSGVDVVTLSDGEHYTSESLKDPLALIKSILIMQRAHEESLRKSERIQAAWDAKKEAAKAGIKVSKRCPAWLRLNDDRKSFSVIPEKVETVKRCFQLRLEGKSIWEIVRTLNDEGHQSMSQYKPGKFGQTSVQDLLKNRSVIGYFTPKGCEEIAGYYPAIIDETTFYKVQQLSYARHGRKPASAKPLSVNLFKGVIRCSECGHALIITGFSDTRNGIYRCPLRNENRCSAKGLSRKQTDGTLLALLSRLDRFDSDTTNTVDMLRLHREHISSNIEKLVQLSLEIEDLSAITIKLKQLKGELSQVDADIEKETQRLKSIDVGCLSDCDLTTKAGRIEAQLIIKSAVKEVVLNTAKRRCKVTFHNGKSITLPITENPSEDVTEAIQSLSEVTERGLIDVDVVAI

SEQ ID NO: 5814 - protein, 506 aa, synthetic construct
MRSVITYLRYSSAIQGAEGADSTRRQNDLFKQWLKKNGDAQIVASFSDEGLSGYKGKHLTGQFGDMLARIEAGEFPEGTILLVESIDRIGRLEHLETEALMNRILGNGIEIHTLQDGLIYTKDALADDLGISIIQRVKAYIAHQESKQKSFRVSQKWGQRAKLALAGEQRLTKMVPGWIDPETFKLNEHAETVRLIFKLLLDGESLHNIARHLQSNGIKSFSRRKDANGFSVHSVRTILRSETTIGTLPASQRNDRPAIPNYYEGVVDIPTFNKAQEILDKNRKGRTPASDNPLTINIFKGLFRCQCGASVHPTGTKNKYAGVYRCNNHLDGRCDVQPLKRKPFDKWVLENFLGMIDVGNDGESERKIAALQHEVEIVTARIKKATALLLEMDDITELKTQVKGLNQKRTEIQTTIDTLKRKTSLSDKGLPQLKDIDLMTKAGRVECQLILSKHLKGLTLGKDSVTVRLQNDTEITIPTNPLPLNDGSPIFEIADKELLDIDAYQL

SEQ ID NO: 5815 - protein, 507 aa, synthetic construct
MKRVISYIRFSSEKQAKGDSLRRQSKMVTDWLKAHPEYYLDQDLSFRDLGVSGFTGKHLKGGLGDFLTAIEKGLVKAGDTLLIESLDRLSRQDIDIASELLRNILRSGVDVVTLSDGEHYTRESLKDPLSLIKSILIMQRAHEESLRKSERIQAAWNRKKELISEGIKVSKRCPAWLRLNDDRKSFSVIPEKVETVKRCFQLRLEGKSIWEIVRTLNAEGHQSMSQYKPGKFGQSSVQDLLKNRSVIGYFTPKGCEEIAGYYPAIIDETTFYKVQQLSYARYGRKPASDKPLSVNLFKGVIRCSECGHALIITGFSDTRNGIYRCPLRNENRCSAKGLSRKQTDGTLLALLSRLDRFDSDTTNTIDMLRLHREHISSNIEKLVQLSLEIEDLSAITSKLKQLKNELSQVDADIEKETQRLKSIDVGCLSDCDLTTKAGRIEAQLIIKSAVKEVVLNTAKRRCKVTFHNGKVIDLSITENPSEDVTEAIQSLSEVTERGLIDVDEVII

SEQ ID NO: 5816 - protein, 509 aa, synthetic construct
MRRAISYIRFSSERQLKGDSVRRQSKLVTDWLDKNPEFYLDSSLSFKDLGKSAFSGKHLKGGLGDFLTAIEKGLVKAGDTLLIESLDRLSRQDIDIASELLRRILRAGVDVVTLSDGEHYTRESLKDPLSLIKSILIMQRAHEESLRKSERVQAAWNRKKELISEGIKVSRRCPAWLRLNDDRRTFTIIPDKVEVVKRAFDLRLQGLSFWAITRTLNDEGHLSLNQYTPKQKGWSDTAVKKLLRNRAVIGCFTPAGREEVQGYYPAIISESLFYRVQQLNTGQYGRASVSSNPLSVNLFRGIIKCSECGATIVLGGYALKRFGMYRCPNRSANRCSAKAISRKQTDATILYMLALCDRFETENTDTIDSLKLQREDLQRKISKMAELAIELDDMTIITEKLRDMKNALSKLNHDIEEETKRIKAITTGSLKDIDRTTKEGMIETQLLIKGVLKEIVIDAAKRRCKVTFHNGKSIDLPITENPSEDVTEAIQSLSEVTERGLIDVDVVAI

SEQ ID NO: 5817 - protein, 547 aa, synthetic construct
MKLLVTYIRWSTREQDSGDSLRRQTNLIDAFYSKHKEEYYLLPAHKYIDKGKSGFHQQHKNQGSDFRRMFDNVMSGTIPEGSLIVVENFDRFSRADIDTAIDDVRQILRKGVSILTLGDGELYDKSALTDPVKLIKHIIIAERAHQESLVKQKRIAQVWNHKTQLARELKKPMGKQAPGWLELSEDGSHYIVDEDKASLVNIIYDKRLSGMSMFAICKWLNEQGYPTINQRKVRISKTKKPDGNWSALSVKHILTSRSVLGYLPAKVSSEDRKTVLREEIESFYPQIVTDSKFYAVQQLLEETGKGKTSSGEHWLYVNILKGLIRCKCGLVMTPTGIRKPVYQGTYRCNGNKESRCSYGTVSRKLLDTQLCSRLFSKLSQLHDEATDTAKLDELQRRLNTVDSELEKLTETLIQLPNITQIQEALRVKQEEKDELIVQLSREKARVKSVSSLDLSGLDMESVEGRTEAQIIIKRLVKEIVVSGNEKLVDIYLHNGNMIRGFPLDGKDDHTLTLEEATDEMQSLDDMLIFGEPVTRIYPAGDMEEVDA

SEQ ID NO: 5818 - protein, 628 aa, synthetic construct
MRKNEKITALYERLSRDDFGKDDDQQRESNSISNQKAMLEEFAARQGFTNIVHFTDDGISGTCFDRPGFLAMMKEVEAGNVEYLCIKDMSRMGRDYLKVGQIMEILRQRGVRLIAINDGVDSARGDDDFTPFRNIMNEYYARDTSRKIRSTFQSKGKSGKHLTGTVIYGYLWNEARDQWLVDPEAAEVVKRIFAMTIEGYGPYQIASKLKSEKVLIPSAYLAQHGEGVNKNKTFKDVYGWGSSTICNILEKREYLGHTINFKTRKHFKDKKSHYVPEDEWTIFENTHEPIIDQQTFDLVQKIRGNVRRYPDGWGEAAPLTGLLYCADCGGKMYVHRTNNGKRISQYTCSQYSKVPVGKLCTTQHRINEDVVLSLVSEMLKAIAEYAKHDRAEFVRVVQEAQSSQQTAEVKKQRIRLATAKQRVSELEVLLCKIYEDNILGKLSDSRYATLDAQYEKEQSELTAEISALEKAVKSYEKHEKDADRFIALIDKYENFDKLTIAMLNEFIEKILVHERDRKGSIQTTQEVEIYFNFVGRFVPPAFGEVELTPEELEEIRKREERKDRLHQNYLKRKASGAQKRYEDKIKGRKKAEIEAKKAAIRAEDIAKGVFVPVSSLPQREPQKGAQIA

SEQ ID NO: 5819 - protein, 547 aa, synthetic construct
MKLLVTYIRWSTREQDSGDSLRRQTNLIDAFYSKHKNDYYLLPAHRYVDKGKSGFHQQHKNQGSDFRRMFENVMSGAIPEGSLIVVENFDRFSRADIDTAIDDVRQILRKGVSILTLGDGELYDKSALTDPVKLIKHIIIAERAHQESLVKQKRIAQVWNHKTQLARELKKPMGKQAPGWLELSEDGSHYIVDEDKASLVNIIYDKRLSGMSMFAICKWLNEQGYPTINQRKVRISKTKKPDGNWSALSVKHILTSRSVLGYLPAKISTEDRKTVLREEIEGFYPQIVTDSKFYAVQQLLEETGKGKTSSGDHWLYVNILKGLIRCKCGLVMTPTGIRKPVYQGTYRCNGNKESRCSYGTVSRKLLDTQLCSRLFSKLSQLHDEATDTAKLDELQRRLNTVDSELEKLTETLIQLPNITQIQEALRVKQEEKDELIVQLSREKARVKSVSSLDLSGLDMESVEGRTEAQIIIKRLVKEIVVSGNEKLVDIYLHNGNMIRGFPLDGKDDHTLTLEEATDEMQSLDDMLIFGEPVTRIYPAGDMEEVDA

SEQ ID NO: 5820 - protein, 547 aa, synthetic construct
MKLLVTYIRWSTKEQDSGDSLRRQTNLIDAFYAKHKDDYYLLPAHRYVDKGKSGFHQQHKAQGSDFRRMFENVMSGVIPEGSLIVVENFDRFSRADIDTAIDDVRQILRKGVSILTLGDGELYDKSALTDPVKLIKHIIIAERAHQESLVKQKRIAQVWNHKTQLARELKKPMGKQAPGWLELSEDGSHYIVDEDKASLVNIIYDKRLSGMSMFAICKWLNEQGYPTINQRKVRISKTKKPDGNWSALSVKHILTSRSVLGYLPAKISTEDRKTVLREEIESFYPQIVTDSKFYAVQQLLEETGKGKTSSGEHWLYVNILKGLIRCKCGLVMTPTGIRKPVYQGTYRCNGNKESRCSYGTVSRKLLDTQLCSRLFSKLSQLHDEATDTAKLDELQRRLNTVDSELEKLTETLIQLPNITQIQEALRVKQEEKDELIVQLSREKARVKSVSSLDLSGLDMESVEGRTEAQIIIKRLVKEIVVSGNEKLVDIYLHNGNMIRGFPLDGKDDHTLTLEEATDEMQSLDDMLIFGEPVTRIYPAGDMEEVDA

SEQ ID NO: 5821 - protein, 506 aa, synthetic construct
MRSVITYLRFSSAIQGAEGADSTRRQNDLFKQWLKKNSDAQVVASFSDEGLSGYKGKHLTGQFGDMLARIEAGEFSEGTVLLVEAIDRIGRLEHLETEALMNRIIAHGIEIHTLQDGLIYTRDALSDDLGISIIQRVKSYVAHQESKQKSFRVSQKWKQRAKLALAGEQRLTRNVPGWIDPDTFKCNEHAETVRLIFKLLLSGESLHNIARHLQANNISSFSRRKDANGFSVHSVRTVLRSESVIGTLPASQRNDRPAIPNYYEAAIDAATFNKAQEILDKNRKGRTPASDNPLTINIFKGLFRCQCGASVHPTGTKNKYAGVYRCNNNPDGRCDVPPLKRKPFDKWMIDNFLGMIDVGNDGEAEGKIASLQHEVEIVTARIKKATALLLEMDDIDELKIQLKELNQKRTELQTTIDNMRRKASLTDKELPQLKDIDLTTKAGRVECQLILSKHLKGLTLGKDTVTVTLQNDTEITIPTDPLPLNDGTSIFEIAEKNLLNIDTFQL

SEQ ID NO: 5822 - protein, 507 aa, synthetic construct
MKRAISYIRFSSEKQSRGDSLRRQSKMVNDWLKAHPEYYLDQDLSFRDLGVSGFTGKHLKGGLGDFLTAIEKGLVKAGDTLLIESLDRLSRQDVDQASELLRNILRSGVDVVTLSDGEHYTKESLKDPLALIKSILIMQRSHEESLRKSERIQAAWDAKKEAAKAGIKIYKRCPAWLKLNDDRKTFSVIPEKVETVKRCFQLRLEGKSIWEIVRTLNDEGHQTLNQYKAGKFGQTSVQDLLKNRSVIGYFTPKGCEEIAGYFPPIIPETDFYKVQQLSYSRYGRKPASDKPLSVNLFKGVIRCSECGHALIITGFSDTRNGIYRCPLRNENRCSAKGLSRKQTDGTLLALLSRIDRFDSDMTNTIDTLKLHREHISSNIEKLVQLSLEIEDLSAITSKLKQLKGELSQVDADIEKETQRLKSIDVSCLSDCDLTTKAGRIEAQLIIKSAVKEVILNTAKRRCKVTFHNSKSITLPITETPSEDVTEAIQSLSEVTERGLIDVDEVII

SEQ ID NO: 5823 - protein, 547 aa, synthetic construct
MKLLVTYIRWSTKEQDSGDSLRRQTNLIDAFYSKHKNDYYLLPAHRYVDKGKSGFHQQHKNQGSDFRRMFENVMSGAIPEGSLIVVENFDRFSRADIDTAIDDVRQILRKGVSILTLGDGELYDKSALTDPVKLIKHIIIAERAHQESLVKQKRIAQVWNHKTQLARELKKPMGKQAPGWLELSEDGSHYIVDEDKASLVNIIYDKRLSGMSMFAICKWLNEQGYPTINQRKVRISKTKKPDGNWSALSVKHILTSRSVLGYLPAKISTEDRKTVLREEIEGFYPQIVTDSKFYAVQQLLEETGKGKTSSGEHWLYVNILKGLIRCKCGLVMTPTGIRKPVYQGTYRCNGNKESRCSYGTVSRKLLDTQLCSRLFSKLSQLHDEATDTAKLDELQRRLNTVDSELEKLTETLIQLPNITQIQEALRVKQGEKDELIVQLSREKARVKSVSSLDLSGLDMESVEGRTEAQIIIKRLVKEIVVSGNEKLVDIYLHNGNMIRGFPLDGKDDHTLTLEEATDEMQSLDDMLIFGEPVTRIYPAGDMEEVDA

SEQ ID NO: 5824 - protein, 598 aa, synthetic construct
MNKIIPYGYLRVSSLEQVRTGGGLDTQDEEVRRYITQNSEKFDIDRMVVMSDAGMSAYTGSNIKEGELGRFLADVNAGLIPTGSALICYSVDRLSRQNPWVGTHLISTLIGAGIEIHSVAENQILRSDDPVGAIMSTIYLMRANNESVIKSERAKKGYEKRLNESITNKKVLTRQMPRWLFDCDGKYAIDPNMQNVINFTFDSYIAGQSTGFIAKELNNRGLMYGNTSWRGSYVAKLIRDERLIGKHIRYSKQIKGVKRVVIETIPNFYPVVVDVEKFFLANNMLTSVAKNIRGRTRVTYGDDSILRNLFNGVIKCGVCGGDTSVVQNTRKKIVNGEATYIPYKTFLRCRTRYELKNCVQSDIRYEVIERAILNHLIGLDISALLSVPVDNKIESYRTELELCKAEEVELHTLIEQREREGKRVRPRTIKAYEDVSDRIDELNKLIESYVEDTFVPDFNVDLNSIADVSNVSDRSLIKKGIATIADSICYKRISDFILVEIKYRNLSVKHVLVIDNKQSKVVVNFSIEYHENSHDYTCNGFILKYVKSPEEFHLMGVNIEDYAHMMNFVDFISDNEAKKIKEYLVSNLSRVLISNVPE

SEQ ID NO: 5825 - protein, 507 aa, synthetic construct
MKRVISYIRFSSEKQAKGDSLRRQSKMVTDWLKAHPEYYLDESLTFRDLGVSGFTGKHLKGGLGDFLTAIEKGLVKAGDTLLIESLDRLSRQDIDIASELLRRILRAGVDVVTLSDGEHYTRESLKDPLSLIKSILIMQRAHEESLRKSERIQAAWNRKKELISEGIKISKRCPAWLRLNDDRKSFSVIPDKVETVKRCFQLRLEGKSIWEIVRTLNDEGHRSMNQYKPGKFGQTSVQDLLKNRSVIGYFTPKGREEVAGYYPAIIDETTFYKVQQLSHSRYGRKPVSAKPLSVNLFKGVIRCSECGHALIITGFSDTRNGIYRCPLRNENRCSAKGLSRKQTDGTLLALLSRLDRFDSDTTNIIDTLKLHREHISSNIEKLVQLSLEIEDLSAITSKLKQLKGELSQVDADIEKETQRLKSIDVGCLSDCDLTTKAGRIEAQLIIKSAVKEVVLNTAKRRCKVTFHNGKSITLPITENPSEDVTEAIQSLSEVTERGLIDVDVVEI

SEQ ID NO: 5826 - protein, 547 aa, synthetic construct
MKLLVPYIRWSTKEQDSGDSLRRQTNLIDAFYAKHKDDYYLLPAHRYVDKGKSGFHQQHKAQGSDFRRMFENVMSGVIPEGSLIVVENFDRFSRADIDTAIDDVRQILRKGVSILTLGDGELYDKSALTDPVKLIKHIIIAERAHQESLVKQKRIAQVWNHKTQLARELKKPMGKQAPGWLELSEDGSHYIVDEDKASLVNIIYDKRLSGMSMFAICKWLNEQGYPTINQRKVRISKTKKPDGNWSALSVKHILTSRSVLGYLPAKISTEDRKTVLREEIEGFYPQIVTDSKFYAVQQLLEETGKGKTSSGEHWLYVNILKGLIRCKCGLVMTPTGIRKPVYQGTYRCNGNKESRCSYGTVSRKLLDTQLCSRLFSKLSQLHDEATDTAKLDELQRRLNTVDGELEKLTETLIQLPNITQIQEALRVKQEEKDELIVQLSREKARVKSVSSLDLSGLDMESVEGRTEAQIIIKRLVKEIVVSGNEKLVDIYLHNGNMIRGFPLDGKDDHTLTLEEATDEMQSLDDMLIFGEPVTRIYPAGDMEEVDA

SEQ ID NO: 5827 - protein, 547 aa, synthetic construct
MKLLVTYIRWSTKEQDSGDSLRRQTNLIDAFYSKHKNDYYLLPAHRYVDKGKSGFHQQHKAQGSDFRRMFENVMSGAIPEGSLIVVENFDRFSRADIDTAIDDVRQILRKGVSILTLGDGELYDKSALTDPVKLIKHIIIAERAHQESLVKQKRIAQVWNHKTQLARELKKPMGKQAPGWLELSEDGSHYIVDEDKASLVNIIYDKRLSGMSMFAICKWLNEQGYPTINQRKVRISKTKKPDGNWSALSVKHILTSRSVLGYLPAKISSEDRKTVLREEIEGFYPQIVTDSKFYAVQQLLEETGKGKTSSGDHWLYVNILKGLIRCKCGLVMTPTGIRKPVYQGTYRCNGNKESRCSYGTVSRKLLDTQLCSRLFSKLSQLHDEATDTAKLDELQRRLNTVDSELEKLTETLIQLPNITQIQEALRVKQEEKDELIVQLSREKARVKSVSSLDLSGLDMESVEGRTEAQIIIKRLVKEIVVSGNEKLVDIYLHNGNMIRGFPLDGKDDHTLTLEEATDEMQSLDDMLIFGEPVTRIYPAGDMEEVDA

SEQ ID NO: 5828 - protein, 606 aa, synthetic construct
MKKVFVYHRVSSDQQLDGSGIARQAELLEAYLKRTNILAEMDDPEPVIITESGGVSAFKGHNMLITSGLGAWMQEVRAAMWDGSHLVYENGDRFSRQNPFTVIGYINDLINHNITIHDATMNIIISRQNSAMLPMVLMNAQRAYDESKYKSDRIRKGWAKKREQAFNKGTIVTNKRPQWIEVEKDKYVLNEKAAVVKEIFALYQTGMGCPTIAKKLQGKEGEQYKFNRPWTGELVHKILTNRRVTGKIFISETIRNHADIENPVTQKKYNMDVYPVVINEEEFELVQELLKSRRPNAGRVTVKKDGQEEVLIKSNLFSGIARCTECGGPMYHNVVRAKRTPKKGDPKIEEYRYIRCLNERDGLCENKAMTYETVERFVVEHLLGMDLSTVMKEQEFNPEIEVLRIQIDQVKEQITNYENGIERRKSAGKIITFDMREDLDDAKSELERLLARQASLATVQVDVAVLQDVNVTELYNVNNVDIRTRYENELNKIVSTIRLKRNGTSYTIDISYKQNELKRHVLFVENKKKEQTLISEVIIEDVDGGKFYYTPSFMIRLEDGEIRFQHTNEDLSIVDYSLLLNYVDAVDRNDTVGVWMRNQFNFLTSN

SEQ ID NO: 5829 - protein, 581 aa, synthetic construct
MPQLYSYIRWSSDRQDKGTTKSRQVAAAKAYAEEAGLELVEIIDPGVSAFRGKNRAGKLGDFIDAVKNNAIPSDSWLYCENLDRLSRDQVDEALRLFLELIGLGLTIVTGMDRKVYNRESIRQNPTDLMISILMFIRGNEESETKSHRTIGNVVALVERHKNGLPVNIKSVGRHPFWIDDSGSQYEAVKKHPVYWSIAREALDMFISGHGVYSVKRALDKKYPNGLRGKEWDYQVLKKMRDNRALIGERTIKVDGQSYKLCNYYPALCKDETEFLILAEKKKQNKFISKKCTTDKIRLLSGFSILRCSKCGGTMHSFMNKNVHRYICTNGTHKQKNCSGWSVIGSLVEHCTMIALLIGYINQSRKNGCDTTSIDEDIINKQSVIEGLNSKITNLTLAISIAKDVNELATLLQSLNTQREKLLVEIEKLKERSVSLKAKGSFEIEITDFLILIQYATFKNLEDENRNKIRKVIHSIIEFIVIDKTDSCITIYIKCYGIDEVFIFGGVQRKPYWRFDIGIINDSKLQMISNYDKNIGRTKERKNKEYLDGLRESYQGLYESAVLMLNEMGYPDINGALFWPNR

SEQ ID NO: 5830 - protein, 559 aa, synthetic construct
MKTKLYSYIRFSSMRQSDGSSYERQIRMAREIAAKYDLELVNDYQDLGVSAFKGANSKTGALSRFLDAIGRSVPVGSWLFIENLDRLSRADIVSAQELFLSIIRRGITIVTGMDNKIYSLDTVTANPMDLMFSILLFIRGNEESQTKRNRTNSSALIKIKAHQENPQNPAVAIEEVGKNMWWTDTTSGYVLPHPVYFPVVQEIVELRKNGRSTAEILDHLNETYAPPPAVSNKKHSKWSRAMVERLFHTRALIGIKEISVDGVNYELKDYYPRVIDDPTFYHLKKNIGARAWNFGDKEEVKPIPLLSGIGLLKCDHCGCAMVKVKGTNKRSDQYRYTCDATRSRRLDCEHPNWSFRGDQLEKAVLQLLADKIWIAEDKANPVPALKVQVDEISRKIDNLIALSAMTGATKELADQITTLNSERKTLYNQIKMAEEEMYSVDSQGWEKLAEFDLEDVYNEERLKVRFKIKQALKRIGCSRIDRNKNLFVLEYIDGKTQRVVIENSRGTRKGQIFVDLKTINDRQILESNGLVLHPCLDMLTDKNWKPEEEIPGPLQEFGI

SEQ ID NO: 5831 - protein, 507 aa, synthetic construct
MKRAISYIRFSSEKQSRGDSLRRQSKMVNDWLKAHPEYYLDQDLSFRDLGVSGFTGKHLKGGLGDFLTAIEKGLVKAGDTLLIESLDRLSRQAVDRASELLRNILRSGVDVVTLSDGEHYTSESLKDPLALIKSILIMQRAHEESLRKSERIQAAWDAKKEAAKAGIKVSKRCPAWLRLNDDRKSFSVIPEKVETVKRCFQLRLEGKSIWEIVRTMNAEGHQTLHQHKAGSFGQSSVQDLLKNRSVIGYFTPKGCEEIAGYYPAIIDETTFYKVQQLSYARHGRKPVSDKPLSVNLFKGVIRCSECGHALIITGFSDTRNGIYRCPLRNENRCSAKGLSRKQTDGTLLALLSRLDRFDSDMTNVIDTLKLHREHISNNIEKLVQLSLEIEDLSAITIKLKQLKGELSQVDADIEKETQRLKSIDVGCLSDCDLTTKAGRIEAQLIIKSAVKEVVLNTAKRRCKVTFHNGKSIILSITENPSDNVTEAIQSLSEVTERGLIDVDVVEI

SEQ ID NO: 5832 - protein, 507 aa, synthetic construct
MKRVISYIRFSSERQAKGDSLRRQSKMVNDWLKAHPEYYLDQDLSFRDLGVSGFTGKHLKGGLGDFLTAIEKGLVKAGDTLLIESLDRLSRQDIDIASELLRNILRSGVDVVTLSDGEHYTRESLRDPLSLIKSILIMQRAHEESLRKSERIQAAWNRKKELISEGIKISKRCPAWLKLNDDRKSFSVIPDKVETVKRCFQLRLEGKSIWEIVRTLNAEGHQTLNQYKAGKFGQTSVQDLLKNRSVIGYFTPKGCEEISGYYPAIIDETTFYKVQQLSHSRYGRKPVSAKPLSVNLFKGVIRCSECGHALIITGFSDTRNGIYRCPLRNENRCSAKGLSRKQTDGTLLALLSRLDRFDSDTTNTLDTLKLHREHISSNIEKLVQLSLEIEDLSAITSKLRQLKGELSQVDADIEKETQRLKSIDVGCLSDCDLTTKAGRIEAQLIIKSAVKEVVLNTAKRRCKVTFHNGKVIDLSITETPSEDVTEAIQSLSEVTERGLIDVDEVII

SEQ ID NO: 5833 - protein, 507 aa, synthetic construct
MKRVISYIRFSSEKQAKGDSLRRQSKMVTDWLKAHPEYYLDQDLSFRDLGVSGFTGKHLKGGLGDFLTAIEKGLVKAGDTLLIESLDRLSRQDVDQASELLRNILRSGVDVVTLSDGEHYTSESLKDPLALIKSILIMQRAHEESLRKAERIQAAWDAKKEAAKAGIKVSRRCPAWLRLNDDRKSFSVIPEKVETVKRCFQLRLEGKSIWEIVRTLNAEGHQTLNQYKAGKFGQTSVQDLLKNRSVIGYFTPKGCEEISGYYPAIIDETTFYKVQQLSHYRYGRKPVSDKPLSVNLFKGVIRCSECGHALIITGFSDTRNGIYRCPLRNENRCNAKGLSRKQTDGTLLALLSRLDRFDSDTTNTIDTLKLHREHISNNIEKLVQLSLEIEDLNAITSKLKQLKGELSQVDADIEKETQRLKSIDVGCLSDCDLTTKAGRIEAQLIIKSAVKEVVLNTAKRRCKVTFHNGKVIDLPITENPSEDVTEAIQSLSEVIERGLIDVDVVEI

SEQ ID NO: 5834 - protein, 474 aa, synthetic construct
MKCIVYVRVSTEEQAKHGYSIAAQLEKLEAYCISQGWELTEKYVDEGYSAKDLHRPYFEKMMNKIKQGNVDILLVYRLDRLTRSVMDLYKILKILDDNNCMFKSATEVYDTTNAMGRLFITLVAAIAQWERENLGERVRLGMEKKTKLGIWKGGTPPYGYKIVDKHLVINEEEQDVVKTVFELSKTLGFYTVAKQLTIKGFSTRKGGEWHVDSVRDIANNPVYAGYLTFNQNLKEYKKPPREQTLYEGNHEPLISKDEFWALQDILDKRRTFGGKRETSNYYFSSILKCGRCGHSMSGHKSGNKKTYRCSGKKAGKNCSSHIILEDNLVKKVFHVFDQIVGSINGPTNATEYSFEKVLELENELKSIERILNKQKIMYENDIIGIDELITKSTELREREKKINNELKNIKQNTPKNQKEIEYLTKNIESLWQHANDYERKQMITMIFSRIVIDTEDEYKRGSGNSREIIIVSAE

SEQ ID NO: 5835 - protein, 507 aa, synthetic construct
MKRVISYIRFSSEKQAKGDSLRRQSKMVTDWLKAHPEYYLDQDLSFRDLGVSGFTGKHLKGGLGDFLTAIEKGLVKAGDTLLIESLDRLSRQAVDRASELLRNILRSGVDVVTLSDGEHYTRESLRDPLSLIKSILIMQRSHEESLRKSERIQAAWDAKKEAAKAGIKVSKRCPAWLRLNDDRKSFSVIPDKVETVKRCFQLRLEGKSIWEIVRTLNAEGHRSMNQYKPGKFGQTSVQDLLKNRSVIGYFTPKGCEEIAGYYPSVIDETTFYKVQQLSHSRYGRKPASAKPLSVNLFKGVIRCSECGHALIITGFSDTRNGIYRCPLRNENRCSAKGLSRKQTDGTLLTLLSRLDRFDSDMTNTIDTLKLHREHISSNIEKLVQLSLEIEDLNAITNKLKQLKNELSQVDADIEKETQRLKSIDTGSLSDCDLSTKAGRIEAQLIIKSAVKEVVLNTAKRRCKVTFHNGKVIDLSITENPSEDVTEAIQSLSEVTERGLIDVDEVII

SEQ ID NO: 5836 - protein, 543 aa, synthetic construct
MGKNGARVYSYLRFSDPRQATGSSADRQLAYASAWASKHGMELDATLTLRDEGLSAYHETHVKQGALGAFLRAVDEGRIPVGSVLIVEGLDRLSRAEPLLAQAQLGQIVNAGITVVTASDGREYNREGLKAEPMNLVYSLLVMIRAHEESDTKSKRVKAAVRRQCEAWVTGSYRGRIVSGKDPQWLAWDGDSWQFIPERVEAVRFALDAYRSGIGAARLVRLMHEKGMVLSDWGIAAQQVYRLVRLPALRGAKRISIDGEDFMLEDYYPRLLSDEEFSELETLVGQRYRRRGKDEIVGIVTGIGITRCGYCGTALVAQNLMQRVKADGSLEDGHRRLHCVSYSKNGGCNGGSCSSVPIERAVLAYCSDQMNLQRLLEPSSAGEDLRLRLVEAQKGVAEIERQLGRVTDALLADDSGAAPLAFVRKARELEEDLERRRSAVQALEQELVAKSASAPAAGASKWAELAERAKSMADAEAREQARQLVMDTFETLVVYTRGVIPNPKGRYIDVMMKSRAGQTRWIRVDRRTGVWKEGADRPTTRRP

SEQ ID NO: 5837 - protein, 538 aa, synthetic construct
MSNFNMTPNQPPAKCYSYVRFSTVSQGKEGKDSYIRQTLAAKEYAARTGLEYQDKSFSDLGISGFRTSKKRDGLSSMLEAIQSGAIEPNSTICIDGFDRLSRASFEHTYDTVRLIVGTGVKLHVVQDNLTLDKSSLNDLISIVKVALQSDLAHKESAKKSYLIKQSRLRAREAHKVTGKLPMWISRVLDSKGEPTDQFVFNSFETCIRELVSLRVEGKSLQSIAKVLNNKEYKTSKGSPWSGAGVRSIIENRALYGAKSYHDTDSETGRMNLTPVDIVPNIFPALISFGLWQSIQQKSRSASTKTNKVSKRGAYSGLLRCGSCGAAMVMRTTTYTPKGTGAPEVRMYRKCIRSTEGSCGQVEIVREPETYIDMALSNLKYVTSEKRHVSKVPEIQEQITTLEKTEDILLQRGMAEKLADLYVKIDDLKSKLVDALKEDSRHTTPTETSFAKVIEIEDLEHRNMVLRKLLNGVYFTLLWKYKTQSKWKVTIEQINGLKTTFILSQKHGFGNSHIELLADPLRWTNLVQSDLEPWELDQC

SEQ ID NO: 5838 - protein, 561 aa, synthetic construct
MTYLSGISSPLQPKASLRAALYLRVSTGRQAEHDLSIPDQKRQIETYCSAKGWEVAVVFIEPGASATDDRRPEFQKLMEAAAEKPKRFDVVLVHSFSRFFRDHFELEFNVRRLAKQDIRLVSITQELGDDPSAVMMRQIMALFDEYQSRENAKHTLRAMNENARQGFWNGSRPPFGYRTVEAERRGQKIKKKLEIDPIQSETVRLIFRLYRYGDGQSGGLGIKAIVSHLNAKGNRTQTGSRFSCKFIHDVLTRETYAGRHTFNVVEAKTGRKKASDEVITIKAPVIISRSEFLEVQQRLKQNAPRVTAPRIVNGPCLLTGLAVCATCGGGMTLRTGKYGRYRYYTCATQARQGKTACKGRSIRMDLLDTLVMEHLATRLLTKDRLGVILEALLTQYAANQNRDAARQESLRHASREAEQKLQRMYAAIENGVVDATDPTLRGRLDALKAQRDETSRLCARAEAPAMVVPVITDEMIERFSRDLRAKLADGPVDMRKEYLRAIVDRIEVDDREIRIFGRKDRLMNQLVSDRPKLNPKVPSFGREWCPIGDSNPCCRRERAVS

SEQ ID NO: 5839 - protein, 506 aa, synthetic construct
MRSVITYLRYSSAIQGAEGADSTRRQNDLFKQWLKKNSDAQVVASFSDEGLSGYKGKHLTGQFGDMLARIESGEFPEGTILLVESIDRIGRLEHLETEALMNRILGNGLEIHTLQDGLIYTKDALADDLGISIIQRVKAYIAHQESKQKSFRVSQKWEQRAKLALAGEQRLTKMVPGWIDPDTFKLNEHAETVRLIFKLLLDGESLHNIARHLQANNISSFSRRKDANGFSVHSVRTILRSETTIGTLPASQRNDRPAIPNYYEAAIDASTFNKAQEILDKNRKGRTPASDNPLTINIFKGLFRCQCGASVHPTGTKNKYQGVYRCNSHLDGRCDVPPLKRKPFDRWMIDNFLGMIDVGNDGEAEKEIASLQHEVETVTARIKKATALLLEMDDITELKTQVKELNQKRTELQTTINTMKRKTSLSDKGLPQLKDIDLMTKAGRVECQLILSKHLKGLTLGKDSVTVTLQNDTEIIVPTDPLPLNDGTSIFEIAEKELLEIDAYQL

SEQ ID NO: 5840 - protein, 506 aa, synthetic construct
MRSVITYLRYSSAIQGAEGADSTRRQNDLFRQWLKKNIDAQVVASFSDEGLSGYKGKHLSGQFGDMLSRIESGEFPEGTILLVESIDRIGRLEHLETEALMNRIIAHGIEIHTLQDGLIYTRDALSDDLGISIIQRVKSYVAHQESKQKSFRVSQKWKQRAKLALAGEQRLTRNVPGWIDPDTFKCNEHAETVRLIFKLLLDGESLHNIARHLQSNDIKSFSRRKDANGFSVHSVRTVLRSESVIGTLPASQRNDRPAIPNYYEAAIDAATFNKAQEILDKNRKGRTPASDNPLTINIFKGLFRCQCGASVHPTGTKNKYAGVYRCNNHLDGRCDVPPLKRKPFDRWMIDNFLGMIDVGNDGESERKIAALQHEVEIVTARIKKATALLLEMDDITELKAQVKGLNQKRTEIQTTIDTLKRKTSLTDKELPQLKDIDLTTKAGRVECQLILSKHLKGLTLGKDSVTVTLQNDTEITIPTNPLPLNDGSPIFEIADKELLDIDAYQL

SEQ ID NO: 5841 - protein, 506 aa, synthetic construct
MRHVITYLRYSSAIQGAEGADSTRRQNDLFKQWLKKNSDAQVVASFNDEGLSGYKGKHLSGQFGDMLSRIESGEFSEGTILLVEAIDRIGRLEHLETEALMNRIIAHGIEIHTLQDGLIYTRDALSDDLGISIIQRVKSYLAHQESKQKSFRVSQKWEQRAKLALAGEQRLTKMVPGWIDPETFKLNEHAETVRLIFKLLLDGESLHNIARHLQANNISSFSRRKDANGFSVHSVRTILRSETTIGTLPASQRNDRPAIPNYYEAAIDAATFNKAQEILDKNRKGRTPASDNPLTINIFKGLFRCQCGASVHPTGTKNKYAGVYRCNNHLDGRCDVPPLKRKPFDKWMIDNFLGMIDVGNDGEAEGKIASLQHEVEIVTARIKKATALLLEMDDIDELKIQIKELNQRRTELQTTIDSMRRKASLTDKELPQLKDIDLTTKAGRVECQLILSKHLKGLTLGKGSVTITLQNDTEITIPTNPLPLNDGSPIFEIADKELLDIDAYQL

SEQ ID NO: 5842 - protein, 446 aa, synthetic construct
MRRGISYIRFSSERQLKGDSVRRQSKLVTDWLDKNPEFYLDSSLSFKDLGKSAFSGKHLKGGLGDFLTAIEKGLVKAGDTLLIESLDRLSRQDIDIASELLRRILRAGVDVVTLSDGEHYTKESLKDPQSLIKSILIMQRAHEESLRKSERVQAAWNRKKELISEGIKISRRCPAWLKLNDDRRTFTIIPDKVEVVKRAFDLRLQGLSFWAITRTLNDEGHLSLNQYTPKQKGWSDTAVKKLLRNRAVIGCFTPAGREEVQGYYPAIISESLFYRVQQLNTGQYGRASVSSNPLSVNLFRGIIKCSECGATIVLGGYALKRFGMYRCPNRSANRCSAKAISRKQTDATILYMLALCDRFETENTDTIDSLKLQREDLQRKISKMAELAIELDDMTIITEKLRDMKNALSKLNHDIEEETKRIKAITTGSLKDIDRTTKEGMVETQS

SEQ ID NO: 5843 - protein, 507 aa, synthetic construct
MKRVISYIRFSSERQAKGDSLRRQSKMVNDWLKAHPEYYLDQDLSFRDLGVSGFTGKHLKGGLGDFLTAIEKGLVKAGDTLLIESLDRLSRQDVDQASELLRNILRSGVDVVTLSDGEHYTKESLRDPLSLIKSILIMQRAHEESLRKAERIQAAWDAKKEAAKAGIKISRRCPAWLKLNDDRKSFSVIPEKVETVKRCFQLRLEGKSIWEIVRTLNAEGHQTLNQYKAGKFGQTSVQDLLKNRSVIGYFTPKGCEEISGYYPAIIDETTFYKVQQLSYARYGRKPASDKPMAVNLFKGVIRCSECGHALIITGFSDTRNGIYRCPLRNENRCSAKGLSRKQTDGTLLALLSRLDRFDSDMTNTIDTLKLHREHISSNIEKLVQLSLEIEDLSAITSKLRQLKNELSQVDADIEKETQRLKSIDVGCLSDCDLTTKAGRIEAQLIIKSAVKEVVLNTAKRRCKVTFHNGKVIDLSITENPSEDVTEAIQSLSEVTERGLIDVDEVII

SEQ ID NO: 5844 - protein, 547 aa, synthetic construct
MKLLATYIRWSTREQDSGDSLRRQTNLIDAFYSKHKNDYYLLPAHRYVDKGKSGFHQQHKNQGSDFRRMFENVMSGAIPEGSLIVVENFDRFSRADIDTAIDDVRQILRKGVSILTLGDGELYDKSALTDPVKLIKHIIIAERAHQESLVKQKRIAQVWNHKTQLARELKKPMGKQAPGWLELSEDGSHYIVDEDKASLVNIIYDKRLSGMSMFAICKWLNEQGYPTINQRKVRISKTKKPDGNWSALSVKHILTSRSVLGYLPAKISSEDRKTVLREEIEGFYPQIVTDSKFYAVQQLLEETGKGKTSSGDHWLYVNILKGLIRCKCGLVMTPTGIRKPVYQGTYRCNGNKESRCSYGTVSRKLLDTQLCSRLFSKLSQLHDEATDTAKLDELQRRLNTVDSELEKLTETLIQLPNITQIQEALRVKQEEKDELIVQLSREKARLKSVSSLDLSGLDMESVEGRTEAQIIIKRLVKEIVVSGNEKLVDIYLHNGNMIRGFPLDGKDDHTLTLEEATDEMQSLDDMLIFGEPVTRIYPAGDMEEVDA

SEQ ID NO: 5845 - protein, 547 aa, synthetic construct
MKLLATYIRWSTKGQDSGDSLRRQTNLIDAFYSKHKNDYYLLPAHRYVDKGKSGFHQQHKNQGSDFRRMFENVMSGAIPEGSLIVVENFDRFSRADIDTAIDDVRQILRKGVSILTLGDGELYDKSALTDPVKLIKHIIIAERAHQESLVKQKRIAQVWNHKTQLARELKKPMGKQAPGWLELSEDGSHYIVDEDKASLVNIIYDKRLSGMSMFAICKWLNEQGYPTINQRKVRISKTKKPDGNWSALSVKHILTSRSVLGYLPAKISTEDRKTVLREEIESFYPQIVTDSKFYAVQQLLEETGKGKTSSGEHWLYVNILKGLIRCKCGLVMTPTGIRKPVYQGTYRCNGNKESRCSYGTVSRKLLDTQLCSRLFSKLSQLHDEATDTAKLDELQRRLNTVDSELEKLTETLIQLPNITQIQEALRVKQEEKDELIVQLSREKARVKSVSSLDLSGLDMESVEGRTEAQIIIKRLVKEIVVSGNEKLVDIYLHNGNMIRGFPLDGKDDHTLTLEEATDEMQSLDDMLIFGEPVTRIYPAGDMEEVDA

SEQ ID NO: 5846 - protein, 507 aa, synthetic construct
MKRVISYIRFSSERQAKGDSLRRQSKMVNDWLKAHPEYYLDQDLSFRDLGVSGFTGKHLKGGLGDFLTAIEKGLVKAGDTLLIESLDRLSRQAVDRASELLRNILRSGVDVVTLSDGEHYTSESLKDPLALIKSILIMQRAHEESLRKSERIQAAWDAKKEAAKAGIKVSKRCPAWLRLNDDRKSFSVIPEKVETVKRCFQLRLEGKSIWEIVRTLNAEGHQTLNQYKAGSFGQTSVQDLLKNRSVIGYFTPKGCEEISGYYPSIIHETDFYKVQQLSYARYGRKPASDKPLSVNLFKGVIRCSECGHALIITGFSDTRSGIYRCPLRNENRCSAKGLSRKQTDGTLLTLLSRLDRFDSDTTNIIDMLRLHREHISSNIEKLVQLSLEIEDLNAITSKLKQLKGELSQVDADIEKETQRLKSIDMGCLSDCDLTTKAGRIEAQLIIKSAVKEVVLNTAKRRCKVTFHNGKAITLPITENPSEDVTEAIQSLSEVTERGLIDVDEVII

SEQ ID NO: 5847 - protein, 506 aa, synthetic construct
MRSVITYLRFSSAIQGAEGADSTRRQNDLFKQWLRKNSDAQVVASFSDEGLSGYKGKHLTGQFGDMLARIEAGEFLAGTILLVESIDRIGRLEHLETEALMNRIIAHGIEIHTLQDGLIYTRDALSDDLGISIIQRVKSYLAHQESKQKSFRVSEKWKQRAKLALAGKQRLTKMVPGWIDPDTLKLNEHAETVRLIFKLLLSGESLHNIARHLQSNGIKSFSRRKDANGFSVHSVRTILRSETTIGTLPASQRNDRPAIPNYYEAAIDAATFNKAQEILDKNRKGRTPASDNPLTINIFKGLFRCQCGASVHPTGTKNKYAGVYRCNNHLDGRCDVPPLKRKPFDKWMIDNFLGMIDVGNDGEAEGKIASLQHEVEIVTARIKKATALLLEMDDIDELKIQIKELNQRRTELQTTIDSMRRKASLTDKELPQLKDIDLTTKAGRVECQLILSKHLKGLTLGKGSVTITLQNDTEITIPTNPLPLNDGSPIFEIADKELLDIDAYQL

SEQ ID NO: 5848 - protein, 506 aa, synthetic construct
MRSVITYLRFSSAIQGAEGADSTRRQNDLFKQWLKKNSDAQVVASFSDEGLSGYKGKHLTGQFGDMLARIESGEFPEGTLLLVEAIDRIGRLEHLETEALMNRIIAHGIEIHTLQDGLIYTRDALSDDLGISIIQRVKSYVAHQESKQKSFRVSQKWKQRAKLALAGEQRLTKMVPGWIDPDTFKCNEHAETVRLIFKLLLDGESLHNIARHLQANNISSFSRRKDANGFSVHSVRTILRSETTIGTLPASQRNDRPAIPNYYEAAIDAATFNKAQEILDKNRKGRTPASDNPLTINIFKGLFRCQCGASVHPTGTKRTYQGVYRCNNHLDGRCDVPPLKRKPFDKWMIDNFLGMIDVGNDGEAEGKIASLQHEVEIVTARIKKATALLLEMDDIDELKIQIKELNQRRTELQTTIDSMRRKASLTDKELPQLKDIDLTTKAGRVECQLILSKHLKGLTLGKDSVTVTLQNDTEITIPTNPLPLNDGSPIFEIADKELLDIDAYQL

SEQ ID NO: 5849 - protein, 550 aa, synthetic construct
MVMMERISPPPQRAGTRKVAAYARISMETDRTPKSLSAQISHYSELIQSTPGWEYAGVFADSGISGTTTNRPQFQAMLDRARTGEIDLILTKSISRFARNTVDLLETIRELKTLGVEVRFEKENISTFSADGELVLTLLASFAQAESEQISQNVKWRVRKGFEQGKANGFHLYGYTDSADATDVEIVEAEAEVVRLVYRNYLANISCEQTAAQLEADGVRSRAGEPIRPETLRSWLRMETYTGTLTLGRWVKGRLGEHSKPNTGEADMYRVENAIPAIIDHETFQAVQEERTRRRSLGARANKAIPTTTFTHMVYCLACEKYYRSSVNVAYDGSRRRKWVCATNREKGHGCASKRIPQPSLEQVVCEALNLEAFNEDVFAKLVQRIDVPDSDTAIVVLKNGTTSTHTLHYPSYRKDHWNTPGYRERHSQKLRAYWANLTDEERATISKQRSKTRQAEPAEKKTSRSNRAKAAWTPERRARQSEIAKRVNAQLGEEGRRERSRKAQQAIAADPSVAERKRRKMLDHWANPDYRTSTTAAMKGSKRTTKVGE

SEQ ID NO: 5850 - protein, 506 aa, synthetic construct
MRHVITYLRYSSAIQGAEGADSTRRQNDLFKQWLKKNSDAQVVASFNDEGLSGYKGKHLSGQFGDMLSRIESGEFPEGTILLVEAIDRIGRLEHLETEALMNRIIAHGIEIHTLQDGLIYTRDALSDDLGISIIQRVKSYIAHQESKQKSFRVSQKWEQRAKLALAGEQRLTRNVPGWIDPDTFKCNEHAETVRLIFKLLLSGESLHNIARHLQSNGIKSFSRRKDANGFSVHSVRTILRSETTIGTLPASQRNDRPAIPNYYEAAIDASTFNKAQEILGKNRIGRTPASDNPLTINIFKGLFRCQCGASVHPTGTKNKYQGVYRCNNHLDGRCDVPPLKRKPFDRWMIDNFLGMIDVGNDGEAEGKIASLQHEVEIVTTRIKKATALLLEMDDIDELKIQLKELNQKRTELQTTIDNMRRKASLTDKELPQLKDIDLTTKVGRVECQLILSKHLKGLTLGKDSVTVTLQNDTEITIPTNPLPLNDGSPIFEIADKELLDIDAYQL

SEQ ID NO: 5851 - protein, 507 aa, synthetic construct
MKRVISYIRFSSEKQAKGDSLRRQSKMVTDWLKAHPEYYLDQDLSFRDLGVSGFTGKHLKGGLGDFLTAIEKGLVKAGDTLLIESLDRLSRQDVDQASELLRNILRSGVDVVTLSDGEHYTRESLRDPLALIKSILIMQRAHEESLRKAERIQAAWDAKKEAAKAGIKVSKRCPAWLKLNDDRKSFSVIPEKVETVKRCFQLRLEGKSIWEIVRTLNDEGHQSMSQYKPGSFGQSSVQDLLKNRSVIGYFTPKGREEIAGYFPPIIPETDFYKVQQLSYSRYGRKPASDKPLSVNLFKGVIRCSECGHALIITGFSDTRNGIYRCPLRNENRCSAKGLSRKQTDGTLLALLSRLDRFDSDTTNIIDMLRLHREHVSSNIEKLVQLSLEIEDLNAITSKLKQLKGELSQVDADIEKETQRLKSIDVGCLSDCDLTTKAGRIEAQLIIKSAVKEVVLNTAKRRCKVTFHNGKSITLPITENPSEDVTEAIQSLSEAIERGLIDVDVVEI

SEQ ID NO: 5852 - protein, 452 aa, synthetic construct
MKAAIYIRVSTQEQIENYSIQAQTEKLTALCRSKDWETYDIFIDGGYSGSNMNRPALNEMLSKLHEIDAVVVYRLDRLSRSQRDTITLIEEYFLKNNVEFVSLSETLDTSSPFGRAMIGILSVFAQLERETIRDRMVMGKIKRIEAGLPLTTAKGRTFGYDVIDTKLYINEEEAKQLQMIYDIFEEEKSITTLQKRLKKLGFKVKSYSSYNNWLTNDLYCGYVSYADKVHTKGVHEPIISEEQFYRVQEIFSRMGKNPNMNRDSASLLNNLVVCGKCGLGYVHRRKDTVSRGKKYHYRYYSCKTYKHTHELEKCGNKIWRADKLEELIIDRVNNYSFASGNVDKEDELDSLNEKLKTEHAKKKRLFDLYISGSYEVSELDVMMADIDAQINYYEAQIEANEELKKNKKIQENLADLATVDFDSLEFREKQLYLKSLINKIYIDGEQVTIEWL

SEQ ID NO: 5853 - protein, 452 aa, synthetic construct
MKAAIYIRVSTQEQIENYSIQAQTEKLTALCRSKDWDVYDIFIDGGYSGSNMNRPALNEMLSKLHEIDAVVVYRLDRLSRSQRDTITLIEEYFLKNNVEFVSLSETLDTSSPFGRAMIGILSVFAQLERETIRDRMVMGKIKRIEAGLPLTTAKGRTFGYDVIDTKLYINEEEAKQLQMIYDIFEEEKSITALQKRLKKLGFKVKSYSSYNNWLTNDLYCGYVSYADKVHTKGVHEPIISEEQFYRVQEIFSRMGKNPNMNRDSASLLNNLVVCGKCGLGYVHRRKDTVSRGKKYHYRYYSCKTYKHTHELEKCGNKIWRADKLEELIIDRVNNYSFASRNVDKEDELDSLNEKLKTEHAKKKRLFDLYISGSYEVSELDGMMADIDAQINYYEAQIEANEELKKNKKIQKNLADLATVDFDSLEFREKQLYLKSLINKIYIDGEQVTIEWL

SEQ ID NO: 5854 - protein, 507 aa, synthetic construct
MKRVISYIRFSSEKQAKGDSLRRQSKMVTDWLKAHPEYYLDQDLSFRDLGVSGFTGKHLKGGLGDFLTAIEKGLVKAGDTLLIESLDRLSRQAVDRASELLRNILRSGVDVVTLSDGEHYTRESLRDPLSLIKSILIMQRSHEESLRKSERIQAAWDAKKEAAKAGIKISRRCPAWLKLNDDRKSFSVIPEKVETVKRCFQLRLEGKSIWEIVRTLNAEGHRSMNQYKPGKFGQTSVQDLLKNRSVIGYFTPKGCEEISGYYPAIIDETTFYKVQQLSYSRYGRKPASDKPMAVNLFKGVIRCSECGHALIITGFSDTRSGIYRCPLRNENRCSAKGLSRKQTDGTLLALLSRLDRFDSDMTNTVDTLKLHREHISSNIEKLVQLSLEIEDLSAITSKLKQLKGELSQVDADIEKETQRLKSIDVGCLSDCDLTTKAGRIEAQLIIKSAVKEVVLNTAKRRCKVTFHNGRAITLPITENPSEDVTEAIQSLSEVTERGLIDVDEVII

SEQ ID NO: 5855 - protein, 600 aa, synthetic construct
MKRADLYIRVSTDEQADKGYSQRDQEERLRRYCSSHNINVGQIIYEDHSAKSFNRPEWTKLLTTLKKKSSKTNLVLFTKWDRFSRNAGDAYQMINILTKLGIEPQAVEQPLDLSIPENKMMLAIYLAAPEVENDRRALNTFYGMRRAKKEGRVMGNAPFGYANRSREDGSKYIAIYEPEATIMRIAFDEIAMGIYAPDQIRQKILRTGKKMLGRNAFHVAIRNAVYCGKVFIPKYGDEEATFVKGQHEPLITEALFDKVQDILDGNKRKTVPNTKILSDVNLPLRGYLICPECGRNLTGSASKGRNNRYYYYHCIASCGFRQKAEKTNQIFEQGLTQFDLNEGNKDILKKMILINYNQFVKENPQTDKRKIATEIDKLNGKLSVARDKLLSDIMDDEEYLELKKEYKEKIEKLEGQLAKNETLDLTEQSVNRKLNKALDIAQNISNLYIQGEIEVKRTLIGSIFPEKLEFDGTRYRTARINSIFGYIFQKNNELYKNKNRKSEHFSCFSCVVPSAGIEPARLAALEFESSASTNSANWATRNCECKYRNIFVPEKSFFQKLKNNFQPVIRQLNMGWQLFIHFIVKTNMMAQMGEESLRRF

SEQ ID NO: 5856 - protein, 506 aa, synthetic construct
MRTVITYLRFSSATQGAEGADSTRRQNELFKQWLRKNSDAQVVASFSDEGLSGYKGKHLTGQFGDMLARIEAGEFPSGTILLVESIDRIGRLEHLETEALMNRILGNGIEIHTLQDGLIYTKDALADDLGISIIQRVKAYIAHQESKQKSFRVSQKWEQRAKLALAGEQRLTKMVPGWIDPDTFKCNEHAETVRLIFKLLLSGESLHNIARHLQANNISSFSRRKDANGFSVHSVRTVLRSESVIGTLPASQRNDRPAIPNYYEAAIDAATFNKAQEILDKNRKGRTPASDNPLTINIFKGLFRCQCGASVHPTGTKNKYAGVYRCNNHLDGRCDVPPLKRKPFDKWMIDNFLGMIDVGNDGEAEGKIASLQHEVEIVTTRIKKATALLLEMDDITELKTQVKELNQKRTELQTTIDNMRRKASLTDKELPQLKDIDLTTKAGRVECQLILSKHLKGLTLGKDSVTVTLQNDTEIIVPTDPLPLNDGSPIFEIADKELLDIDAFRL

SEQ ID NO: 5857 - protein, 479 aa, synthetic construct
MRGVIYARYSPGPHQTEQSIEGQVADCQQYAEEHGIDIIEIYADRHVSGKSVVGRDEFQRMLRDAEKGRFDCVMVWKIDRFGRDRQDIAMGKMALKRAGVKLMYARESVPEGPEGIILESVLEGLAEYYSADLRQKVIRGMKETAKKGQYCGQPLPIGYKVDSQRHVVIDEREAAAVREAFKMHIAGAQLRDIVQLFADRGVMGRRGKPVSNAVVYRMLRNEKYLGEFYIQDVKLNVEPIIDQATFLEAAQHFKTSRNNAAGRAKVNYLLSCKMFCGYCGSMISAEAGTGKLGKVYRYYKCGDKKRGKKCELKPFPKDHLEDAIILATVNDMLTDEMIEKLTVRILEVQEQENADDPVVGLRRRLDSNKKRQRNLLDAIEEGGARGLVSRLAALEEEEEQLVLEIQRAEIKRPRLTHEVVEAWLRSFRVGDVTDDDFRARLVDTFIARVELRNDEALIFYNIREKGPHSRVRVRPEWWS

SEQ ID NO: 5858 - protein, 626 aa, synthetic construct
MRNEKITPLYERLSRDDELQGESNSISNQKQMLEDFARRNGLPNPTHFTDDGISGTRFDRPGFLAMMEEVEAGRVEAIVIKDMSRLGRDYLKVGQVMEILRQRGVRLIAINDGVDSLKGDDDFTPFRNIMNEFYARDTSRKIRSVFKSKGMSGKHLTGTVIYGYLWDEKREHWLVDEEATEVVRRIFSLTLEGYGPYQIACKLSADRIEIPVVHLARFNEGVNRSKPVKDPYGWGSSTIVNILKKREYLGHTINFKTRKHFKDKKSHYVSEDEWTIFENTHEAIIDQQTFDLAQKIRSNVRRYPNGWGEAAPLTGLLYCADCGGKMYVHRINNGRRISQYTCSNYTKVPCGTLCPTQHRINESAVLTLVSDTLRAIAEYSRNDRTEFIHTVQETQVAQQSADISKKRRRLAAAQKRTGELEKLICKIYEDNALGKLSDARYRALDAQYAKEQDALEIEIAELEKAVTGYEQSQKSAEKFIALIDKYENFDTLTNTMLNEFVEKILVHERARKGSQDTTQEIEIYFNFLGRYIPPSLQPVPLTPEEQEELQKKEERKDRLHQNYLKRKASGAQKQYEDKIKAKKKAEMDAKKALIRAEDMKKGVFSTVGQLPKEEPRKGSIAASAAV

SEQ ID NO: 5859 - protein, 506 aa, synthetic construct
MRTVITYLRFSSATQGAEGADSTRRQNELFKQWLRKNSDAQVVASFNDEGLSGYKGKHLSGQFGDMLSRIESGEFPEGTILLVEAIDRIGRLEHLETEALMNRIIAHGIEIHTLQDGLIYTRDALSDDLGISIIQRVKSYLAHQESKQKSFRVSEKWKQRAKLALAGKQRLTKMVPGWIDPDTLKLNEHAETVRLIFKLLLSGESLHNIARHLQANNISSFSRRKDANGFSVHSVRTVLRSESVIGTLPASQRNDRPAIPNYYEAAIDAATFNKAQEILDKNRKGRTPASDNPLTINIFKGLFRCQCGASVHPTGTKNKYAGVYRCNSHLDGRCDVPPLKRKPFDKWMIDNFLGMIDVGNDGEAEGKIASLQHEVEIVTTRIKKATALLLEMDDITELKTQVKELNQKRTELQATIDSMRRKTSLSDKGLPQLKDIDLMTKEGRVECQLILSKHLKGLTLGKDSVTVTLQNDTEITIPTNPLPLNDGTSIFEIADKELLDIDAFRL

SEQ ID NO: 5860 - protein, 559 aa, synthetic construct
MKTKLYSYIRFSSMRQNDGSSYERQIRMAREVAAKYDLELVNDYQDLGVSAFKGANSKTGALSRFLDAIGRSVPVGSWLFIENLDRLSRADIVSAQELFLSIIRRGITIVTGMDNKIYSLDTVTANPMDLMFSILLFIRGNEESQTKRNRTNSSALIKIKAHQENPQNPAVAIEEVGKNMWWTDTTSGYVCPDPVYFPIVQEIVELRKNGRSTSEILNYLNETYTPPPAVSNKKHSKWPRAMIGRLFHTRALIGIKEVSVDGVKYELNNYYPRVIDDATFYHLKKNIGARAWNFGDKEEVKPIPLLSGIGLLKCEHCSSAMIKVKGTNKRADQYRYSCEGIRSHRFDCEHPNWSFRGDQLEKAVLQLLADKIWIAEDKANPVPALKVQIDEISRKIDNLINLSAMTGATKELADQITTLNNERETLYNQIKMAEEEMYSVDSQGWEKLAEFDLEDVYNEERIKVRFKIKQALKRIGCSRIDRNKNLFVLEYVDGKTQRVVIENSRGTRKGRIFIDLKTINDRQILESNGLVLHPCLDMLTDKNWKPEEEIPGPLQEFGI

SEQ ID NO: 5861 - protein, 547 aa, synthetic construct
MKLLATYIRWSTREQDSGDSLRRQTNLIDAFYSKHKNDYYLLPAHRYVDKGKSGFHQQHKAQGSDFRRMFENVMSGVIPEGSLIVVENFDRFSRADIDTAIDDVRQILRKGVSILTLGDGELYDKSALTDPVKLIKHIIIAERAHQESLVKQKRIAQVWNHKTQLARELKKPMGKQAPGWLELSEDGSHYIVDEDKASLVNIIYDKRLSGMSMFAICKWLNEQGYPTINQRKVRISKTKKPDGNWSALSVKHILTSRSVLGYLPAKISTEDRKTVLREEIESFYPQIVTDSKFYAVQQLLEETGKGKTSSGDHWLYVNILKGLIRCKCGLVMTPTGIRKPVYQGTYRCNGNKESRCSYGTVSRKLLDTQLCSRLFSKLSQLHDEATDTAKLDELQRRLNTVDSELEKLTETLIQLPNITQIQEALRVKQEEKDELIVQLSREKARVKSVSSLDLSGLDMESVEGRTEAQIIIKRLVKEIVVSGNEKLVDIYLHNGNMIRGFPLDGKDDHTLTLEEATDEMQSLDDMLIFGEPVTRIYPAGDMEEVDA

SEQ ID NO: 5862 - protein, 481 aa, synthetic construct
MITTNKVAIYVRVSTTNQAEEGYSIEEQKDKLSSYCNIKDWSIYNIYTDGGFSGSNTARPALENLIKDAKKKKFDTVLVYKLDRLSRSQKDTLYLIEEVFIKNGIEFLSLQENFDTSTPFGKAMIGLLAVFAQLEREQIKERMQLGKLGRAKSGKPMMWSKPAYGYIYHKESGELIVNELEAIVVREIFKSYLEGMSITKLRDKVNEKYPKTPAWHYRIIRGILANPVYCGYNQYKGQVFPGNHEPIISEEIYNKTQEELKIRQRTAAEKFNPRPFQAKYMLSGIAQCGYCHAPLTIIMGMIRKDGTRFIRYECKQRYPRKTKGVTVYNNNEKCHSGAYEKSNIEEYVLKEISKLQNDKDYLDEIFSDSNTETIDRESYQKQIEELSKKLSKLNDLYIDDRITLEDLKKKSYEFTSMRTLLETELENDPALKKQKRKDDMKKILSAEDIFSMDYEGQKIMVRGLINKVQVTADDVFIKWKI

SEQ ID NO: 5863 - protein, 571 aa, synthetic construct
MMQDRTAPASTNRVAIYIRVSTTHQIDKDSLPMQRQDLIAYAKLMLNTDDYVIFEDAGYSGKNTDRPKFQEMMSQIRQGAFSHLLVWKIDRISRNLLDFATMYKELKDLGVVFVSKNEQFDTSTAMGEAMLKIILVFAELERNMTSERVTATMISRASNGQWNGGRVPYGYNYDYETKDFSINPIEAEIVRLIHDKYEEMRSLVRESRYLNEKGLRTRAGNLWNPVSLHIILHNIFYCGDYRYNVLKEGDRQKVKDESEWITVEDHHEPIISREQKERVIAMLDANKRLDRKRNTYQSEKYVHVFAGLLYCGNCGKPMGATPAAAKKDWRYSKYTCPTRRKLASACNGKFTSDPIVGEFVFNYVLNMLNVQKNFADIHSPEELQAALLIGNTFSYIDHIDEDGLNDLFNMLSSGKIKGTVFGKSAKLKKKKVVSELSKLRNEKQKIERALDRLTKLYLYAEDAMPESEFIIQKSKLTEALDEVNEQIGFSNTDEWNQSVSDEEFVRRASEFIIAQKLTDRNYVSYKRLATSVDTAVIKTFVQGIIDSIIMDAGQVKQIIFKNGLSHTFIFK

SEQ ID NO: 5864 - protein, 507 aa, synthetic construct
MKRVISYIRFSSEKQAKGDSLRRQSKMVNDWLKAHPEYYLDQDLSFRDLGVSGFTGKHLKGGLGDFLTAIEKGLVKAGDTLLIESLDRLSRQDIDIASELLRNILRSGVDVVTLSDGEHYTRESLRDPLALIKSILIMQRAHEESLRKAERIQAAWDAKKEAAKAGIKVSKRCPAWLKLNDDRKSFSVIPEKVETVKRCFQLRLEGKSIWEIVRTLNDEGHQSMSQYKPGKFGQTSVQDLLKNRSVIGYFTPKGCEEIAGYYPAIIDETTFYKVQQLSHSRYGRKPVSAKPLSVNLFKGVIRCSECGHALIITGFSDTRNGIYRCPLRNENRCSAKGLSRKQTDGTLLALLSRLDRFDSDMTNVIDALKLHREHISNNIEKLVQLSLEIEDLSAITIKLKQLKGELSQVDADIEKETQRLKSIDVGCLSDCDLTTKAGRIEAQLIIKSAVKEVVLNTAKRRCKVTFHNGRAITLPITENPSEDVTEAIQSLSEVTERGLIDVDEVII

SEQ ID NO: 5865 - protein, 477 aa, synthetic construct
MITTRKVAIYVRVSTTNQAEEGYSIQGQIDSLIKYCEAMGWIIYEEYTDAGFSGGKIDRPAMSKLITDAKHKRFDTILVYKLDRLSRSVRDTLYLVKDVFNQNNIHFVSLQENIDTSSAMGNLFLTLLSAIAEFEREQITERMTMGKIGRAKSGKTMAWTYTPFGYDYNKEKGELILDPAKAPIVKMIYTDYLKGMSIQKIVDKLNKMDYNGKDCTWFPHGVKHLLDNPVYYGMTRYNNKLFPGNHQPIITKELFDKTQRERQRRRLGIEENHYTIPFQAKYMLSKFLRCRQCGSRMGLELGRPRKKEGKRSKKYYCLNSRPKRTASCDTPLYDAETLEDYVLHEIAKIQKDPSIASRQKHIEDHELKYKRERIEANINKTVNQLSKLNNLYLNDLITLEDLKTQTNTLIAKKRLLENELDKTCDNDDELDRQETIADFLALPDVWTMDYEGQKYAVELLVQRVKVDRDNIDIHWTF

SEQ ID NO: 5866 - protein, 506 aa, synthetic construct
MRHVITYLRYSSAIQGAEGADSTRRQNDLFKQWLKKNSDAQVVASFNDEGLSGYKGKHLSGQFGDMLSRIESGEFSEGTILLVEAIDRIGRLEHLETEALMNRILGNGIEIHTLQDGLIYTKDALADDLGISIIQRVKAYIAHQESKQKSFRVSQKWGQRAKLALAGKQRLTKMVPGWIDPETFEVNEHAETVRLIFKLLLDGESLHNIARHLQANNISSFSRRKDANGFSVHSVRTILRSETTIGTLPASQRNDRPAIPNYYEAAIDAATFNKAQEILDKNRKGRTPASDNPLTINIFKGLFRCQCGASVHPTGTKNKYQGVYRCNNHLDGRCDVPPLKRKPFDKWMIDNFLGMIDVGNDGEAEGKIASLQHEVEIVTARIKKATALLLEMDDIDELKIQLKELNQKRTELQTTIDNMRRKASLTDKELPQLKDIDLTTKAGRVECQLILSKHLKGLTLGKDSVTVTLQNDTEITIPTNPLPLNDGSPIFEIADKELLEIDAYQL

SEQ ID NO: 5867 - protein, 611 aa, synthetic construct
MRTVKAYIYSRVSSLQQVDAFGLDRQISTVLDFLENAKLPTELGYQLDPSNHEVLESDKGLSGYAGHNFTKGSLGRFKERVRSGEITEGCLLIESVDRFSRKQGYDAIDEFTFLIKRNIDIVEVETGQIYSYKLDHKLSALSTSIERAHQESKRKARISMKSWKHRKEASLANGVALNNNTPDWLSLSTDKLSYEIDYHRVETIKRIFQMYRDGYGVTHIVKVLNDEGNRYNGKGWNTVTVYNKLRDRRLNGFLVGKYKTIPKKINESTNEAEKRILENLKIKKEANDNAKRIYPIVIDDDLFLKVQSLMDRNVSNKKQRSTTTKQRNLFNGLTKCYECGSPMIVQSMSNGGQYLRCYRQRSKDEKCNSKMLRYSVTEKVLLEHIKGLDLDDIYGDKTQNYSVDTLKNLLHQTNNKLLELNEKIKSANDEEELFAIMEFKRKRNIEKEDLIAKINSIENASEVVRLSYNYDIGEIVNQDNTVLRRKTNENISKIVASIKCLRTDSSYIGAYYSYDITYHKDMLKHLLLTDNNGALLSEISIYQKNNERTYIVKEDKGMVFRVESNGDVWVLYASRKKSINDLLHYINVMMVGREPDTFSFVLNEDMIEWID

SEQ ID NO: 5868 - protein, 522 aa, synthetic construct
MPARLVSSSPEAWAYARVSTEEQTSGVSIDSQVARLISAGIPRERVVVEVASASKGRQTKLRQLFDRARRGEVSEIWAIRQDRLQRTRSEAAALWELIDQYGVAFRFLDEAAIDPADPSSCLQAQILGAFAQHETQMLSRRVRNALAHQREQGKHHGRPPWGYLAKEGRLVPDPESWDKARAVIETYLATGSSTAARRKRYELDGKPWGISAFARWITSPNLRGAVVYGLRTPNPEIIWGQHPPLVESHEWEAIAALRQSNRTNGGAQRKASRERLGTGLFVCEACGRRMHLKRRPNGVVLVICRQIRGAGCPVGHRNHLDHAKVPNLIRRAIGLAAVQIADQAVPHELPEPVELVKLREEAVAFERLGTPRARRQAEEVREEVARLEETLHRSSEQRQEAITSEVLRLASQWAAPGWADWRISDQELRAVALKYGLQFFVSGCHAERFEFQRLGVDGYLGSMETPVEARARKDSEAGYFTSGLLVESIGGAPPNNTSSQENQAINIAKFLVSRPIKSMPPD

SEQ ID NO: 5869 - protein, 503 aa, synthetic construct
MIQAYSYVRFSTKLQSKGSSLERQLKASQEFCTLHNLQLSTKSFRDLGVSAFKNTNRPELEQMLEAIKEGEISKGSYILIEAIDRLSRKGISHTQTVLKDILSYGVNVAFVGEDAKTLQNTVLNQDSLNDLSTVILVALAADLAHKESLRKSKLIKASKAIARDNAKDGKKNKFHVGFWLKYNDDKKEYIFSERLDVVRLIVNDRLKGLGPRKIATHLNDLEIPSPLGKQWNHMTITKVITNPALYGAYQTTVMIDQKAVPDTLIEDYFPAVVNKDTFMLLQADSSKANKGKPSKANPFGGLLKCSCGHGMNFSVKYDKRRNGDAKEYQYHFCSASTEGRCKFKKKIRDLVPLLVEIMDKLEIKETPRKNIAKQEIISITEKIEQLNNMLLQLDKPPLSVLKTISELESKKEKLLKEPEQQSINQQDVKRLSSINDTFEYNQLLKRIVDRIIIHQFDTSYRVEVKKLDGHKQNFLIKNNKVLFKSDTKALTELLRSFKDVEDV

SEQ ID NO: 5870 - protein, 502 aa, synthetic construct
MSFYGPASKPLRAAAYARYSTNRQTENSIEYQFNKIKEYCHQNRIQVVSYYSDEGQSGTNMDRAGFIDMVAAAARGEFDAVVIYDISRGSRDVGDWFAFRKQMARLGVQVISATQELGDVTNPNDFLVELITVGLGEHQVLDTRVKSIAGTTVRAKKGLFCGGVPPLGYDIVDGKYIINNAEAAAVRKIFELYAAGKGYSAILEAVKGINGKRGSALGKNSLSSILRNERYIGVYTWLKRRCKLMRKWAGGTPNPDAVRIEGVIPPIIDEKTWNEVQKRMSDNKRRASNKAKQEYLLSGLIECEACGSTYVGHCSTNSKGYQTRSYICGNKYRTHTCTVKNISANEIEAFVIQQLQAFLLETDFAETSRKIADQVNSASPDLTAERRELNGVIAKISNGTKAILSGINYPELQDEMDKLRLRKSELEDIIWRTQSNRQPVSGDKIEKLLNEALETLPADPRAAIKQLVTKIYAHVDGSFTVNVGVHIAGCGGLQPVATTTDL

SEQ ID NO: 5871 - protein, 518 aa, synthetic construct
MPKAISYIRFSTKIQSVGDSTKRQSKYINDWLKRNPDYYLDESLRFQDLGISGFSGANAKSGAFGEFLAAVESGYIESGSVLLVESLDRVSRQDIDTAGEQLRKILRSGVEVVTLVDNEWYTKESLKDSLSMIKAMLVMERAHEESAMKSTRLRSMWAAKRERAANGEIMSKRCAAWLKVSEDRSHFEFITENVKAVQRVFQLRLEGLSHVKIAKQMNDEGFSTLNQFKSVTGGWSQSSVTELLSNRSVIGFKVPSKSMAVKGVSEIPNYYPSIITDEQFYAVQQLKQGSGRKPSSDLPLLTNLFKGVLRCSECGFIVVVAGVSAKRSGIYKCSMKSEGRCNSVGFSRLQTDRALVQGLLYNTNRLSLNRDNGSAIGTLQSELEQLQKQRERLIKLAMLADDTESMAKDLKALNSQIKDAEKAVSEVHQREQSSQLETISHLDLTLKKDRIEAQIIIKRIVKEIRLNTAQKKCDVFLHNGLKLLNFPLDRVVDGEIFLEVLPLLEADEFDLDTYRVIE

SEQ ID NO: 5872 - protein, 598 aa, synthetic construct
MNKIIPYGYLRVSSLEQVRTGGGLDTQDEEVRRYITQNSEKFDIDRMVVMSDAGMSAYTGSNIKEGELGRFLADVNAGLIPTGSALICYSVDRLSRQNPWVGTHLISTLIGAGIEIHSVAENQILRSDDPVGAIMSTIYLMRANNESVIKSERAKKGYEKRLNESITNKKVLTRQMPRWLFDCDGKYAIDPNMQNVINFTFDSYIAGQSTGFIAKELNNRGLMYGNTSWRGSYVAKLIRDERLIGKHIRYSKQIKGVKRVVIETIPNFYPVVVDVEKFFLANNMLTSVAKNIRGRTRVTYGDDSILRNLFNGVIKCGVCGGDTSVVQNTRKKIVNGEATYIPYKTFLRCRTRYELKNCVQSDIRYEVIERAILNHLMGLDISALLSVPVDNKIESYRTELELCKAEEVELHTLIEQREREGKRVRPRTIKAYEDVSDRIDELNKLIESYVEDTFVPDFNVDLNSIADVSNVSDRSLIKKGIATIADSICYKRISDFILVEIKYRNLSVKHVLVIDNKQSKVVVNFSIEYHENSHDYTCNGFILKYVKSPEEFHLMGVNIEDYAHMMNFVDFISDNEAKKIKEYLVSNLSRVLISNVPE

SEQ ID NO: 5873 - protein, 506 aa, synthetic construct
MRTVITYLRFSSAIQGAEGADSTRRQNDLFKQWLKKNSDAQVVASFSDEGLSGYKGKHLTGQFGDMLARIEAGEFPAGTILLVESIDRIGRLEHLETEALMNRILGNGIEIHTLQDGLIYTKDALADDLGISIIQRVKAYIAHQESKQKSFRVSQKWEQRAKLALAGEQRLTKMVPGWIDPDTFKCNEHAETVRLIFKLLLDGESLHNIARHLQSNGIKSFSRRKDANGFSVHSVRTVLRSESVIGTLPASQRNDRPAIPNYYEAAIDAATFNKAQEILDKNRKGRTPASDNPLTINIFKGLFRCQCGASVHPTGTKNKYAGVYRCNNHLDGRCDVPPLKRKPFDKWMIDNFLGMIDVGNDGEAEGKIASLQHEVEIVTARIKKATALLLEMDDITELKTQVKGLNQKRTELQTTIDNMRRKASLTDKELPQLKDIDLTTKAGRVECQLILSKHLKGLTLGKDSVTVTLQNDTEITIPTNPLPLNDGTSIFEIAEKNLLNIDTFQL

SEQ ID NO: 5874 - protein, 509 aa, synthetic construct
MRRAISYIRFSSERQLKGDSVRRQSKLVTDWLDKNPEFYLDSSLSFKDLGKSAFSGKHLKGGLGDFLTAIEKGLVKAGDTLLIESLDRLSRQDIDIASELLRRILRAGVDVVTLSDGEHYTRESLKDPLSLIKSILIMQRAHEESLRKSERVQAAWNRKKELISEGIKVSRRCPAWLRLNDDRRTFTIIPDKVEVVKRAFDLRLQGLSFWAITRTLNDEGHLSLNQYTPKQKGWSDTAVKKLLRNRAVIGCFTPAGREEVQGYYPAIISESLFYRVQQLNTGQYGRASVSSNPLSVNLFRGIIKCSECGATIVLGGYALKRFGMYRCPNRSANRCSAKAISRKQTDATILYMLALCDRFETENTDTIDSLKLQREDLQRKISKMAELAIELDDMTIITEKLRDMKNALSKLNHDIEEETQRIKAITTGSLKDIDRTTKEGMIETQLLIKGVLKEIVLNTAKRRCKVTFHNGKVIDLSITENPSEDVTEAIQSLSEVTERGLIDVDEVII

SEQ ID NO: 5875 - protein, 598 aa, synthetic construct
MNKIIPYGYLRVSSLEQVRTGGGLDTQDEEVRRYITQNSEKFDIDRMVVMSDAGMSAYTGSNIKEGELGRFLADVNAGLIPTGSALICYSVDRLSRQNPWVGTHLISTLIGAGIEIHSVAENQILRSDDPVGAIMSTIYLMRANNESVIKSERAKKGYEKRLNESITNKKVLTRQMPRWLFDCDGKYAIDPNMQNVINFTFDSYIAGQSTGFIAKELNNRGLMYGNTSWRGSYVAKLIRDERLIGKHIRYSKQIKGVKRVVIETIPNFYPVVVDVEKFFLANNMLTSVAKNIRGRTRVTYSDDSILRNLFNGVIKCGVCGGDTSVVQNTRKKIVNGEATYIPYKTFLRCRTRYELKNCVQSDIRYEVIERAILNHLMGLDISALLSVPVDNKIESYRTELELCKAEEVELHTLIEQREREGKRVRPRTIKAYEDVSDRIDELNKLIESYVEDTFVPDFNVDLNSIADVSNVSERSLIKKGIATIADSICYKRISDFILVEIKYRNLSVKHVLVIDNKQSKVVVNFSIEYHENSHDYTCNGLILKYVKSPEEFHLMGVNIEDYAHMMNFVDFISDNEAKKIKEYLVSNLSRVLISNVPE

SEQ ID NO: 5876 - protein, 575 aa, synthetic construct
MTKIAYSYTRLSTEKQIKGHGFTRQREAIEKVCCQHGWQLSDQTFNDLGVSAWKGANATTGALSQFIDLAKKGAIRPNSVLIVESVDRLSRQQVDKSLRLMLELLEVGVSIFTLSDSKLYTTNSDSVMLDLMMWLMTAQRAHEESEIKSLRVRAAKKKNKELIRKGIIVTRKCPEWLTVSDDKSCFLVNNERAEIVRKIFTWYSQGFSTKPIALKLNELGIPYWGKSSTWSYRHIRSLLKHRGVIGEIQLLKRIDGRDVADGDPVEDYYPAIIDRGLWATCQQIKSSKTTAKGRVVERGMANLFRGLLKCECGSGLAINSSTVKGRTYRFLRCSQLKTTGCQAKNWHYEKTERILLIALRHSLSSFSEEDHAVSLRECQHYLARVSEELKEKERQAENAINYLLDKPSKLLEARLQTLEDDIARLKAIQEQAEHRLEAVHYEKSTALDKVEELQRVLEDIANDDDSRHKANGLLRRLIDTITLGSISNPRSKEFMEVSGNDYHGLIIIKRRDGLELRIEVLKDYGLSISWEGDDFTVIECSPTQQLNSQHEHQKFINVGEQTVDLWDDEGWVASS

SEQ ID NO: 5877 - protein, 507 aa, synthetic construct
MKRVISYIRFSSEKQAKGDSLRRQSKMVTDWLKAHPEYYLDQDLSFRDLGVSGFTGKHLKGGLGDFLTAIEKGLVKAGDTLLIESLDRLSRQAVDKASELLRNILRSGVDIVTLSDGEHYTRESLKDPLALIKSILIMQRAHEESLRKAERIQAAWDAKKEAAKAGIKISKRCPAWLKLNDDRKSFSVIPEKVETVKRCFQLRLEGKSIWEIVRTLNDECHQSMNQYKPGKFGQTSVQDLLKNRSVIGYFTPKGREEIAGYFPSIIHETDFYKVQQLSYARHGRKPASAKPLSVNLFKGVIRCSECGHALIITGFSDTRNGIYRCPLRNENRCSAKGLSRKQTDGTLLALLSRLDRFDSDMTNTIDTLKLHREHISSNIEKLVQLSLEIEDLNAITNKLKQLKNELSQVDADIEKETQRLKSIDVGCLSDCDLTTKAGRIEAQLIIKSAVKEVVLNTAKRRCKVTFHNGKIIDLPITENPSEDVTEAIQSLSEVTERGLIGVDEVII

SEQ ID NO: 5878 - protein, 547 aa, synthetic construct
MKLLVTYIRWSTKEQDSGDSLRRQTNLIDAFYSKHKNDYYLLPAHRYVDKGKSGFHQQHKNQGSDFRRMFENVMSGAIPEGSLIVVENFDRFSRADIDTAIDDVRQILRKGVSILTLGDGELYDKSALTDPVKLIKHIIIAERAHQESLVKQKRIAQVWNHKTQLARELKKPMGKQAPGWLELSEDGSHYIVDEDKASLVNIIYDKRLSGMSMFAICKWLNEQGYPTINQRKVRISKTKKPDGNWSALSVKHILTSRSVLGYLPAKISTEDRKTVLREEIEGFYPQIVTDSKFYAVQQLLEETGKGKTSSGEHWLYVNILKGLIRCKCGLVMTPTGIRKPVYQGTYRCNGNKESRCSYGTVSRKLLDTQLCSRLFSKLSQLHDEATDTAKLDELQRRLNTVDGELEKLTETLIQLPNITQIQEALRVKQEEKDELIVQLSREKARVKSVSSLDLSGLDMESVEGRTEAQIIIKRLVKEIVVSGNEKLVDIYLHNGNMIRGFPLDGKDDHTLTLEEATDEMQSLDDMLIFGEPVTRIYPAGDMEEVDA

SEQ ID NO: 5879 - protein, 522 aa, synthetic construct
MTTRNVTVIPARKRIGNSANAEELPKLRVAAYCRVSTDSEEQATSYEAQIEHYTNYIKSNPEWELAGIFADEGITGTNTKKREEFNRMIEECMQGKIDMIITKSISRFARNTLDCLKYIRQLKEKNIPVYFEKENINTLDTKGEILLTIMASLAQQESQSLSQNVKLGIQYRYQQGKIHINHNRFLGYTKDKDGNLVIVPEEAEIVKRIYREYLEGSSMLQIARGLEADGILTGAGNPRWHTSTINKILRNEKYIGDALLQKTYTVDFLSKKRVPNNGIVPQYYVENSHEPIIPREIFMQVQEQLVKRRCVHISKNGKKRNYSNKHPLSQMVFCGNCHEIFRRVHWNNRGKKSIVWRCVSRLENTGLFCTASTILEDTLKEKIVEAINVAVSGKNSFLAILKKNIETVLSVDLDETTADIDKRLEELQTELIQKANSKEAYDNIVNEIYRLRDLRQETLSRNALHQDKRDRIAEMTDFLNTQTGDITEFDDKLVRKLVEKAIAYDDRIVVEFKSGIEINIEI

SEQ ID NO: 5880 - protein, 522 aa, synthetic construct
MRKVTRIDGNNALQAFKPKVRVAAYCRVSTDSDEQMASLEAQKDHYEYYIKANPDWEFAGIYYDEGISGTKKENRTGLLRLLADCENKKIDFIITKSVSRFARNTTDCIEMVRKLTDLGVFIYFEKENINTQRMEGELVLTILSSLAENESLSIAENSKWSIRHRFQNGTYKISYPPYGYDYVDGKLFINKEQAEIVKRIFSEALDGKGTQKIADGLNSDKIPTKRGSHWTATTIRGILSNEKYTGDVLLQKTYTDENFKRHYNRGEKDQYMIKDHHEAIISHEEYEAAQEILKQRGKEKGVIKGSSKYQKRYPFSGKIKCAECGSSFKRRIHGSGDRKYIAWCCTKHIKDASSCSMKFVREDAIHQAFVVMINKLIFGHRFILRPLLQSLKKANYSDNLAKIQELETKIKENTERVQVIMGLMAKGYLEPALFNTQKNELLKEAAILKEQKEAIKRAIDGSQTILVEVEKLLKFATKAEKQIDAFDSEIFEDFIEEIIVFSQEEISFKMKCGLNLRERLVK

SEQ ID NO: 5881 - protein, 537 aa, synthetic construct
MKKRVCAYCRVSTDKDDQINSFNSQKQFFEEYIRKNEEWELVDIYADEGITGTSTEKRTEFLRMIEDVKYKKIDLILTKEISRFARNTLDSIYYTRKLKSMGVGVIFINDGINTLDEDAELRLTIMASIAQEESRRISQRVKWGQKRQMEKGVVFGRELLGYNLRNGVLTINEQEAEIVRMIFHKFTNEGKGTHVIARELYEAGIKTKRGNLNWSNTMILKVLRNEKYVGDLCQKKTITPDFLSHKKKYNKGQEEMIYIKNHHEPIISRELWEATQKELEKRTTSREQKSKYSNRYWCSGKIICGLCGSRFVGRLKKLKNGDTYRAWRCQKAAEHGREKIDKWGNTIGCNQESINHVVLGEIIGYILKNVIVDNKEEIINDLKALIKKYEKPVKIKNTNTLLKQIENINTKKQKLIDSMLEGIISKQDVAMMNEKYDKEIEELRQKVKEIEEANINNQKQADMLKSYIDRIHKIVNDLENNNPEEIYKKTVEKIIVHKDKILEIYFNCLVNPIKVRYKAKGKLNYTIECELLNSEQF

SEQ ID NO: 5882 - protein, 438 aa, synthetic construct
MHKAAAYARYSSDNQREESIEAQLRAIREYCQKNNIQLVKIYTDEAKSATTDDRPGFLQMIQDSSMGLFSAVIVHKLDRFSRDRYDSAFYKRQLKKNGVRLISVLENLDDSPESIILESVLEGMAEYYSRNLAREVMKGMRETALQCKHTGGKPPLGYDVAEDKTYIVNEQEAQAVRLIFEMYASGKGYSDIMYALNKEGYRTQTGRPFGKNSIHDILRNEKYRGVFIFNRTERKINGKRNHHRNKDDSEIIRIEGGMPRIIDDETWERVQERMSKNKKGANSAKENYLLAGLIYCGKCGGAMTGNRHRCGRNKTLYVTYECSTRKRTKECDMKAINKDYIENLVIEHLEKNVFAPEAIERLVAKISEYAASQVEEINRDIKTFTDQLAGIQTEINNIVNAIAAGMFHPSMKEKMDELETKKANLLLKLEEAKFVFCK

SEQ ID NO: 5883 - protein, 559 aa, synthetic construct
MKTKLYSYIRFSSMRQNDGSSYERQIRMAREVAAKYDLELVNDYQDLGVSAFKGANSKTGALSRFLDAIGRSVPVGSWLFIENLDRLSRADIVSAQELFLSIIRRGITIVTGMDNKIYSLDTVTANPMDLMFSILLFIRGNEESQTKRNRTNSSALIKIKSHQENPQNPAVAIEEVGKNMWWTDTTSGYVLPHPTYFPVVQEIVELRKNGRSTAEILDHLNETYTPPPAVSNKKHSKWSRAMVERLFHTRALIGIKEVSVDGVNYELKDYYPRVIDDATFYHLKKNIGARAWNFGDKEEVKPIPLLSGIGLLKCDHCGCAMVKVKGTNKRSDQYRYTCDATRSRRLDCEHPNWSFRGDQLEKAVLQLLADKIWIAEDKANPVPALKVQVDEISRKIDNLITLSAMTGATKELADQITTLNSERETLYNQIKMAEEEMYSVDSQGWEKLAEFDLEDVYNEERLKVRFKIKQALKRIGCSRIDRNKNLFVLEYIDGKTQRVVIENSRGTRKGQIFVDLKTINDRQILESNGLVLHPCLDMLTDKNWKPEEETPGPLQEFGI

SEQ ID NO: 5884 - protein, 559 aa, synthetic construct
MKTKLYSYIRFSSMRQNDGSSYERQIRMAREIAVKYDLELVNDYQDLGVSAFKGANSKTGALSRFLDAIGRSVPVGSWLFIENLDRLSRADIVSAQELFLSIIRRGITIVTGMDNKIYSLDTVTANPMDLMFSILLFIRGNEESQTKRNRTNSSALIKIKAHQENPQNPAVAIEEIGKNMWWTDTTSGYVLPHPVFFPIVQEVVELRRNGRSTAEILDHLNATYTPPPAASHKRHSNWSRAMIERLFHTRALIGIKEISVDGVKYELKDYYPRVLDDAEFYHLKKSIGVRACNYGDKEEVKPIPLLSGVGLLKCEHCGSAMVKVKGTNKRPNQYRYSCDAMRSSRIACVHTNWSFRGDQLEKAVLQLLADKIWIAEDKANPVPALKVQIDEISRKIDNLITLSAMTGATKELADQITTLNSERETLYNQIKMAEEEMYSVDSQGWEKLAEFDLEDVYNEDRIKVRFKIKQALKRIGCSRIDKYKNLFVLEYIDGKTQRVVIENSRGPRKGRIFVDLKTINDRQILESNGLVLHPCLDMLTDKNWKPEEEIPGPLQEFGI

SEQ ID NO: 5885 - protein, 506 aa, synthetic construct
MRTVITYLRYSSAIQGAEGADSTRRQNDLFKQWLKKNSDAQVVASFSDEGLSGYKGKHLTGQFGDMLARIESGEFPEGTILLVEAIDRIGRLEHLETEALMNRIIAHGIEIHTLQDGLIYTRDALSDDLGISIIQRVKSYVAHQESKQKSFRVSQKWKQRAKLALAGEQRLTRNVPGWIDPDTFKCNEHAETVRLIFKLLLDGESLHNIARHLQSNDIKSFSRRKDANGFSVHSVRTVLRSESVIGTLPASQRNDRPAIPNYYEAAIDASTFNKAQEILDKNRKGRTPASDNPLTINIFKGLFRCQCGASVHPTGTKNKYAGVYRCNNHLDGRCDVPPLKRKPFDKWMLENFLGMIDVGNDGEAEGKIASLQHEVEIVTTRIKKATALLLEMDDIDELKIQLKELNQKRTELQTTIDNMRRKASLTDKELPQLKDIDLTTKAGRVECQLILSKHLKGLTLGKDSVTVTLQNDTEITIPTNPLPLNDGSPIFEIADKELLDIDAYQL

SEQ ID NO: 5886 - protein, 506 aa, synthetic construct
MRSVITYLRYSSAIQGAEGADSTRRQNDLFKQWLKKNSDAQVVASFSDEGLSGYKGKHLTGQFGDMLARIESGEFPEGTILLVESIDRIGRLEHLETEALMNRILGNGLEIHTLQDGLIYTKDALADDLGISIIQRVKAYIAHQESKQKSFRVSQKWEQRAKLALAGEQRLTKMVPGWIDPDTFKLNEHAETVRLIFKLLLSGESLHNIARHLQANNISSFSRRKDANGFSVHSVRTILRSETTIGTLPASQRNDRPAIPNYYEPAIDASTFNKAQEILDKNRKGRTPASDNPLTINIFKGLFRCQCGASVHPAGTKNKYAGVYRCNSHLDGRCGVPPLKRKPFDKWMIDNFLGMIDVGNDGEAEKEIASLQHEVETVTARIKKATALLLEMDDIDELKIQLKELNQKRTELQTTIDSMRRKASLTDKELPQLKDIDLTTKAGRVECQLILSKHLESLTLGRGQVTVKLSNGTEIIVPTDPLPLTDGAAIFEIAEKNLLNIDTFQL

SEQ ID NO: 5887 - protein, 473 aa, synthetic construct
MAKKIPAVRSAAVYARISADVEGKSLGVQRQLEDCRKLAAERGWVVGREYVDNDVSAYSGKARAGYEAMCTDLAAGVRDAVIVYNLDRLHRRPVELEDFVALCEAAGVNQVATVTADIDLGNDDGLFMARIFAAFAAKESGRKSARMKRKYEQKAAQGLPHGPNRPFGYEEDKITIREAEADVVRELVTRVIAGESLNALTVWLNESGAKPVRGARWASTAVRGIVSSPRIAGLRAYKGEVVGDAAWPAIISVAERDQVLAALAVRAWNRKRSPRKYLLSGLCRCGRCQARMFSAARLEAGAHKRRYVCSSSPDHGGCGRMTVVAEPLEKLITDAVLTRLDSKALADALAGKARANPDTAALSAQVEAAQARLDELTGLYSSGAISAREWIMARDPITDTIARLRREIAETVDTGPLAELAGQGSVLRGQWDDLGLDRCHAIIRTVIDHVVIKPGQPGARGLDMNRIDPVWRI

SEQ ID NO: 5888 - protein, 523 aa, synthetic construct
MSSNRPRALVGARVSVLSGPQKVSHEAQIDSATRWAEANGCRVVGSFEDVGVSASVPPEQRPDLGPWLTPEREHEWDVIVWSKMDRAFRSTRHCVDFARWAEENQKVVVFADDGLKLDYRPDAAKGIDAMMAELFVYLGSFFAQLELNRFKSRATDSQRAIRPTTRWASGLPPLGYKVVDHPSGKGKGLAIDPDAANLVREMADKLVDGWSFVRITEWLNESGQLTSQGRSRQARGLGPKGAWTTTNVIEILTGYRALGIKTHKDQPVLDGNGEPIRLAPPLFTPERWDEIQRAAQQRKGKPRTPSDTSNPMLGVGYCGAPCPHKRAGSECPDDCQGICGSSLAQQFSKTRPRKSDGHVTFYRYYRCSRTPINCKTVFVVADILDELLSEQFLLERGDRKVTERLFIAGEDNSYELDFINQRIELLREDRASGLFPSGEDELVYHNQMKRLLARRDELASVPVRQSRYENVELEKTYREVWPNATPEEKRKMLIDAEISIRLGESPGKSIRAEMVVGSPYRKM

SEQ ID NO: 5889 - protein, 498 aa, synthetic construct
MEGETKRALIVTRLSRVTEATTSPERQMEICQGLCDDRGYEVVGYAEDLDVSGSVDPFDRKRRPNIARWLANEAEPFDVIVVYRVDRLTRSLRHLQKLVHWAEDNGKLVVSATEPHFDMTTPFAPVLIALIGTVAEMELEAIRERNSSAARHNIRAGRWRGGQPPWGYVSSNASGEWRLVPCPEQVELINEVAARVLGGEPLQRIAHDLTSRGIPTPKGRTEWNVTPLKRSLTSEAMLGYVMSGDKPLRNDDGSPIIRAEPILSREVFDRVKVELESRSRRGEPTKRSSSLLLRVLYCGVCQLPAYQFNGGSHSKSPRYRCSSTGKSTKCENLTVRMDLADQAFTENLLDLFGDSERLERIWDTGSDHSAELADINEILEDLTGLLGTGPYKAGTPQRSALDSRIAALASRQAELSTEAVRPSGWVWRTTGEMFADWWDNQDTESRNVWLRSMNIKVTYNNSSGAVTWGLDWGDLKKFEEQLKFGKSAQRAVLQITEA

SEQ ID NO: 5890 - protein, 547 aa, synthetic construct
MKLLVTYIRWSTKEQDSGDSLRRQTNLIDAFYSKHKNDYYLLPAHRYVDKGKSGFHQQHKNQGSDFRRMFENVMSGAIPEGSLIVVENFDRFSRADIDTAIDDVRQILRKGVSILTLGDGELYDKSALTDPVKLIKHIIIAERAHQESLVKQKRIAQVWNHKTQLARELKKPMGKQAPGWLELSEDGSHYIVDEDKASLVNIIYDKRLSGMSMFAICKWLNEQGYPTINQRKVRISKTKKPDGNWSALSVKHILTSRSVLGYLPAKISTEDRKTVLREEIEGFYPQIVTDSKFYAVQQLLEETGKGKTSSGEHWLYVNILKGLIRCKCGLVMTPTGIRKPVYQGTYRCNGNKESRCSYGTVSRKLLDTQLCSRLFSKLSQLHDEATDTAKLDELQRRLNTVDSELEKLTETLIQLPNITQIQEALRVKQGEKDELIVQLSREKARVKSVSSLNLSGLDMESVEGRTEAQIIIKRLVKEIVVSGNEKLVDIYLHNGNMIRGFPLDGKDDHTLTLEEATDEMQSLDDMLIFGEPVTRIYPAGDMEEVDA

SEQ ID NO: 5891 - protein, 604 aa, synthetic construct
MKKCFIYHRVSSDQQLSGGRSGIVRQAENLNLYVKRIRLLETMDDPEAVILCDQGVSAFKGLNISEGELGRWMEQVQAGMWDGSHLVLESIDRFSRQNPFTLVGYLSRLVEHDITLHDVSLNLLINRSNSAMLPIVTMSAQRAYEESKIKSDRIRDGWRRKREQAFNNGTIVTNKRPQWIDIRDDQYVLNDKVHIVKEVFRLAQSGIGTPTIAKILNAKGDDWLFESGRQWRGESVHKLLKNKRVTGSIFISEIIRDYNSTSNPVDQKRYEMDVYPIVISKEEFNLVQQLLRSRRANTGRISTNKDTDELKKSNIFNSICRCGKCGEAMYHNVVKSHRNSKKNGKFTEEYRYIRCLGERDNLCDNKALRYEVVEQFVLEYLKGMDFSRILKPNNHKSEIDVLRLNIDEEKKHIREYRQGIEKLKSMGKKVPFDVLVELEESQKRLSDLEEKESKYTDLTVDTEYLKSVDPSVLFDQGNIEVRSRIEKELSMLLESIVLHRLDKHYVITLEYTQVNILKHVLFIEAGKIPVLMSTLSIEKYNDEHIYTMPSFSIRCGEGVPEIHGEAISLVDYSLLLNYIDGVDGSEYVSEWMRTNQNFIFSKET

SEQ ID NO: 5892 - protein, 507 aa, synthetic construct
MKRVISYIRFSSEKQAKGDSLRRQSKMVNDWLKAHPDYYLDQDLSFRDLGVSGFTGKHLKGGLGDFLTAIEKGLVKAGDTLLIESLDRLSRQDIDIASELLRRILRAGVDVVTLSDGEHYTKESLRDPLALIKSILIMQRAHEESLRKAERIQVAWDAKKEAAKAGIKVSKRCPAWLKLNDDRKSFSVIPDKVETVKRCFQLRLEGKSIWEIVRTLNDEGHQSMSQYKPGSFGQSSVQDLLKNRSVIGYFTPKGREEIAGYFPPIIPETDFYKVQQLSYSRYGRKPASDKPLSVNLFKGVIRCSECGHALIITGFSDTRNGIYRCPLRNENRCSAKGLSRKQTDGTLLALLSRLDRFDSDTTNIIDMLRLHREHVSSNIEKLVQLSLEIEDLNAITNKLKQLKNELSQVDADIEKETQRLKSIDVGCLSDCDLSTKAGRIEAQLIIKSAVKEVVLNTAKRRCKVTFHNGRAITLPITENPSEDVTEAIQSLSEVTERGLIDVDVVEI

SEQ ID NO: 5893 - protein, 514 aa, synthetic construct
MKKVYSYIRFSSTKQAFGDSHRRQSKAIQDWLANHPDHILDESLSFEDLGRSAFHGDHLKEGGALRAFLEAVKQGLIPPDSVLLVESLDRVSRQSISHAQETIRGILEQGITVVTLSDGETYNRQSLDDSLALIRMIILQERSHNESVIKSDRIKMAWSHKRQQFEQDGTKITGNCPGWLKLNSDKKSFSLIPHHIETIHRIFDEKLSGKSLHAIARDLNLENIPTITNKRVDTGWTPTRVRDLLLKESLIGVAYGVSDYFPPAISKEKFHAVQMIRGQGKGKKPTSRQPSSIDILKGICKCAECGSTLRQRNTKKTPEGRYPRGYLECRNRQLGRCNSKAFNRSLIEDILIQKVFPTLQYLSLKSNGDNISVTTLKADITSLEKGINNLISLAEKGLGDLDTLAQRITNNRVELESKKKDLRQAEAILSLRSDNDIQDSDRKTVEGRIKLQLAIKSFVKEIIFDYDKQEITIRLLNGKSFSGISVAREDKDFDHSSMFEVLQKSLLDVDGVCL

SEQ ID NO: 5894 - protein, 624 aa, synthetic construct
MIKTFIYSRVSSQEQLSGGGLDRQETDVREYVTRNGLDQYEIVAMVDRGISGYDGSNMRDGELGKWYKDAITGMYWGSHLVLEAIDRFSRRDPMLAMEDFTVLVNKGGIKVHIVKFNTFINGDNLPMLSMMMNLAHSESKQKSDRISKGWQRRRRMALDNGTAITARTPYWIDVRDNEYRLNNSSIAVVEAFAMYKQGLSCGLIAKKLNELKHYFPYMWTKTAVQHIVDGLNTSGIIDATRAIKTIKAFYKSGFSVEDIAKKMNAEFQFMKEWNAPAVHKLLQNKSVTGLVEIQKRKLIQEFDSDGKPLELRTKSEGEKYFESIYPQIISIDDFELIQKLLESNRKVDTKTGKGQTTGGTVTQNEDGELVKQFILSSLCRCYKCGGAMFNNIVRSKRKNGKVDTYSYLRCLNERDAHCDVKALNYPVIERAIIEHVKGLNFDTMFKGTNNSELELLKTREVELLRDIATYEDAIAARKAAGKNTSPVLVTSLVDAQDDLEALQKKIRAISGVTVNAEELTSLNESVFDVAEYELRNMVELELQKIIKRITFNCTEKNIYFITIQYNTGTVLQHGLKVDKKKGVIETYELHEGNKGYVSNGEVITPALIEAAESKNIGIFEGKVM

SEQ ID NO: 5895 - protein, 541 aa, synthetic construct
MPKAISYIRFSTKIQSVGDSTKRQSKYINDWLKRNPDYYLDESLRFQDLGISGFSGANAKSGAFGEFLAAVESGYIEAGSVLLVESLDRVSRQDIDTAGEQLRKILRSGVEVVTLVDNEWYTKESLKDSLSMIKAMLVMERAHEESAMKSTRLRSMWAAKRERAANGEIMSKRCAAWLKVSDDRSHFEFIPENVKAVQRVFQLRLEGLSHVKIAKQMNDEGFSTLNQFKSVTGGWSQSSVTELLSNRSVIGFKVPSKSMAVKGVSEIPNYYPSIITDEQFYAVQQLKQGSGRKPSSDLPLLTNLFKGVLRCSECGFIVVVAGVSAKRSGIYKCSMKSEGRCNSVGFSRLQTDRALVQGLLYNTNRLSLNRDNGSAIGTLQSELEQLQKQRERLIKLAMLADDTESMAKDLKALNSQIKDAEKAVSEVHQREQSSQLETISHLDLTVKKDRVEAQIIIKRIVKEIRLNTARKKCDVFLHNGLKLLNFPLDRVVDGAQWLEVLPLIDGDEFDFEGFTTKPQHIALEEAPEWVKEMEEQPNQPL

SEQ ID NO: 5896 - protein, 507 aa, synthetic construct
MKRAISYIRFSSEKQSRGDSLRRQSKMVNDWLKAHPEYYLDQDLSFRDLGVSGFTGKHLKGGLGDFLTAIEKGLVKAGDTLLIESLDRLSRQAVDRASELLRNILRSGVDVVTLSDGEHYTSESLKDPLALIKSILIMQRAHEESLRKSERIQAAWDAKKEAAKAGIKISKRCPAWLKLNDDRKSFSVIPEKVETVKRCFQLRLEGKSIWEIVRTLNAEGHQTLNQYKAGKFGQTSVQDLLKNRSVIGYFTPKGCEEISGYYPAIIDETTFYKVQQLSHYRYGRKPVSDKPLSVNLFKGVIRCSECGHALIITGFSDTRNGIYRCPLRNENRCSAKGLSRKQTDGTLLTLLSRLDRFDSDTTNTIDTLKLHREHISSNIEKLVQLSLEIEDLNAITNKLKQLKNELSQVDADIEKETQRLKSIDTGSLSDCDLSTKAGRIEAQLIIKSAVKEVVLNTAKRRCKVTFHNGRAITLPITENPSEDVTEAIQSLSEVTERGLIDVDEVII

SEQ ID NO: 5897 - protein, 558 aa, synthetic construct
MAKKKKPAGGIAVIYARYSSHNQRDVSIEQQIEACRKHATELGLTIIATYEDRAISGRTDNRPAFQRLMHDAEKGKFSYVLAWKSNRMGRNMMQAMVNESRLMDCGIKVYYAEEDFDDSAAGRFALRSMMNVNQFYSDNLAEDVRRGLMDNANKCMVNGRQPLGYKRGKDGKVVVDEPAAAIVREVYARVASGELFTDIARDLNRRGIKTADKGEWNKNSFHRLCSNEKYRGIYIYGDVRIEGGIPTIIDDTLWYKVQEALRVKKLKRNGRHRPGDEDYLLTGKLRCGKCGGYMIGMSGRSKTGDIHYYYACQNRRVGHTCDKKNIRRDVIEPAVAQAIKEYCLTDDAIEWIADKTVEYWEKADRNLQLDSIEGDLAAVQSSISNVMKAIEMGVVTETTRDRLIELEKQRTDLKSKLALAKEEVVHVDRKKLISSLLLFRNGDIHDRQYQEDLFKTFLISVYVYDDDDNGHLKIVFNAFGDNNTVDLPIDFGETDNQSAFSDGAEKFDYSLHRSTKKPSGLCRMAFFVLYCYTKTAYRLCDGTPIFMQFYRILMRPAP

SEQ ID NO: 5898 - protein, 449 aa, synthetic construct
MKQVIGYLRQSTMKQQSLAAQKQAIEAIAEKHHIQHINFYSDKQSGRKDNRSGYRQVTQLIQQGQCDILCCYRLNRLHRNLKNALKLIKLCQTYHVHILSVHDGYFDMDQAFDRFKLNIFISLAELESDNIGEQVRNGLQEKAKQGRLITTHAPFGYDYHNGTFIINQNESPTVKAVFNYYIKGHGYKKIAQLLEEDNTYINRQPYQVRNIIINPNYCGRVNNQYGQFDNMFPSIVSTSIYEQAQRLRLQKQTKQTSSDNQLKQKIKCPCCNATLTNMTVRKKNHILRYYVCPKNMNASRFVCDFKGINAQTLEDKVLEVCKDFYQNQRIYTKIKGAIDKRIKRQRNIEKHHTLTQEQLIEKLAQGIIDAETFREQTQSLHQQPQRTTSINGHQIQHTIQNIIQKRFTLNILYPYIETIHITKDKNLIGIYFKNEPLNIVNQTMQSSIA

SEQ ID NO: 5899 - protein, 571 aa, synthetic construct
MPNAVIYARYSTDMQSDASIEDQIRMCKERAEKDGYDVVNCYSDHAISGASMMRPGIQMMMQDASAGKFTTVYAEALDRMSRDQEDIAAIFKRLSFSDVSICTLSEGEISQLHIGLKGTMNALFLKDLADKTRRGLRGRVEQGKSGGGKCYGYDVIPGEEKGGRTINEMEAAIVRRICQDYSEGKSPKAIAHQLNKEGVPGPTGKGWGPSTINGNRNRGTGILNNELYIGRLVWNRLRYVKDPQTGKRVSKLNEERDWIIQDVPELRIVSEDLWQAVRDRQGKLNANTKPFWAKQRPKNLFSGLLKCGCCGGGYSMISQTHLGCSNARNKGTCDNRKGFKRDLLDQDVLKALRSHLMDPDLCELFCQEYTAHLNELRRTHNVSLEGHRQELQQTKKKLDQMVDAISEGAPVAPIKDKMHALEARRIELEAMLQDVEVAPPLLHPSMAERYHTQVKNLLNALYAEDSRTEASELIRSLIEKIVLTPDERENRLIVDLHGDLAGILAISADNQSLSSGLAPGMASSLSKVDETAILKHKKLLEPVRASRADDFDDRQVKLVAGAGFEPATFRL

SEQ ID NO: 5900 - protein, 568 aa, synthetic construct
MSHPVKAYSYIRFSTPKQAQGDSYRRQLQQAMDYCAEHNLQLDDKTIDDFGTSAFRGANMTEGALGRFVDAVKLGEIEQGSYLLVESVDRLSRQAVEEALEQFLAIVRAGIVIVTLSDKQVFRRGQVDFTKLIVSIVYMARANDESEMKSRRSRAAWSNGREQARKNNKVIANSRLPSWLTRDGEQIVPIPERVAIVNEMFEMAKSGCGYEQIAKVFLEKGYKTFGKEADWRPAGIQAVIKSQAVIGVFQPHVIENGHRVPADEPILGYYPTIVSPALFEEVQHLISKRNKHSGSYRKGTFNNLFSGVLRCQCGESLRYQNKGRAGSPRNYLVCPKQNTAGCKLPNMLYDKVEPQLLQAVFLLNRVMKQRVEGEDKTIALRTMLAELRVQLEVETQKRKKAAQLVLDNDNDADYRVLFEQCKKKTQALEKQIQRAESDLMSRELSVKTLKYIVDPEDLSSTEQRQRFNGQLKTALKEIRFRFDGGYLWAEYMDIDGSRVLTQIFEDKLAGSSIYDGSSYLVRKTQTEAPYGVDPSVMQQEMDDYIRNLQKNDDGTDPDFEDLSSEYSK

SEQ ID NO: 5901 - protein, 644 aa, synthetic construct
MLRPICYERVSSIQQIEGGGGLDDQRSALEGYLDKNAGLFENDRLFIQDRGVSAFKNSNISSESQLGIFLQDVQNRKYGEGDTLIVMSLDRISRRSSWAEDTIRFIVNSGIEVHDISASTVLRKDDPHSKLIMELIQMRSHNESLMKSVRAKAAWDRKIIEAVQNGTVISNKMPMWLKNVDNRYQVIQEKADLIIRCFEWYRDGFSTGEIVKRIADPKWQMVTVSRLVRDRRLLGEHKRYNDEVIHNVYPKVIDDDLFLTANRMMDRVMLEKNKPAEDLLLESDVVQEIFQLYESGLGSGAIVKRLPKGWSTVNVLRVLRDKNVVTQKIIDNLTFERVNQKLSMNGVANRIRKDITIAQDDYITNLFPKILKCGYCGGNVAIHYNHVRTKYVICRNREERKICDAKSIQYIRIEKNILKCVKNVDFQKLMIESTGSETSVLDGLHEELSSLRREENSYSDKINERKLAGKRVGIHLNDGLTEVQDRIEEIEKEIINAQTVREIPKFDFDMDEVLDPMNIELRAKVRKQLRLVLKAVKYWMFDKRIFIQLEYFNDVLSHMLVIDNKRGGGDVIYEMSIEERKGERIYTVHENGHAVFIASVTIGTDIWSLALSRTRTIDSIGNYLSLLAREGFEIFVNEDQIDWF

SEQ ID NO: 5902 - protein, 547 aa, synthetic construct
MKLLVTYIRWSTKEQDSGDSLRRQTNLIDAFYSKHKNDYYLLPAHRYVDKGKSGFHQQHKNQGSDFRRMFENVMSGVIPEGSLIVVENFDRFSRADIDTAIDDVRQILRKGVSILTLGDGELYDKSALTDPVKLIKHIIIAERAHQESLVKQKRIAQVWNHKTQLARELKKPMGKQAPGWLELSEDGSHYIVDEDKASLVNIIYDKRLSGMSMFAICKWLNEQGYPTINQRKVRISKTKKPDGNWSALSVKHILTSRSVLGYLPAKISSEDRKTVLREEIESFYPQIVTDSKFYAVQQLLEETGKGKTSSGEHWLYVNILKGLIRCKCGLVMTPTGIRKPVYQGTYRCNGNKESRCSYGTVSRKLLDTQLCSRLFSKLSQLHDEATDTAKLDELQRRLNTVDSELEKLTETLIQLPNITQIQEALRVKQEEKDELIVQLSREKARVKSVSSLDLSGLDMESVEGRTEAQIIIKRLVKEIVVSGNEKLVDIYLHNGNMIRGFPLDGKDDHTLTLEEATDEMQSLDDMLIFGEPVTRIYPAGDMEEVDA

SEQ ID NO: 5903 - protein, 507 aa, synthetic construct
MKRVISYIRFSSEKQAKGDSLRRQSKMVTDWLKAHPEYYLDQDLSFRDLGVSGFTGKHLKGGLGDFLTAIEKGLVKAGDTLLIESLDRLSRQAVDRASELLRNILRSGVDVVTLSDGEHYTKESLRDPLSLIKSILIMQRSHEESLRKSERIQAAWDAKKEAAKAGIKVSKRCPAWLKLNDDRKSFSVIPDKVETVKRCFQLRLEGKSIWEIVRTLNAEGHRSMNQYKPGKFGQTSVQDLLKNRSVIGYFTPKGCEEIAGYYPSVIDETTFYKVQQLSHSRHGRKPVSDKPLSVNLFKGVIRCSECGHALIITGFSDTRNGIYRCPLRNENRCSAKGLSRKQTDGTLLTLLSRLDRFDSDTTNTIDMLRLHREHISSNIEKLVQLSLEIEDLNAITNKLKQLKNELSQVDADIEKETQRLKSIDTGSLSDCDLTTKAGRIEAQLIIKSAVKEVVLNTAKRRCKVTFHNGKSIILSITENPSEDVTEAIQSLSEVTERGLIDVDEVII

SEQ ID NO: 5904 - protein, 638 aa, synthetic construct
MKAALYVRVSTHFQIDKDSLPFQRQELINYSKYVLGNDNYEIFEDAGYSAKNTDRPSYQAMMSRIRSGEFTHLIVWKIDRVSRNLLDFSSMYEELKKYNVTFVSKNEQFDTSSAMGEAMLKIILVFAELERKLTAERVTSIMLSRAEKGLWNGATVPLGYKWSDEIKFPVIDENEASTVRLIYDLYLQLRSTTKIAQHLNTNHIPTKRNGTWVAKTVNDVLRNPFYIGTYRYNMKDQKRKLKKEDEWIIIEDNHEGIIDKPIFEQVQHILEDNYNGNSQYQRENIHTHIFSSLVYCSKCGTRFWAGLDSPRKKDGYRPSRYVCYKNNNGCQNIISDVTLLPFILNFIANFIRLNHSTLNNLSLKSIEKTLLRGKAFVDVIGIDHFALESTFKRMATGLHDELELNSDTATESKVIQTDEMESLEKEKKKYEKALERLESLYLFSEDSMSQKDFIFKQRDLKQHLEQINAKLAALNIPQAKDNLADLSWLDDIQYFILMDKIQNTIGIDYREILNLIDIEVLKEFISKIVEEIHVQDKKVMSLKLSNGITYKFAYKEHTQIRTREHLLYRKYEDTLLELLNTKIQVTRKDVEETIPLGRVTIGKLINEFIERGIIVRCGASTATYYTLVENKDFPREIL

SEQ ID NO: 5905 - protein, 486 aa, synthetic construct
MTAALYIRVSTDDQLEFSPDAQKRALLEYAKKNNILVDEQYIFVDEGISGTSAKKRPAFQTMIATAKKKPKPFDTILVHKFDRFARSREDSVVYKSLLRKECDIKVISITEQMEDDKFSVILEAMLEAMAEYYSLNLSDEVMKGMTEKARRGLPQSEAPYGYRRDGDKYVLVDDEAEIVKMIFSKFNSGELGYGEICRFLLLNGITNRKGQSFTVSGIKYMLENPIYCGKVRWNYSTHKGGRRKNPKEEWIITDGEHQRIISDELYQSVQQKIASLKKAPGHYTPNKEIKHWLSGLLRCSNCNKVLVYNKGYHKYPFYRCNGYNKGVCTTSNMGPLHFYEKEVLKALSLKFNELSQGLGNIDSVVVKTNKETSNKILLQKQLEKVRRKYEIAKKAYLAEIDTLEEYANNKSDIEKEERDLLDKLSKEISSEDVSKIITSKLEHAIQILNDDSKSNTEKNTFLKSFINSIDVDRNNDILKINMYVEC

SEQ ID NO: 5906 - protein, 540 aa, synthetic construct
MKIAIYSRKSKTSDKGESIDNQIHMCKEYANAHFETPEFSTFVDEGFSGGNTNRPQFKILIDELKKGMYDVLICYRLDRISRNVSDFASTLDILTEHGIGFVSIKENFDTTTPMGRAMIHISSVFAQLERETIAERVTDNLLELAKLGRWLGGTSPLGYKSKKVAYQSSGKTKHYSVLEQDPDTASIVKLIFDKYLELGSISKVETYLMQSNIKTPNKAYFRSNVIRNILINPVYVTADTSIYDYFHKLECILPKPKEEFNGSYGLMPYNRNKKGQGNLQNPHDKWIISIGTHEPIISSLNWIAVQKQLAANSDLAYSNASTSPALLSGLIYCKHCGAPMQVSGKGVLADGTVCYNYRCTTKTKSRGTLCNINNISKGYALDALVIKRIRAMLENETDLIKELKKSKHDLTFKADANEEEKTRIKMELDTNTTTISSLIKKLALFDDPTMEQYIQDEVKALHSKNAALKEQLEDLESLGINQDYSLANIDLILQSLKDFNKLIDYATLHQKKTLMRNLIKRIEWDGETVGIFFYFQQSPL

SEQ ID NO: 5907 - protein, 506 aa, synthetic construct
MRSVITYLRYSSAIQGAEGADSTRRQNDLFKQWLKKNSDAQVVASFSDEGLSGYKGKHLTGQFGDMLARIESGEFPEGTILLVESIDRIGRLEHLETEALMNRILGNGLEIHTLQDGLIYTKDALADDLGISIIQRVKAYIAHQESKQKSFRVSQKWEQRTKLALAGEQRLTKMVPGWIDPDTFKLNEHAETVRLIFKLLLSGESLHNIARHLQSNGIKSFSRRKDANGFSVHSVRTILRSETTIGTLPASQRNDRPAIPNYYEAAIDAATFNKAQEILDKNRKGRTPASDNPLTINIFKGLFRCQCGASVHPTGTKNKYAGVYRCNNHLDGRCDVPPLKRKPFDKWVLENFLGMIDVGNDGESERKIAALQHEVEIVTARIKKATALLLEMDDIDELKIQLKELNQKRTELQTTIDSMRRKASLTDKELPQLKDIDLTTKAGRVECQLILSKHLKGLTLGKDSVTVTLQNDTEITIPTNPLPLNDGSPIFEIADKELLDIDAYQL

SEQ ID NO: 5908 - protein, 547 aa, synthetic construct
MKLLVTYIRWSTKEQDSGDSLRRQTNLIDAFYSKHKNDYYLLPAHRYVDKGKSGFHQQHKNQGSDFRRMFENVMSGVIPEGSLIVVENFDRFSRADIDTAIDDVRQILRKGVSILTLGDGELYDKSALTDPVKLIKHIIIAERAHQESLVKQKRIAQVWNHKTQLARELKKPMGKQAPGWLELSEDGSHYIVDEDKASLVNIIYDKRLSGMSMFAICKWLNEQGYPTINQRKVRISKTKKPDGNWSALSVKHILTSRSVLGYLPAKISSEDRKTVLREEIEGFYPQIVTDSKFYAVQQLLEETGKGKTSSGEHWLYVNILKGLIRCKCGLVMTPTGIRKPVYQGTYRCNGNKESRCSYGTVSRKLLDTQLCSRLFSKLSQLHDEATDTAKLDELQRRLNTVDSELEKLTETLIQLPNITQIQEALRVKQEEKDGLIVQLSREKARLKSVSSLDLSGLDMESVEGRTEAQIIIKRLVKEIVVSGNEKLVDIYLHNGNMIRGFPLDGKDDHTLTLEEATDEMQSLDDMLIFGEPVTRIYPAGDMEEVDA

SEQ ID NO: 5909 - protein, 559 aa, synthetic construct
MKTKLYSYIRFSSMRQNDGSSYERQIRMAREVAAKYDLELVNDYQDLGVSAFKGANSKTGALSRFLDAIGRSVPVGSWLFIENLDRLSRADIVSAQELFLSIIRRGITIVTGMDNKIYSLDTVTANPMDLMFSILLFIRGNEESQTKRNRTNSSALIKIKAHQENPQNPAVAIEEVGKNMWWTDTTSGYVLPHPTYFPVVQEIVELRKNGRSTAEILDHLNETYTPPPAVSNKKHSKWSRAMVERLFHTRALIGIKEVSVDGVNYELKDYYPRVIDDATFYHLKKNIGARAWNFGDKEEVKPIPLLSGIGLLKCDHCGCAMVKVKGTNKRSDQYRYTCDATRSRRLDCEHPNWSFRGDQLEKAVLQLLADKIWIAEDKANPVPALKVQVDEISRKIDNLIALSAMTGATKELADQITTLNSERETLYNQIKMAEEEMYSVDSQGWEKLAEFDLEDVYNEERLKVRFKIKQALKRIGCSRIDRNKNLFVLEYIDGKTQRVVIENSRGTRKGQIFVDLKTINDRQILESNGLVLHPCLDMLTDKNWKPEEEIPGPLQEFGI

SEQ ID NO: 5910 - protein, 509 aa, synthetic construct
MRRAISYIRFSSERQLKGDSVRRQSKLVTDWLDKNPEFYLDSSLSFKDLGKSAFSGKHLKGGLGDFLTAIEKGLVKAGDTLLIESLDRLSRQDIDIASELLRRILRAGVDVVTLSDGEHYTRESLKDPLALIKSILIMQRAHEESLRKSERVQAAWNRKKELISEGIKVSRRCPAWLKLNDDRRTFTIIPDKVEVVKRAFDLRLQGLSFWAITRTLNDEGHLSLNQYTPKQKGWSDTAVKKLLRNRAVIGCFTPAGREEVQGYYPAIISESLFYRVQQLNTGQYGRASVSSNPLSVNLFRGIIKCSECGATIVLGGYALKRFGMYRCPNRSANRCSAKAISRKQTDATILYMLALCDRFETENTDIIDSLKLQREDLQRKISKMAELAIELDDMTIITEKLRDMKNALSKLNHDIEEETQRIKAITTGSLKDIDRTTKEGMVETQLLIKGVLKEIVIDAAKRRCKVTFHNGKVIDLSITENPSDNVTEAIQSLSEVTERGLIDVDEVII

SEQ ID NO: 5911 - protein, 547 aa, synthetic construct
MKLLVTYIRWSTREQDSGDSLRRQTNLIDAFYSKHKNDYYLLPAHRYVDKGKSGFHQQHKNQGSDFRRMFENVMSGAIPEGSLIVVENFDRFSRADIDTAIDDVRQILRKGVSILTLGDGELYDKSALTDPVKLIKHIIIAERAHQESLVKQKRIAQVWNHKTQLARELKKPMGKQAPGWLELSEDGSHYIVDEDKASLVNIIYDKRLSGMSMFAICKWLNEQGYPTINQRKVRISKTKKPDGNWSALSVKHILTSRSVLGYLPAKISSEDRKTVLREEIEGFYPQIVTDSKFYAVQQLLEETGKGKTSSGDHWLYVNILKGLIRCKCGLVMTPTGIRKPVYQGTYRCNGNKESRCSYGTVSRKLLDTQLCSRLFSKLSQLHDEATDTAKLDELQRRLNTVDGELEKLTETLIQLPNITQIQEALRVKQEEKDELIVQLSREKARVKSVSSLDLSGLDMESVEGRTEAQIIIKRLVKEIVVSGNEKLVDIYLHNGNMIRGFPLDGKDDHTLTLEEATDEMQSLDDMLIFGEPVTRIYPAGDMEEVDA

SEQ ID NO: 5912 - protein, 559 aa, synthetic construct
MKTKLYSYIRFSSMKQADGSSYERQKRTAAEIAAKYDLELVTSYQDFGVSAFKGANSRTGALSRFLDEIGRSIPVGSWLVVENLDRISRQSIIEAQELFLSIIRRGITIVTGMDGKVYSKESVNANPIDLLLSVMLFARANEESQTKRNRTNSSALIKIKAHQENPQNPAVAIEEIGKNMWWTDTTSGYVCPDPVFFPIVQEVVELRRNGRSTAEILDHLNATYTPPPAASHKRHSNWSRAMIERLFHTRALIGIKEISVDGVKYELKDYYPRVLDDAEFYHLKKSIGVRACNYGDKEEAKPIPLLSGVNLLKCEHCGSAMVKVKGTNKRPNQYRYSCDAMRSSRIACVHTNWSFRGDQLEKAVLQLLADKIWIAEDKANPVPALKVQIDEISRKIDNLITLSAMTGATKELADQITTLNSERETLYNQIKMAEEEMYSVDSQGWEKLAEFDLEDVYNEDRIKVRFKIKQALKRIGCSRIDKYKNLFVLEYIDGKTQRVVIENSRGPRKGRIFVDLKTINDRQILESNGLVLHPCLDMLTDKNWKPEEEIPGPLQEFGI

SEQ ID NO: 5913 - protein, 515 aa, synthetic construct
MKTAIYLRKSRADLEAEARGEGETLAKHRSTLLKIAKEMNLNVLSVREEIVSGESLVKRPEMLALLEEIEDNKYDVVLCMDMDRLGRGGMKEQGIILETFKRSNTKIMTPRKTYDLNDEWDEEYSEFEAFMARKELKIITRRMQRGRVASVEAGNYLGTHAPFGYDIHRLNKRERTLTINSEEASVVRMIFDWYANEDMGANAIRSKLNDLGYKSKLGNEWNPYSILDILKNNVYIGKVTWQKRKEVKQPDAVKRSCARQDKSDWIIADGKHEPIIPESLFEQVQEKLNSRYHVPYNTNGIKNPLAGIIKCSKCGYSMVQRYPKNRKETMDCKHRGCENKSSYTELIEKRLLEALKEWYINYKADFEKHKQDDKLKETQVIQMNEAALRKLEKELVDVQKQKNNLHDLLERGVYTVDMFLERSNVVSDRITEITSTMENLKKEIKTEIKKEKVKKDTIPQVEHVLDLYFKTDDPKKKNSLLKSVLEKAVYKKEKWQRLDDFELVLYPKLPQDGDI

SEQ ID NO: 5914 - protein, 559 aa, synthetic construct
MKTKLYSYIRFSSMRQNDGSSYERQIRMAREVAAKYDLELVNDYQDLGVSAFKGANSKTGALSRFLDAIGRSVPVGSWLFIENLDRLSRADIVSAQELFLSIIRRGITIVTGMDNKIYSLDTVTANPMDLMFSILLFIRGNEESQTKRNRTNSSALIKIKSHQENPQNPAVAIEEVGKNMWWTDTTSGYVCPDPVYFPIVKEIVELRKNGRSTSEILNYLNDTYTPPPAVSNKKHSKWPRAMIGRLFHTRALIGIKEVSVDGVKYELKDYYPRVIDDATFYHLKKNIGARAWNFGDKEEVKPIPLLSGIGLLKCEHCSSAMIKVKGTNKRADQYRYSCEGIRSHRFDCEHPNWSFRGDQLEKAVLQLLADKIWIAEDKANPVPALKVQIDEISRKIDNLIALSAMTGATKELADQITTLNSERETLYNQIKMAEEEMYSVDSQGWEKLAEFDLEDVYNEERIKVRFKIKQALKRIGCRRIDRNKNLFVLEYVDGKTQRVVIENSRGTRKGRIFIDLKTINDRQILESNGLVLHPCLDMLTDKNWKPEEEQAGPLQEFGI

SEQ ID NO: 5915 - protein, 506 aa, synthetic construct
MRHAITYLRFSSAIQGVEGADSTRRQNDLFKQWLKKNIDAQVVASFSDEGLSGYKGKHLSGQFGDMLSRIESGEFPEGTILLVESIDRIGRLEHLETEALMNRILGNGIEIHTLQDGLVYTKDALADDLGISIIQRVKAYIAHQESKQKSFRVSQKWKQRAKLALAGKQRLTKMVPGWIDPETFKLNEHAETVRLIFKLLLDGESLHNIARHLQANNISSFSRRKDANGFSVHSVRTILRSETTIGTLPASQRNDRPAIPNYYEAAIDAATFNKAQEILDKNRKGRTPASDNPLTINIFKGLFRCQCGASVHPTGTKNKYAGVYRCNSHLDGRCDVPPLKRKPFDKWMIDNFLGMIDVGNDGESEKKFAALQHEVEIVTARIKKATALLLEMDDITELKAQVKELNQKRTELQTTIDSMRRKASLTDKELPQLKDIDLMTKAGRVECQLILSKHLKGLTLGKDSVTVTLQNDTEITIPTNPLPLNDGTSIFEIADKELLDIDAYQL

SEQ ID NO: 5916 - protein, 583 aa, synthetic construct
MTQTQIHATISPCTPILSADPTVKEDVMLDQQKITILYCRLSNEDALDGESNSIQNQKEFLTRYAAEHGYTNLKILVDDGYTGTNFDRPGVQEGFALVKQGLVGCWLVKDLSRFGRDYLTVGQYTDIIFPSYDVRFIAVNDGVDSERGDSDGFAAIRNLFNEWYPRDTSKKVRVVFRQKGTSGKHLGKPPYGYRTDPADKDHWIIDEDAAPVVKRIFDLAIDGKGPEQIARILEQDKVLTTKALYAKQSENHPDPKKRKKMPERPYHWIGQSVAGILERMEYTGCTCNFKTYSKSYKLKKRIPNAIEDMCIFPDTQEAIVSQAQWDRVQELRKNKRRPTKAQRQGLFSGLLFCPDCGNKLHFATCKSFDGKQDHYVCSSYKSGRGTCSAHYIREDVLRELVLERIRAVNAYIRQDVESFQEEWLQCRRSDQERNIREDRKRVEQAKKRLADLDVLLSRLYEDFVLGDLSKERYKKMTADYEAEQERLKLEIEVTEEWLETQETMSADVDAFVALTQKYVDVPELTPTIVNEYIKKIEVFAPDKSSGKRVQKVKIYFNFVDDVEIPVISEPVVAKSTPGRRKTA

SEQ ID NO: 5917 - protein, 513 aa, synthetic construct
MATAKVISPLARRPGTKTRVAAYCRVSSSSADQHNSYIRQVDVYTKLIANNPDWELVEIFADEGLSGMKAANREQFQRMIQMCELHQIDMIITKSVSRFARNVKEALEYCRKLKLLGIGVKFEKEGVFTLSMADEMLLNTFAAMAQEESKAISQNQRLSILKRMQSGEYVDSNAPYGYRLVDRQLSVYEPEAQVVRFMYHQYLKGHSTTEIARELNERGIPTKTGKQIWRSSKVSYILRNEKYKGDSKYQKTYRESFVPFRQYKNRGEEDMYYAEQTHPSLIDVETFETVQKLFAKRQKTFGQCSTNTTYPLTGRIQCSECGSFFHRRQVSGCVKWACSKHIQDRHLCDSEYYTEERIYTGILTVLNKLRFGGTDVLGQTLKMLESALTFTKQGNMLVQQSDREISELNSKLLMLEKMNAKGYLDGDMVKAQTLEITARLSELKRQRQNAIISKLPAMIVDIKHLKSLLWEIEEPLVEFDEGLMHDTVREIAINKHGEMMVTLLGGLSFTEKL

SEQ ID NO: 5918 - protein, 545 aa, synthetic construct
MTATKISKKNITVMSPPKAMTVDKEKYHQKRVAAYCRVSTDSEEQLTSYTTQKKVYTEMIAARPDWELAGIYADEGISGTRADKRPQFQKMIKDCFAGKIDYIVTKSVSRFARNTVDCLEHVRILKNRGIGIFFEEQNIDTLSIDSELYLVIYAGFAQSESESMSKNITWAYRKRFEDGKVLMQYKSMLGYRKGADGEPEIVPEEAKIVTRIFDMFLSGQTVRAISEQLRSEKIHIPGKNFSFSHVMVYNILRNEKYCGDSILQKTITVDCISKTRRDNMGEAPMYYVQNSHPAIISRETYHMTQAEIARRKTLAPASEKKAVTVAGKYSKYALSEVLVCGECGSRYRRVTWTSGGKRVVWRCSNRLENGKKYCKMSLTVKEESLHAAIVRAINKFNSQDHAAYLALMKATIGEALGIQAETAEIDELKRRIDALNQKMVSIIQKAARDGEDIEEHESEFKEMAESIALFKQRISVLEQAKSTDAEMSERMAKIQEIIDERQAHQDVYDDSIVRQMIECIKVFSNGNIEVYFGGGNCIHETIAFD

SEQ ID NO: 5919 - protein, 543 aa, synthetic construct
MNLTKAKETKTRVCCLYRVSTKGQVDKAENDIPMQKKACHEFAESKGWTIIKEHAELGVSGFKVAAADRDELQEIKREAEKQEFDILLVFMFDRLGRKDNETPFVLKWFVEQGISVWSTVEGEQRFDSNVDDLLNYIRFWQASSESQKTSVRIKTRMKQIVEDGHYMGGTVPFGYRAVYKGRMNKKGRPVKDLEIDPREGEIVREIFFKVAREGYSAHGIARMLNERNIVTHGGARFQTNHVLRMLRHRGYTGYMIAKENTSGFIPELQIVEESIYEDAMAIVEQRKKENEQRRSVAQSSYNKTLLAGNLYCAHCGTRLSGFWHKDRYKLADGTVKEVMAPKYNCYAKGLKVRPCDGQQLYKAEIVDEIVEGIAKDIFAMISRMPKDPTIEAQLKKNIQNKENLLRELDAKLQSAKKELELYEAQIIKCIEGKSKLSEATLARMISRAEDSVAVYEKEIEKARMDKQNQKDTAAQIEDFYKEFKGWADEYESAALERRRVILSQLFSRIEIGRGYEVKVEIAMSYKQFLNLSENPQTGNRTVA

SEQ ID NO: 5920 - protein, 502 aa, synthetic construct
MEFIREDCIYARQSVDRKDSISIESQIDFCKYELKGGSCRVFKDKGYSGKNTDRPEFQKLLGEIRKGKVRRVIVYKLDRISRSILDFATMMELFQEYDVEFVSSTEKFDTSTPMGRAMLNICIVFAQLERETIQKRVTDAYYSRCLKGFHMSGQAPYGYQLEPTVVEGIRTKKMVADPIAADHVRLMFEMYAEPETSFGDITRYFEEHDIKIYGKSMFRTFLSQLLRNPVYAQADLELYEFFKSQGAAIVNDASDFAGTNGCYLYQGRDVKEDKDRCLKDQILVIAPHEALISSDTWLKCRKKLMANTTFQQGRKPKNTWLAGKIKCGHCGYALKATHVPNSTGYFRCTKRTENKGCPGCGKIRKEEFEQFIFSAMQEKFKDFQILHGREEKVNPKLTAYQVELAQVEAEIEKLLDTLTGANATLLAYANKKIEELDTRRQTISKAIAELSVETISPQQIKKLSYYLDNWESIDFDDKRKAADGLISTIKATSDRVQIEWKI

SEQ ID NO: 5921 - protein, 595 aa, synthetic construct
MADVQVIKASTSRVNRKNAKVIERLRVAAYCRVSTDSEEQLSSYNSQVEHYRNMVENKPDWALVDIYADEAISGTQTDKRLDFQRMINDAVDGKIDLIITKSISRFARNTLDTLKYVRLLKEHNVAILFEKENINTLTMNGEMLLVILSSLAQQESESISANVKMGLKMKMKRGEMVGFNGCLGYDYDPINKVITINEEEAKTVRYIFQRYVEGAGCFVIAKELTKLKYKTKKGNTNWNDGSVRGIIKNEKYKGDLLLGKTFTVDPISHRRLDNMGEEEKYYINSHHEPIISEEMFNEAQKILNKRNSGSNNMGRKEKYSRQFAFSSKIECGFCGGTATRRRWHSNTSHEKTIWHCVVSTKKGKKYCPDSKGIDEKIIENAFLEAFNMFCLQNKEIVEEFMETVENTINATNSIKELKKLQREVSAIENKIRKLVDMRIDEMIDKDTYELKYTELSTELEKLKTQRDEAELVNEDNIDVKKRIESFRKVFDSNKPIKEFDRVVFESAVNKIILGGTDEEGNKDPYMLTFIFNSGMSHSLKGKDVVKFNGDSKEGKVCSYTEHATCGDGGKAAKETQLETLTYLVSKNRENRNNSV

SEQ ID NO: 5922 - protein, 539 aa, synthetic construct
MKKQKNLYNAALYCRLSRDDENSSESESILNQKQILSDFAKENKFNIVDYYVDDGYSGTNFDRPAFKRMIKDIENGTVNVVITKDLSRLGRNYILTGQYTEIYFPSKGVRYIAINDGFDSNNSDNDIAPFKNIINEMVAKDTSKKVKSVFQAKMKKGEYIGSYAPYGYKKDPENKNRFIIDEPAAEIVKRMFYLATIGYGSRKIAKTFNEEGILPPAVYRCLHLTHTPVEKFTKTSRWSDQAVNDMLHNMAYLGHMVQGKSKKTSFKVKKLEMQPKEDWIIVYNTHEAIIDKELFDEVQYRLKSKYREKRIGINLFAGITKCADCGYAMTYSPRHKKGLASLFCSNYRRRGKEGCTNHMINYDLLCEIVIEEIRKYAQLAIEDEEAILKKLKDKTKDTDKIGKIALEEELTKAEKRYREIDDLIQHLYEDNVRGKITDERFTKLSVNYENEQKEVKERITNLKFDIVNFKDTSKNNERFIELIKKYSNITELNPVIMHELIDRIEIGQGYYEKSEATGKREKHQDITIYYKFIGNLEQK

SEQ ID NO: 5923 - protein, 416 aa, synthetic construct
MAQVSVVTPVRPPTPKLVNVAAYTRVSTNAVEQLASLSAQVSYYSRLIQSTPGWAYAGVFTDEGITGTSMKSRQGLADLMNAARAGKIDLVLCKSISRLARNTVDLLATVRELKDLGVAVRFERERIDTLSADGELLLTLLASFAQEESHSLSQNVKWAIRNRYKNGGTNSFVVYGYSWADGEFTIIDDEAKIVRLLFANYLDGISPEKTAAILNGQGVRSRGGGRFYGSVFRRMLENERYKGCQMLQKMYRPAIQAPTRALNDGELPRYWVEQALPPIIDKSVFDAVQAEIAYRREIGPAATPSKNTGVFTGRICCGACGKNYQRKTRTYKSGTSYKFWRCWSACTGNGNPCRGHNLRETLLEHACADMLGTQSFDPVQVGEQIVMIEAFPHQLTFHLADGTMTPVGLTSEGRLA

SEQ ID NO: 5924 - protein, 523 aa, synthetic construct
MSRTVTAIPATKKVRSAAASSGVPARRRVAAYARVSTEMEEQTSSYEAQIDYYTTYIHSRNDWQFAGMYADEGISGTSMKRREGFQTMIDDALAGKIDLILTKSVSRFARNTVDSLTTVRKLKDAGVEVYFEKENIYTFDAKGELLITIMSSLAQEESRSISENVTWGHRKRFADGKVMVPYKSLLGYKKGEDGSLVIDETQAPTVRLIYQLFLDGMAISEIKTELAARKILTPRGKEVWSTSTVRSILSNEKYKGDALLQKTFTTDFLTKKMKVNEGEVPQYYVTGNHEPIIAPRIWDQVQYELATRHANISSAKVGLFSTRLKCAQCGSWYGRKTWASNTKYKYTVWQCNHKYAGEHPCSSATMKDEDIKNAFVQALNQLIARQPRQSHLLQIFDSMFDTSRMEEQAAACQTKIVELTEQIEALIAENQQRALDQDAYQNKYTELDTAYRKTLARKTSLEADIAANTAKHAAVTTALGDLAGEPVSEFRPAQWSALIDHAIVDEDTIRFVFRVGEVVRVQL

SEQ ID NO: 5925 - protein, 521 aa, synthetic construct
MTEKNIMVIPARKRVGSTAAKEKIKKLRVAAYCRVSTETEEQNSSYEVQVAHYTEFIKKNNEWEFAGIFADDGISGTNTKKRDEFNRMIAECMDGNIDMVITKSISRFARNTLDCLQYIRQLKDKNISVYFEKENINTTDAKGEVLLTIMASLAQQESQSLSQNVKLGLQYRYQQGKVQVNDKRFMGYTKDEVGNLIIVPEEAEIIKRIYREYLEGQSLAGIGRGLEKDGILTAAGKPRWRPESVKKILQNEKYIGDALLQKTVTVDFLTKKRVKNEGHLPQYYVENSHEAIIPKDLFLQVQEEIHRRRNIYTGADKNKRIYSSKYALSAITFCGDCGDIYRRTYWNIHGRKEFVWRCVTRIEQGPEVCKNRTVKEDELYGAVMTATNRLLAGGDNMIRTLEENIHAVIGDTTEYQISELNSLLEENQKELISLANKGKDYESLADEIDELREKRQTLLIEDASLSGENERINELIEFVRDNKYCTLRYDDTLVRKIIQNVTVYEDHFVIGFKSGIEIEVE

SEQ ID NO: 5926 - protein, 520 aa, synthetic construct
MKKITKIDELPQGQLPNTKLRVAAYARVSTDSDEQLESLKAQREHYERYIKSNPEWEFAGLYYDEGISGTKMEKRTELLRMIRDCKQGRIDFIITKSISRFARNTVDCLELVRKLIDIGVYIYFEKENLNTGDMESELMLSILSGFAAEESASISQNSQWSIQKRFQNGSYVGTPPYGYTNIDGEMVIVPEEAEIIKRIFAECLSGKGGGTIARGLNKDKIPARRGNHWSAGTVIDMLRNEKYMGDILLQKTYTDSNYNRHPNTGEKDQYYYKDNHEPIISREDFAKAQDLIDERAKMKCKGVKKNVYLNRYALSGKIVCGECGRNFRRKTNYSAGRSYIAWSCIGHIEDKESCSMLFLRDGEIKATFTTMMNKLAFSHKLILEPLFKSISQIDEESDRERMDAIDKRMEQLMEERNTLITLMAKGFLEPALFNQERNVLDSEMKNLSTEKTNLVSNSASELLRANEIKDLINYVSADNFNGDYTEELFEEFVVNIIVNSRDELTFNLKCGLSLKEKVVR

SEQ ID NO: 5927 - protein, 512 aa, synthetic construct
METTNKIPCGIYARVSTDKQGDSVENQLSQGEEFISRLGDTYYLDEDCIFVDNAVSGYYTSVFDREAMKNAIEKAKSGRCKVLIFKEVSRVGRDKQENPAIIGMFEQYGVRVIAINDNYDSNNKDNITFDILSVLSEQESKKISVRVSSAKKQKARRGQWNTDAPIGYKLNSETKKLEVDQDSGHIVQTIFNLYTEKGMGTFSIAKTLNDKGERTRDGNLFSRTSINRILKNQAYIGHTVYGKRRNVLQRNYDDTGRMTKKKVVQKIDPSDWTIVKNTHEPLVSEEVFYRAQGILSERTHHREPRRAYHPLTGILFCKKCGQGMVCQKRSFKDKEYRYYICKTYHKYGRDACPQANVNADELESDVIKIVRNRVRTLDKNKLAAFNNRSSDIARLEEDKKSRMKLLDRLYRDQRDLFDQRDLFPEAMYKEQMIELKTKAEGIEEEVNIITNQISAIEAVSNETANIYKIITEFLELDISDIGRLRTILHELIKKIDLENNHIDIEYRIKLFS

SEQ ID NO: 5928 - protein, 610 aa, synthetic construct
MKRPDNNKITALYERLSRDDELNGDSNSIVNQKKMLEKYAKEQGFTNLAHYTDDGYSGTNFDRPDWKRLTADIEEGNIGCVIVKDMSRIGRNYLEVGFYTEVLFREKGVRFIAISNGVDSTHSESNEFAPFLNIMNEWYVRDTSRKIKSVLRNKGMEGKHLTSNAIYGYKKDPEDNNHWLVDEEAAAVVRRIFQLIIEGNGPMQVARILTNEKVERPSYYLAKQGLGTCRGKCDMTRPYSWTATTITDLVSKPEYMGHTVNFRTFKESYKDKHSQYANPEDWLIFRDTQEAIVDEDTWYMVQKIRETKHRPIAQGKANPLTGLMFCADCGAKMFNHRTKGYEKKDKDGNPTGKYTNAQNNYTCSTYSKAKGHFENKCSQHHVRTDVVRDLILTTLQYTASYVKEHEDEFLEKVRKSNVLKQELDTKALTKKIAKSEKRVAELDHLIKRIYEDNVSGKLSDKRFELLSTDYEKEQSELEEFLTSAREQLATAKEEASNVNKFIALVHKYTDFSELTTPMIHEFIDRIEVHEADKSTGERTQEIDIYLKYVGKLDVPMPELTPEELAEEERKRRKRAWNRTYNRRKAEKERAEKEKAALEAATDTDKSKKGA

SEQ ID NO: 5929 - protein, 569 aa, synthetic construct
MTNQKEKIVALYVRVSTGYQVDKDSLPFQKKELKAYCEHVLHVDKKRIEVFEDAGKSGKNTKRPAFERMMGKVKAGKVSHVVVYKIDRITRNLVDFSLMYDDFKYNNVTFISLNEQFDTSSAIGEAILKIILVFAELERKLTSERVTDVMIGRAQSGQWNGARVPYGWDWDAENKCPVHSKKEAPYAKAMYQMYLDGGSSVTIRDYNNSHNIPTKRGGEWTSKTVADFLRNPINKGAYRYNYRESARGKRKADEEVIYMEGVFPPLIDPEIWNEVNRRMDANHTRKNTSAMHPIRKNCNVFAGLIVCGKCGSNYQVTAKDRRRGNGFRPSSYACTGKYQKKHCDNLNVSDVKIGPFMINYIAAIIDASKSRRFIKDTESLERVILSHIDFTDVAGISESSLQDTIDLLYGRSGAETLSGKPVSKDGKNTDTTEKKKELQEKLQKTDRALERLKKAYLFDDDAMDEKEFLEMKTKLEVNKVKLENSIKSLDSSSISENVDQAAFIKSASQFLISHKINSGGNIEYSELAMMDEEAMKTLMNSIIDHITVMDRHITEIVFKNGLTHTLLYR

SEQ ID NO: 5930 - protein, 563 aa, synthetic construct
MAEVEVIKAVEGPILRKRDYEGKPLVITRQRVAAYVRVSTDGDEQLESFQSQKQYYQDKISENRDWVMVGIYADEAITGTKVDKREQFQRMIQDCMDGKIDVIMTKSVSRFSRNTVDILQYVRLLKERGIAVIFEKENINTLTEQGEMMLTLMGTLAQNEVESTSKNVKLGIKMKMKRGELMGFNGCLGYDYHPEDKTITVNEAEAETVRLIFELYLQGYGTYTIAKRLEALGKLNKKGVAKWTDSGVRGIIKNEKYKGDLLLQKTITTDPISKRRIENFGEEEQYYVRDHHEPIVSREVWEQAKEIRLSRNHQSDKKADGKREKYTKKYAFSSMCECGFCGTKLTRRTLHSSSKYETPVWYCRNAANRGKHNCPNSKSVHESILENAFLEAYKLLAGSFDDVIDSVIGTIESIGANNDDIARLKKEQKTLDNLEQRRKKLTDIYLDDGLTKEAYDEKYEELTVKIQKSKDSIELLQNNVSNQKDVGKRMASLKKALADGDILDEFDRVVFESIVEKVIVGETNEDGTVDPYKLTFVMKGNGNSVVPNAKEWFKAEKSAIQPA

SEQ ID NO: 5931 - protein, 557 aa, synthetic construct
MNRYGKRCVLYPRVSTEMQVDGYSLEGQKNMLTRFADREEMIVVDTYEDAGKSGKSIEGRPAFQKMLRDIEDGLDIDYILVYKLSRFGRNAADILNSLELVQSYGVNLICIEEGIDSSQTSGKLLISVLSAVAEIERENIIEQTMNGRREKARQGGWNGGFAPYGYTLEDNKLMIEETEAVAIRKIFELYTSSEIGLGGIANQLNLQGIRKIPRQNGTLEDWTGHFIKLILDNPVYCGKIAYGRRTKEKVKGTKNDYQMKRNDDYILTEGQHKGIVSEEVWEKAHAKRLRTGVKQPSKIGRDRVHLLSGLLKCPVCGSPMYTNKHAWTNKDGTYKEIYYYVCSRNRMVRGKHCEYKAMLKKTDIEPMVIEAIREIVRNEEYAQAIKKRIGVQIDTKAVDKELEGYQAKLKEVDLNKTRLEREIDSLPADAKYRERKLHDMTLRLDSLYDVIVELEEKIEDARLRRDAIKQQAITLENIYKIMVNFDCVYNIINDEEKRNVVTALIKEIEIYRNDESEYPLKRIGLNFPVFKDGGEVTELLWDKGNTVETVALITRIK

SEQ ID NO: 5932 - protein, 626 aa, synthetic construct
MRNEKITPLYERLSRDDELQGESNSISHQKQMLEDFARRNGLPNPTHFTDDGISGTRFDRPGFLAMMEEVEAGRVEAIVIKDMSRLGRDYLKVGQVMEILRQRGVRLIAINDGVDSLKGDDDFTPFRNIMNEFYARDTSRKIRSVFKSKGMSGKHLTGTVIYGYLWDEKREHWLVDEEAAAVVRHIFALAMEGYGPYQIATKLSEEKIEMPAVHLARYGEGVNKNKAFADIYRWSASTVVEILKKQEYLGHTVNFKTRKHFKDKKSHYVDESEWTIFENTHEVIIDQETFDNVQRIRGNARRYPDGFGEAHPLTGLMYCADCGGKMYVHRTYNGKRVPQYTCGQYGKYPIGSLCPTQHRIKAEAVLTLIADMLRAIAEYSRNDRAEFIRTVQETQVAQQTADISKKRKRLAAAQKRAGELEKLICKIYEDNALGKLPDARYEALDAQYAKEQDALNAEIVELEKAVTGYEQSRKSAEKFIALIDKYENFDTLTNTMLNEFVEKILVHERARKGSQDTTQEVEIYFNFVGRYIPPALQPVPLTPEEQEELRKKEERKDRLHQNYLRRKANGKQKEWEERYNAKRKAKMEAAKAAIRAEDMEKGIFTTVSQLPRQEPRKATLPASAAV

SEQ ID NO: 5933 - protein, 627 aa, synthetic construct
MTEKQGFMTALYERLSRDDELNGESNSISNQKKLLEQYAKEHGFTNLVHFTDDGISGTRFDRPGFLAMMKEVESGKVGTILIKDMSRMGRDYLKVGQYMELLRQKNVRLIAVNENVDSFREDDDFTPFRNIMNEWYARDTSKKIKSTFKAKGKSGKHVASTTPYGYLKDKDDPNVWIVDEEAAVVVRRIFHMTMDGYGPYQIARALKEDKVEIPAVHMAKKDAGLWKGRVEEIKDPYGWGSSTVAGILKKREYLGHTVNFKTRKHFKDKKSHYVSEDNWTVFENTQEAIIDQETFDNVQRIRSNVRRYPDGWGEAHPLTGLMYCADCGSKMYVHRVNNGKRVPQYTCSAYSKVPVGTLCQTQHRINADVVMELIKELLKAVAEYSQLNREEFLETVKKSQTSQQSSEIIRLKSRLAEAKKRVQELEKLICRIYEDNILGKLPDERYAILDGQYSKEQKDLSAEIADMEAELSGYEEGRRSAEKFIALVDKYQNFDELTTYMLNEFVEKIVVHERDRKGSIETTQEVEIYFNFIGKYLPPHFGEVEMTSEEIEEMKKREARKDRLHQNYLKRKANGKQQEYYERTKAKKKAEMDAKKEEIRQEDIAKGVFVPVSLLPPAEPKKGVASA

SEQ ID NO: 5934 - protein, 523 aa, synthetic construct
MAKVTTIPATISRFTATPINEKKKRRTAAYARVSTDSEEQLTSYSAQVDYYTNYIKSRDDWEFVSVYTDEGITGTNTKHREGFKRMVADALAGKIDLIVTKSVSRFARNTVDSLTTVRQLKEKGVEIYFEKENIWTLDSKGELLITIMSSLAQEESRSISENCTWGQRKRFADGKVTVPFKRFLGYDRGPDGNLVLNKDEAVIIRRIYSMFLQGMTPHGIAARLTADGIKSPGGNDKWNAGAVRSILTNEKYKGDALLQKSYTVDFLTKKKKVNEGEIPQYYVEGNHEAIIQPEVFELVQQELERRKSSRGRHSGVHLFSGKIRCGQCGEWYGSKVWHSNSKYRRVIWQCNHKYDGEEKCSTPHLTEDEIKAMFVSAANKLIGKKAAIISPLRNSLDVAFDTSALETEVAELQDEIMVVSDLIEKCIYENAHVALDQTEYQKRYDGLTTRFDTAKARLEEIEAALADKKSRRAAIDAFLDTLAQADPMEKFDPALWCGLIDYVTVYARDDVRFAFKDGQEIKA

SEQ ID NO: 5935 - protein, 548 aa, synthetic construct
MKVAIYSRKSVFTGKGESIENQIEMCKEYFSRLNGNDVEYSIYEDEGFSGGNINRPRFQQLLKDIKKNSFDALICYRLDRISRNVADFSTTLELLQEHNVDFISIREQFDTSTPMGRAMVYIASVFAQLERETIAERIRDNMLQLSKTGRWLGGVCPLGFTSEKITYVDSEYNERSMFKLSPLEEEMNVVRFIFSKYLATSSIHMALKELLASNIKGKHGGDFASMSLADILKNPVYVQSDSSIKEYYESLGVNFFGEPNGCGIMLYNKKNSKGKLRDMSEWIAAVGKHKGIISSSDWLKVQYSLDRNSKKNNPRQGTSAKALLSGVLKCSICGAPMRVCYGRLRKDGKRNHYYMCTMKAHSCKSRCENPNAKGLELEQEVINRLINYNEETLLRKLTSYADELKSSTPNDMIKNIDKSIDEKKSEMDTLMSQLGKTNNPATQNFILKKADSLSNEIMDLENKLNGIHKKKEQNSIEMRNIEIIMSSFSEFTKLCSTIKDVSNIEDENIKIALRNLINRLVSKISYNGFTKEVVIDIMGSQENCSPSG

SEQ ID NO: 5936 - protein, 561 aa, synthetic construct
MNKTSMIPYSVPRKSSDSISEITPDYGVDNLLVGNRVWCLYRVSTNQQVDHDEKNEADIPMQRKACHRFAKKMGWTIIHEEQEEGVSGHKVRAENRDKLQIIKEAAKQKKFDILLVFMFDRIGRIADETPFVVEWFVKNGIRVWSTKEGEQRFDSHTDKLTNYIRFWQADGESEKTSIRTSTRMGQIVEDGFYTGGSCPYGYKLVRQGRVNKRGHELYDLVINEDEAPLVRMIFEKYVEEGRGAQSIANLLNSLNVKNRSGHNWHPSSIRGMIKNITYIGILRSGESRSQVLPHLRIIDEQTFGAAQEITRQRSKHHEDTRHVPMNIKGQSLLAGNVFCGHCGARLSLTTNGKGRPRSDGTDAVRVRYVCQTKTRKHEPCGGQTGYTLHILDSMIEDIVHKIFRRVKCLSRSEILGAGYAAKMSEQKAIARRAQREYQKAENDLKGLRSEVVKAVNGESAFPLDLLSSLVKETEQKCVQLQETYQKAQAEVDKSDILMDELRATYNQFIGWSNIYDTANIQTKKMIVCQLIERVDVFRGYELKIKFSISVEQFILGLDISA

SEQ ID NO: 5937 - protein, 506 aa, synthetic construct
MRHVITYLRYSSAIQGAEGADSTRRQNDLFKQWLKKNSDAQVVASFNDEGLSGYKGKHLSGQFGDMLSRIESGEFSKGTILLVEAIDRIGRLEHLETEALMNRIIAHGIEIHTLQDGLIYTRDALSDDLGISIIQRVKSYLAHQESKQKSFRVSQKWKQRAKLALAGEQRLTRNVPGWIDPETFKLNEHAETVRLIFKLLLDGESLHNIARHLQSNGIRSFSRRKDANGFSVHSVRTILRSETTIGTLPASQRNDRPAIPNYYEAAIDAATFNKAQEILDKNRKGRTPASDNPLTINIFKGLFRCQCGASVHPTGTKNKYQGVYRCNNHLDGRCDVPPLKRKPFDKWMIDNFLGMIDVGNDGEAEGKIAALQHEVEIVTARIKKATALLLEMDDITELKTQVKELNQRRTELQTTIDNMRRKTSLSDKELPQLKDIDLTTKAGRVECQLILSKHLKGLTLGKDSVTVTLQNDTEITIPTNPLPLNDGSPIFEIADKELLDIDAYQL

SEQ ID NO: 5938 - protein, 603 aa, synthetic construct
MQQPAQNRMAYSYIRMSTEKQIKGDSMRRQLEWSQTYAARHGLDLQDVTSFADIGVSAWKGLNRSKGRLGAFIELAREGTIPSSSYLLIENLDRLSRTTPLEALDLFKEILQLGITVVARGEFGDEETYTWNSLNSNSNQLISTLTSMLRANRESERKSQLIRSSMKNRRVDARLGKKTNQTPPSWITATKITKGEYEYHLNDRADVVRWIFERSAEGVGFDRIARELNAKGEPTLKPSKRGWWHANIQAIVTSRSAIGEYQPGEMIDGKYVSEGDPILDYYPAVIGHDLWLRAQKIVHRNRKGGRAGTQFSNLLDGLAECVHCRSRMYMIGNSRSDKQWKYLVCSTNFRNIMRTNEVTGETVPVCPIGRSRFRYDILERSILENVTEFGGDDLLKQGKVTAEIAEIDEELAKLSISLIDLRKREARLTEVIETEDGAQIAGLLKALRERTVEREDAEKRQETLRHDREVMAAKHAALDPASAIEAMRQAWEAADDETRYALRVRTNASMKGMIDHVEFDSEGNHYTVIIEQGRRAYRFANPKFVRKDIKIIPQVANFVQHAIDVPLGVYTSNQQSPEMSAVSESIERLKSLPVKASLTAEKE

SEQ ID NO: 5939 - protein, 558 aa, synthetic construct
MNRYGKRCVLYPRVSTEMQVDGYSLEGQKNMLTRFADREEMIVVDTYEDAGKSGKSIEGRPAFQKMLRDIEDGLDIDYILVYKLSRFGRNAADILNSLELVQSYGVNLICIEEGIDSSQTSGKLLISVLSAVAEIERENIIEQTMNGRREKARQGGWNGGFAPYGYTLEDNKLMIEETEAVAIRKIFELYTSSEIGLGGIANQLNLQGIRKIPRQHGTLEDWTGHFIKLILDNPVYCGKIAYGRRTKEKVKGTKNDYQMKRNDDYILTEGQHKGIVSEEVWEKAHAKRLRTGVKQPSKIGRDRVHLLSGLLKCPVCGSPMYTNKHAWTNKDGTYKEIYYYVCSRNRMVRGKHCEYKAMLKKTDIEPMVIEAIREIVRNEEYAQAIKKRIGVQIDTKAVDKELEGYQAKLKEVDLNKTRLEREIDSLPADAKYRERKLHDMTLRLDSLYDVIVELEEKIEDARLRRDAIKQQAITLENIYKIMVNFDCVYNIINDEEKRNVVTALIKEIEIYRNDESEYPLKRIGLNFPVFKDGGEVTELLWDKGNTVESVVLLSKVHN

SEQ ID NO: 5940 - protein, 520 aa, synthetic construct
MKNVTKINQVDFSVFKKTRVAAYCRVSTDSDEQELSLETQKNHYESYIKANSEWEYAGIYYDDGVSGTKTAKRDGLLRLMEDCEKGLIDLVITKSISRFSRNTTDCLTLVRKLLNYEVYVIFEKENINTGSMESELMLAILASMAESESRSISENEKWSIKKRFQNGTYVISYPPYGYANVDGEMVIVPEQAEVVKEIFAGCLAGKSTHIIAKELNEKGVPTKRGAKWTGATINGILTNEKYIGDALFQKTITDASFKRKRNYGEEEQYYCENHHEPIIDKDTFEKAKEAIRQRGLEKGNCSEDTSKYQNRYAMSGKIKCGECGRSFKRRYHYTSHGRSYNAWCCGGHIEDSSSCSMKFIRDDDLKRAFLTMMNKLVFGNDLVLKPLLISITTSNSKKNIHSMEDIEKDMQGNEEQRKQLNTLLTRGYLESPVFAEAHNKLVMEYEQLTAKRDLLYRMDNAGYTMEQALSDLVSFLNGAEPFTEWDDFLFERFVEKVKVLSREEVEFELKFGLKLKERID

SEQ ID NO: 5941 - protein, 522 aa, synthetic construct
MGNIMLIPARRQVGSNARKQEEEKPKLRVAAYCRVSTDSDEQATSYEAQVEHYTEYIQKNPDWEFAGIYADDGISGTNTKKREEFNRMIDDCKAGSIDMIITKSISRFARNTLDCLKYIRQLKDMNIPVLFEKESINTMDAKGEVLITIMASLAQQESQSLSQNVKMGLQYRYQQGKVQINHNRFLGYTKDADGNLVIDPEQAETVKRIYREYLEGLSMDKIADGLERDGILTGTGGKKWYTSTINKILRNEKYIGDALLQKTYTTDFLNKTRVKNNGLVPQYYVEGDHEAIIPKDIYLQVQEELVRRRTVKTSANGKKRNYSCNHCFSQIVICGECGEMFRRLHWNNRGVKSIVWRCISRLESTGLECHARTINELVLQDTVVKALNQMLGDKSNYQAQLQLNIAAVIRASQATTIDSIDEKLMALQQELIQKANSKEDYDEIADEIFRLRELRQKTTVDTAARDEQIKRINDLQDYISQQTALLTEFDEALVRRWIKQITIWDDRITVELKSGVSIDVDA

SEQ ID NO: 5942 - protein, 521 aa, synthetic construct
MKKVTKIDGVQKNTAINSKLRVAAYCRVSTGSDAQLESLEAQKSHYEQYINSREDWQFAGLYFDEGITGTKAEKRPELLRLITDCEARRIDFVITKSISRFSRNTTDCLALVRKLQSLEIPIYFEKENINTGSMESELFLAILSSMAEGESASISESAKWSVKRRFQNGTYKLGYTPYGYDWDGKNMIINPDQAAIVKRIFADILSGKSTNAIADELNEEKVPSKKNINWTSSTIRGILANEKYTGDVIFQKTYTDENFNRHTNYGEVDQYMAPDHHEAIISHSDFDAANALVNQRAAEKGIEKGSDKYQQRYAFSGKIICGECGDTFKRRIHSCTTYKYVAWACNTHLKNKKACHMKYIRDDEIKAAFITMLNKLIYGYRLILTPYLKVLENSSGDEAIQRIQHLEQLIAQNSEQREALTKLMAQGYIDQILYNQETNALLLQAETYRSDIEAITIGMTGDAAKVTETNLLLHFVSHTDMLTTYSEELFENYADHIEVINRNAIRFVIKCGLTFTERIGD

SEQ ID NO: 5943 - protein, 503 aa, synthetic construct
MLQPRDLKGRTAISYARWSSERQGAGDSLRRQTEEAERFCDTYGLKLDRQIIDDGVSAFKGANLEADLGRFVAAVRSGEIPSDVVLLVEALDRVSRVNHMDALEYLSGLLKTGVTVVTLMDNRVHTLDDYRNNVASILMSLMAMSAAHEYSAKISERVRASWRGRAEKAKQGSIRISKVPFWIDRETQELNERADTARQIFAWAEEGLGQAAITQRLNALGIPSPSGKPKWGKDAVSTTLSNRAAYGSYTVKGEEIRDYFPPIVTEAQWLALRDRTAARTHNPQASNTANLFSKLLRCAHCGSPLNLTSSKQKGRTFRYLSCSGRAFKRTDCTMPNWNYQEVEDEIISRLGFLAVPLDEGDNSADSGREREIEEAIKVLSSRYDNTIAAIVDAEEPAVRQALTKKADEIAGQKQAKESELAGHRQSMARISVSAVADIAADTEEIRRLVREDRAKAKELIGDLIERIELEVDREEDRTGGDEMRFAHVTIRGRKPHTIGFTQG

SEQ ID NO: 5944 - protein, 545 aa, synthetic construct
MMQATSVQPQKTVRIIPATIDTKAAITQSYRQLRVAAYCRVSTKQDEQLNSYEVQRTHYEERIRTEPKWSLVGIFADKGITGTSMKKRDEFNKMLRLCYKGKIDMIIVKSISRFARNTLDVIKITRKLREINVDVYFEEQGIHSIDPASEFYITIYGSIAQSESENISANVKWGKAQSAKQGNVPFQCKHFLGYTKNADGEIEIVPEEAEIIREIYEQYLSGESLYGIKCYLEAKEIPTPAGCSVWRQETIRSILSNEKYKGDAIINKTYVSDCISKRVKANNGERNKYYIENNHPAIIDAGTFARVQEEIARRSGKPKVKQKGTKTELSRYSSRYALSELLICGECRTPYRRCTWTAKGKRKIVWRCINRLDYGKKYCHHSPSIEESLLQDAVMRAIMQTAKQNVEVLKTLKIHIGMGLTDEVTEDKTLDIQIRIAEIDAEFQKMLKAVSADNADGIDEERITELMNEKQRLTVQLEQYAAMRQKRESAKSRLDEIFTILDGLQNHPMEYDDKLVRQIIECVVVESKDKIKVVFIGGTEIEMAL

SEQ ID NO: 5945 - protein, 452 aa, synthetic construct
MKAAIYIRVSTQEQIENYSIQAQTEKLTALCRSKDWDVYDIFIDGGYSGSNMNRPALNEMLSKLHEIDAVVVYRLDRLSRSQRDTITLIEEYFLKNNVEFVSLSETLDTSSPFGRAMIGILSVFAQLERETIRDRMVMGKIKRIEAGLPLTTAKGRTFGYDVIDTKLYINEEEAKQLQMIYDIFEEEKSITTLQKRLKKLGFKVKSYSSYNNWLTNDLYCGYISYADKVHTKGVHEPIISEEQFYRVQEIFSRMGKNPNMNRDSASLLNNLVVCGKCGLGYVHRRKDTVSRGKKYHYRYYSCKTYKHTHELEKCGNKIWRADKLEELIIDRVNNYSFASRNVDKEDELDSLNEKLKTEHTKKKRLFDLYISGSYEVSELDAMMSDIDAQINYYEAQIEANEELKKNKKIQENLADLATVDFDSLEFREKQLYLKSLINKIYIDGEQVTIEWL

SEQ ID NO: 5946 - protein, 558 aa, synthetic construct
MTKLYSYIRFSSMRQSDGSSYERQIRMAKEIADRYNLELVNDYQDLGVSAFKGANSKTGALSRFLDEIGRSIPVGSWLFIENLDRLSRQDIISAQELFLSIIRRGITIVTGMDNKIYSIETVTANPMDLMFSILLFIRGNEESQTKRNRTNSSALLKIKAHQQNPQSPAVAIEEIGKNMWWTDTTSGRVLPHPVYFPVLQKIVQLRQEGHSAGVILDYLNEHHEPPAPTSNKKHGKWSRAMVSRLFTTKALIGVKTVNVDGVEYELRDYYPRVLSDSEFYFLRKNIIKKAWDYSHVKEKVIPLLSGIGVLRCVHCGATMVKQTAANGKREQYRYCCDGRKSGRTDCPYPNWGFRAVTLEGAVLQLLADKIWIAEDKTNPIPEIQVKIDEISRKIDNLINLSAMTGATKELANQITDLNSQREALHEEIRLFEREMYSVDSQGWDKLAQFDLSDVQNEERLKVRMKIKGALHEIECSRIDSKKNLFVLVYLDGLRQRLVIENNRGLKKGQIFVDLKTINDRQILESAGMVLHPCIEMIIDSDWKAPEEIPGLLSEEFGI

SEQ ID NO: 5947 - protein, 478 aa, synthetic construct
MKTTNKVAIYVRVSTTSQAEEGYSIDEQLFSLRKYCEAMNWQVYHEYVDAGFSGGKLDRPEITQLIQDAKNKLFDTILVYKLDRLSRSVPDTLYLVRDVFGKRDIGFVSLQENIDTSSAMGNLFITLLSAIAEFEREQITERMEMGKLGRAKSGKTMAWRVTAFGYDYNKETGNLELDPVKAPLVKMVFDEYMQGTSIDNIADKMNSLDYTGKDRPWAHHGVASLLDNPVYYGMNRYKDKIYKGNHEPVITKELFDLVQKERERRRQGTPESHNTPPWQRKYFATKVCRCGLCGERMKLDRGKKRKKDGFTPMVYYCKNSRPYRNATCHNVLYQRDIVEDYIIHEVAKIQNNPNILKRGEYRTKEYELERQRKQLNETIKRNTDKLSKLNNLYLNDLITLEDLKKQSDLLIKRKRYSEERLALTYQTTEDDEREYRLKSFLAFPDLLTADYETQRKAVEMIVDRVELTKDKYIIHYNF

SEQ ID NO: 5948 - protein, 507 aa, synthetic construct
MKRVISYIRFSSEKQAKGDSLRRQSKMVTDWLKAHPEYYLDQDLSFRDLGVSGFTGKHLKGGLGDFLTAIEKGLVKAGDTLLIESLDRLSRQDVDQASELLRNILRSGVDVVTLSDGEHYTRESLRDPLALIKSILIMQRAHEESLRKAERIQAAWDAKKEAAKAGIKISRRCPAWLKLNDDRKSFSVIPEKVETVKRCFQLRLEGKSIWEIVRTLNDEGHQSMSQYKPGSFGQTSVQDLLKNRSVIGYFTPKGCEEISGYYPSIIHETDFYKVQQLSYARYGRKPASDKPMAVNLFKGVIRCSECGHALIITGFSDTRNGIYRCPLRNENRCSAKGLSRKQTDGTLIALLSRLDRFDSDMTNTIDTLKLHREHISSNIEKLVQLSLEIEDLSAITSKLKQLKGELSQVDADIEKETQRLKSIDVGCLSDCDLTTKAGRIEAQLIIKSAVKEVVLNTAKRRCKVTFHNGKSITLPITENPSEDVTEAIQSLSEVTERGLIDVDVVEI

SEQ ID NO: 5949 - protein, 507 aa, synthetic construct
MKRVISYIRFSSEKQAKGDSLRRQSKMVNDWLKAHPEYYLDQDLSFRDLGVSGFTGKHLKGGLGDFLTAIEKGLVKAGDTLLIESLDRLSRQAVDRASELLRNILRSGVDVVTLSDGEHYTSESLKDPLALIKSILIMQRAHEESLRKSERIQAAWNRKKELISEGIKISKRCPAWLKLNDDRKSFSVIPDKVETVKRCFQLRLEGKSIWEIVRTLNDEGHQTLNQYKAGKFGQTSVQDLLKNRSVIGYFTPKGREEIAGYFPPIIPETDFYKVQQLSYSRYGRKPASDKPLSVNLFKGVIRCSECGHALIITGFSDTRSGIYRCPLRNENRCSAKGLSRKQTDGTLLTLLSRLDRFDSDMTNTLDTLKLHREHISSNIEKLVQLSLEIEDLNAITSKLKQLKGELSQVDADIEKETQRLKSIDVGCLSDCDLSTKAGRIEAQLIIKSAVKEVVLNTAKRRCKVTFHNGKVIDLSITENPSEDVTEAIQSLSEVTERGLIDVDVVEI

SEQ ID NO: 5950 - protein, 559 aa, synthetic construct
MKTKLYSYIRFSSMRQNDGSSYERQIRMAREVAAKYDLELVNDYQDLGVSAFKGANSKTGALSRFLDAIGRSVPVGSWLFIENLDRLSRADIVSAQELFLSIIRRGITIVTGMDNKIYSLDTVTANPMDLMFSILLFIRGNEESQTKRNRTNSSALIKIKSHQENPQNPAVAIEEVGKNMWWTDTTSGYVLPHPVYFPVVQEIVELRKNGRSTAEILDHLNETYAPPPAVSNKKHSKWSRAMVERLFHTRALIGIKEVSVDGVNYELKDYYPRVIDDATFYHLKKNIGARAWNFGDKEEAKPIPLLSGIGLLKCDHCGCAMVKVKGTNKRSDQYRYTCDATRSRRLDCEHPNWSFRGDQLEKAVLQLLADKIWIAEDKANPVPALKVQIDEISRKIDNLIALSAMTGATKELADQITTLNSERETLYNQIKMAEEEMYSVDSQGWEKLAEFDLEDVYNEERIKVRFKIKQALKRIGCRRIDRNKNLFVLEYIDGKTQRVVIENSRGTRKGRIFIDLKTINDRQILESNGLVLHPCLDMLTDKNWKPEEEQAGPLQEFGI

SEQ ID NO: 5951 - protein, 563 aa, synthetic construct
MLKNIQSVTTGNTFTTSPIKETDTGITALYCRLSQDDGNVGDSDSIINQKKILAEYAERNGYTPYQFYIDDGFSGTNFERPQFKQMIEDAKKGTVKRIICKDLSRFGRDYIKVGLYTEFIFPDKDIHFIAVNDNVDSNVQKDNDLAPFKNLFNEWYARDTSKKIKAVKKAKGLAGEHMSCVAPYGYRKNPDNPKEWLIDEESAEVVREIFRLCVDGYGPRRIANILTERKILIPSAYALEKGYAVRNNIPKNPCQWSSTVVVDVLERMDYLGHTVNFKTHRKSYKQKKKIENDKSEWKISENTHEPIIDKSTFDIVQKIRANRKRPTKMGEMPMFSGILYCADCGKKLSFHRRANDPDTKHNFVCSNYRSDTHNCSMHYIRNVVVEQLVLENLREVVSYVKAYEDEFVQMVMDADIKQKSKELAKKKRVLSDKEKRYTQLDGLFQRIYEDNVSGKLSDERFAKLSQGYEAEQKDLQSEIEALRMELSQEKQQSVNVKSFLSTVKKYTEIPELTSEIVHEFIDRIIVHEADKSSGKRIQEIEIIYNHIGVFDRSKVNVYMGKAV

SEQ ID NO: 5952 - protein, 537 aa, synthetic construct
MKQQIYNTALYLRLSRDDELQGESSSITTQRSMLRLYAKEHHLNVIDEYIDDGWSGTNFERPSFQRMIEDIEAGKINCVVTKDLSRLGRNYIMTGQYTELYFPSHNVRYIAIDDGVDSEKGESEIAPFKNIINEWVARDTSRKVKSAFKTKFAEGAYYGAYAPLGYKKHPDIKGKLLVDEETKWIVEKIFSLAYQGYGSAKITKVLREEKVPTASWLNFTRYGTFAHIFEGKPDSKRYEWTIAHVKAILKNEVYIGNSVHNRQSTVSFKSKKKVRKPESEWFRVENTHEPIIDKEVFYRVQEQIKSRRRQTKEKATPIFAGLVKCADCGWSMRFATNKANKTPYSYYACSYYGQFGKGTCSMHYIRYDVLYQAVLERLQYWTKAVQQDEEKVLNKIQKAGNAERIRAKKKKASALKKAESRQNEIDRLFAKMYEDRACEKITERNFIMLSGKYQKEQIELEQQITNLREELSKMEQDMIGAEKWIELIKEYSVPKELTAPLLNAMIEKILIHEATTNEDNERIQEIEIYYRFIGKVD

SEQ ID NO: 5953 - protein, 507 aa, synthetic construct
MKRVISYIRFSSERQAKGDSLRRQSKMVNDWLKAHPEYYLDQDLSFRDLGVSGFTGKHLKGGLGDFLTAIEKGLVKAGDTLLIESLDRLSRQDIDIASELLRRILRAGVDIVTLSDGEHYTRESLKDPLALIKSILIMQRAHEESLRKAERIQAAWDAKKEAAKAGIKISKRCPAWLKLNDDRKTFSVIPEKVETVRRCFQLRLEGKSIWEIVRTLNDEGHQTLNQYKAGKFGQTSVQDLLKNRSVIGYFTPKGCEEIAGYFPPIIPETDFYKVQQLSYSRYGRKPASDKPLSVNLFKGVIRCSECGHALIITGFSDTRNGIYRCPLRNENRCSAKGLSRKQTDGTLLTLLSRLDRFDSDTTNTIDTLKLHREHISSNIEKLVQLSLEIEDLSAITSKLKQLKGELSQVNADIEKETQRLKSIDVGCLSDCDLTTKAGRIEAQLIIKSAVKEVILNTAKRRCKVTFHNGKVIDLPITEDPSENVTEAIQSLSEVTERGLIDVDEVII

SEQ ID NO: 5954 - protein, 506 aa, synthetic construct
MRTVITYLRFSSATQGAEGADSTRRQNELFKQWLRKNSDAQVVASFSDEGLSGYKGKHLTGQFGDMLARIEAGEFPAGAILLVESIDRIGRLEHLETEALMNRIIAHGIEIHTLQDGLIYTRDALSDDLGISIIQRVKSYLAHQESKQKSFRVSEKWKQRAKLALAGEQHLTRNVPGWIDPDTFKCNEHAETVRLIFKLLLDGESLHNIARHLQSNDIKSFSRRKDANGFSVHSVRTVLRSESVIGTLPASQRNDRPAIPNYYEAAIDASTFNKAQEILDKNRKGRTPASDNPLTINIFKGLFRCQCGASVHPTGTKNKYQGVYRCNSHLDGRCDVPPLKRKPFDRWMIDNFLGMIDVGNDGEAEKEIASLQHEVETVTARIKKATALLLEMDDITELKTQVKELNQKRTELQTTINTMKRKTSLSDKGLPQLKDIDLMTKAGRVECQLILSKHLKGLTLGKDSVTVTLQNDTEITIPTNPLPLNDGSPIFEIADKELLDIDAYQL

SEQ ID NO: 5955 - protein, 547 aa, synthetic construct
MKLLVTYIRWSTKEQDSGDSLRRQTNLIDAFYSKHKNDYYLLPAHRYVDKGKSGFHQQHKNQGSDFRRMFENVMSGAIPEGSLIVVENFDRFSRADIDTAIDDVRQILRKGVSILTLGDGELYDKSALTDPVKLIKHIIIAERAHQESLVKQKRIAQVWNHKTQLAKELKKPMGKQAPGWLELSEDGSHYIVDEDKASLVNIIYDKRLSGMSMFAICKWLNEQGYPTINQRKVRISKTKKPDGNWSALSVKHILTSRSVLGYLPAKISTEDRKTVLREEIEGFYPQIVTDSKFYAVQQLLEETGKGKTSSGEHWLYVNILKGLIRCKCGLVMTPTGIRKPVYQGTYRCNGNKESRCSYGTVSRKLLDTQLCSRLFSKLSQLHDEATDTAKLDELQRRLNTVDSELEKLTETLIQLPNITQIQEALRVKQEEKDELTFQLSREKARVKSVSSLDLSGLDMESVEGRTEAQIIIKRLVKEIVVSGNEKLVDIYLHNGNMIRGFPLDGKDDHTLTLEEATDEMQSLDDMLIFGEPVTRIYPAGDMEEVDA

SEQ ID NO: 5956 - protein, 507 aa, synthetic construct
MKRVISYIRFSSEKQAKGDSLRRQSKMVTDWLKAHPEYYLDESLTFRDLGVSGFTGKHLKGGLGDFLTAIEKGLVKAGDTLLIESLDRLSRQDIDIASELLRNILRSGVDVVTLSDGEHYTRESLKDPLSLIKSILIMQRAHEESLRKSERIQAAWDAKKEAAKAGIKISRRCPAWLKLNDDRKSFSVIPEKVETVKRCFQLRLEGKSIWEIVRTLNDEGHQTLNQYKPGKFGQTSVQDLLKNRSVIGYFTPKGCEEISGYYPAIIDETTFYKVQQLSHSRYGKRSVSDKPLSVNLFKGVIRCSECGHALIITGFSDTRNGIYRCPLRNENRCNAKGLSRKQTDGTLLALLSRLDRFDSDMTNVIDALKLHREHISNNIEKLVQLSLEIEDLSAITIKLKQLKGELSQVDADIEKETQRLKSIDVGCLSDCDLTTKAGRIEAQLIIKSAVKEVVLNTAKRRCKVTFHNGKVIDLPITENPSEDVTEAIQSLSEVTERGLIDVDEVII

SEQ ID NO: 5957 - protein, 547 aa, synthetic construct
MKLLVTYIRWSTKEQDSGDSLRRQTNLIDAFYAKHKEEYYLLPAHRYVDKGKSGFHQQHKAQGSDFRRMFENVMSGVIPEGSLIVVENFDRFSRADIDTAIDDVRQILRKGVSILTLGDGELYDKSALTDPVKLIKHIIIAERAHQESLVKQKRIAQVWNHKTQLARELKKPMGKQAPGWLELSEDGSHYIVDEDKASLVNIIYDKRLSGMSMFAICKWLNEQGYPTINQRKVRISKTKKPDGNWSALSVKHILTSRSVLGYLPAKISTEDRKTVLREEIESFYPQIVTDSKFYAVQQLLEETGKGKTSSGDHWLYVNILKGLIRCKCGLVMTPTGIRKPVYQGTYRCNGNKESRCSYGTVSRKLLDTQLCSRLFSKLSQLHDEATDTAKLDELQRRLNTVDGELEKLTETLIQLPNITQIQEALRVKQEEKDELTFQLSREKARVKSVSSLDLSGLDMESVEGRTEAQIIIKRLVKEIVVSGNEKLVDIYLHNGNMIRGFPLDGKDDHTLTLEEATDEMQSLDDMLIFGEPVTRIYPAGDMEEVDA

SEQ ID NO: 5958 - protein, 506 aa, synthetic construct
MRSVITYLRFSSATQGAEGADSTRRQNDLFKQWLKKNSDAQVVASFSDEGLSGYKGKHLTGQFGDMLARIESGEFPEGTLLLVEAIDRIGRLEHLETEALMNRIIAHGIEIHTLQDGLIYTRDALSDDLGISIIQRVKSYIAHQESKQKSFRVSQKWEQRAKLALAGEQRLTKMVPGWIDPDTFKLNEHAETVRLIFKLLLDGESLHNIARHLQSNDIKSFSRRKDANGFSVHSVRTVLRSVSAIGTLPASQRNDRPAIPNYYEAAIDAATFNKAQEILDKNRKGRTPASDNPLTINIFKGLFRCQCGASVHPTGTKNKYQGVYRCNNHLDGRCDVPPLKRKPFDKWMIDNFLGMIDVGNDGEAEGKIAALQHEVEIVTARIKKATALLLEMDDITELKTQVKGLNQKRTELQTTIDNMRRKASLTDKELPQLKDIDLTTKAGRVECQLILSKHLKGLTLGKDSVIVTLQNDTEITIPTNPLPLNDGTSIFEIAEKNLLNIDTFQL

SEQ ID NO: 5959 - protein, 506 aa, synthetic construct
MRAVITYLRYSSAIQGVDGADSTRRQNELFKQWLRKNSDAQVVASFNDEGLSGYKGKHLSGQFGDMLSRIESGEFPEGTILLVEAIDRIGRLEHLETEALMNRILGNGLEIHTLQDGLIYTKDALADDLGISIIQRVKAYIAHQESKQKSFRVSQKWEQRAKLALAGEQRLTRNVPGWIDPETFKLNEHAETVRLIFKLLLNGESLHNIARHLQSNGIKSFSRRKDANGFSVHSVRTILRSETTIGTLPASQRNDRPAIPNYYEAAIDASTFNKAQEILGKNRTGRTPASDNPLTINIFKGLFRCQCGASVHPTGTKNKYAGVYRCNNHLDGRCDVPPLKRKPFDKWMIDNFLGMIDVVSDGESERKIAALQHEVETVTARIKKATALLLEMDDITELKAQVKELNQKRTELQTTIDTLKRKTSLTDKELPQLKNIDLATKAGRVECQLILSKHLESLTLDEGVVTVKLQNGTEIIVPTDPLPLNDGTSIFEIADKKLLDIDAYQL

SEQ ID NO: 5960 - protein, 507 aa, synthetic construct
MKRAISYIRFSSEKQSRGDSLRRQAKMVTDWLKAHPEYYLDESLTFRDLGVSGFTGKHLKGGLGDFLTAIEKGLVKAGDTLLIESLDRLSRQDVDQASELLRNILRSGVDVVTLSDGEHYTRESLKDPLALIKSILIMQRSHEESLRKSERIQAAWDAKKEAAKAGIKISRRCPAWLKLNDDRKSFSIIPEKVETVKRCFQLRLEGKSIWEIVRTLNDEGHQTLNQYKAGKFGQTSVQDLLKNRSVIGYFTPKGREEIAGYFPPIIPETDFYKVQQLSYSRYGRKPASDKPLSVNLFKGVIRCSECGHALIITGFSDTRSGIYRCPLRNENRCSAKGLSRKQTDGTLLALLSRLDRFDSDTTNIIDTLKLHREHISSNIEKLVQLSLEIEDLSAITSKLKQLKGELSQVDADIEKETQRLKSIDVGCLSDCDLTTKAGRIEAQLIIKSAVKEVVLNTAKRRCKVTFHNGKIIDLPITENPSEDVTEAIQSLSEVTERGLIDVDVVEI

SEQ ID NO: 5961 - protein, 523 aa, synthetic construct
MAVSRNVTVIPAIKRVGNNKTSESKPKIRVAAYCRVSTDSEEQASSYEIQIEHYTNYIKKNKEWELAGIFADDGITGTNTKKREEFNRMIEECMAGKIDMIITKSISRFARNTLDCLKYIRQLKDKNIAVFFEKENINTMDSKGEIMLTIMASLAQQESQSLSQNVKLGIQYRYQQGEVQVNHKRFLGYTKDENKQLVIDPEGAEVVKRIYREYLEGASLLQISRGLEADGILTAAGKAKWRPETLKKILQNEKYIGDALLQKTYTVDFLSKKRVKNNGIVPQYYVENSHEPIIPRELFMQVQEEMVRRANLRGRKGGKKRVYSSKYALSSIVYCGHCGDIYRRVHWNNRGYKSIVWRCVSRLEEKGSECTAPTINEETLQTAVVKAINELLANKEPFLSTLQKNIATVFNEENDNATDDIEGKLEELQQQLLIQAKSKNDYEDVADEIYRLRELKQNALAENAEREGKRQRIAEMTDFLNEQSCELEEYDEQLVRRLIEKVTVFDDKLTVEFKSGVEIDIEI

SEQ ID NO: 5962 - protein, 452 aa, synthetic construct
MLRVALYIRVSTEEQVLNGDSIRTQIEALEQYSKENDFNIVGKYIDEGCSATNLKRPNLQRLLRDVEKDKVDLVLMTKIDRLSRGVKNYYKIMETLEKHKCDWKTILENYDSSTAAGRLHINIMLSVAENEAAQTSERIKFVFQDKLRRKEVISGTIPIGYKIENKHLVIDKEKKYIVKAIFDEYEKSGSVRTLIETINNLHGELYSYNKIKNILRNELYIGIYNKRGFYVEDYCEPIISKKQFKQIQRILEKNKKTTPNKNIHYHIFSGLLKCKECGYTLKGNSSNVGEKLYLSYRCSTFYLNKNCVHNVTHNEKHIENYLLTNLKPQLHKHMVKLEAQNEKIRQNKKSNKKDEKKKIMKKLDKIKDLYLEDLIDKETYRKDYEKLQSQLDNITEEQESQIIDTSHIKKFLDIDINEMYSDLSRVERRRFWLSIIDYIEIDNNKNITINFI

SEQ ID NO: 5963 - protein, 559 aa, synthetic construct
MKTKLYSYIRFSSMRQNDGSSYERQIRMAREIAAKYDLELVNDYQDLGVSAFKGANSKTGALSRFLDAIGRSVPVGSWLFIENLDRLSRADIVSAQELFLSIIRRGITIVTGMDNKIYSLDTVTANPMDLMFSILLFIRGNEESQTKRNRTNSSALIKIKAHQENPQNPAVAIEEVGKNMWWTDTTSGYVLPHPVYFPVVQEIVELRKNGRSTAEILDHLNETYAPPPAVSNKKHSKWSRAMVERLFHTRALIGIKEISVDGVNYELNNYYPRVIDDPTFYHLKKNIGARAWNFGDKEEVKPIPLLSGIGLLKCDHCGCAMVKVKGTNKRSDQYRYTCDATRSRRLDCEHPNWSFRGDQLEKAVLQLLADKIWIAEDKANPVPALKVQVDEISRKIDNLIALSAMTGATKELADQITTLNSERETLYNQIKMAEEEMYSVDSQGWEKLAEFDLEDVYNEERIKVRFKIKQALKRIGCRRIDRNKNLFVLEYVDGKTQRVVIENSRGTRKGRIFVDLKTINDRQILESNGLVLHPCLDMLTDKNWKPEEEQAGPLQEFGI

SEQ ID NO: 5964 - protein, 523 aa, synthetic construct
MAVSRNVTVIPAIKRVGNNKNSESKPKIRVAAYCRVSTDSEEQASSYEIQIEHYTKYIKKNKEWELAGIFADDGITGTNTKKREEFNRMIEECMAGKIDMIITKSISRFARNTLDCLKYIRQLKDKNIAVFFEKENINTMDSKGEVLLTIMASLAQQESQSLSQNVKLGIQYRYQQGEVQVNHKRFLGYTKDENKQLVIEPEGAEVVKRIYREYLEGASLLQIARGLEADGILTAAGKAKWRPETLKKILQNEKYIGDALLQKTYTVDFLSKKRVKNNGIVPQYYVENSHEPIIPRDLFMQVQEEMIRRANLRGGKGCKKRVYSSKYALSSIVYCGHCGDIYRRVHWNNRGYKSIVWRCVSRLEEKGSECTAPTINEETLQKAVVKAINELLANKDSFLKVLQKNIATVFNGENDNATDDIDSKLEELQQQLLIQAKSKNDYEDVADEIYRLRELKQNALVENAEREGKRQRIAEMTDFLNKQSAELEEYDEQLVRRLIEKVTIYEDKLTVEFKSGIEIDEEI

SEQ ID NO: 5965 - protein, 520 aa, synthetic construct
MKKITKIEGNLANSFIKPKTRVVAYCRVSTDSNEQLVSLQAQKAHYETYIKANPEWEYAGLYYDEGISGTKKENRSDLLRMLSDCETGRIDLIITKSISRFARNTTDCLEMVRKLIGLGVHIYFEKENINTGTMESELMLSILSGLAESESISISENTKWAIQRRFQNGIFKISYPPYGYQNMDGQMIVIPKQAEIVKYIFAEVLSGKGTQKVANDLNQKGIPSKRGGRWTATTIRGILTNEKYTGDVLLQKTYTDSHFNRHTNYGEKNMYLVENHHEAIISHEDFEAVDVVLNQRAKEKGIEKRNSKYQNRYSFSGKIICSECGSTFKRRIHSSGRKYVAWCCSKHIGNITECSMQFIRDEDIKTAFVTMMNKLIYGQKFILRPLLNGLRNQNNVASFRRIEELETKIENNMEQSQMLTGLMAKGYLEPALFNKEKNSLEAERERLLVEKDQLTRSVNGNFTKVEEVDRLLKFATKSQMLTAYEDELFENYVEKIMVFSREEVGFELKCGITLKERLVN

SEQ ID NO: 5966 - protein, 575 aa, synthetic construct
MTKIAYSYTRLSTEKQIKGHGFTRQREAIEKVCCQHGWQLSDQTFNDLGVSAWKGANVTTGALSHFIELTKKGAIKPDSVLIVESVDRLSRQQVDKSLRLMLELLDVGISIFTLSDSKLYTTNSDNVMLDLMMWLMTAQRAHEESEMKSLRIRAAKRKNKELIRQGVIVSRKCPEWLSVSDDKSCFIVNEERAEIVRKVFIWYSQGFSTKPIALKLNELGVPYWGKSSTWSYRHIRSLLKHRAVIGDIQPLIRVNGKDVPDGDAVSDYYPAIVDKGLWATCQQIKSSKTAAKGRTVEIGMANLFRGLLKCECGSGLAINSSTVKGRTYRFLRCSQLKTTGCQAKNWHYEKTERILLIALRHSLSSFSEEDHAVSLRESQHYLARINEELKEKERQAENAINYLLDKPSRLLEARLQTLEDDIARLKAIQEQAEHRVEAVHYEKSTALDKVEELQRVLEDIANDDDSRHKANGLLRRLIDTVTLGSISNPRSKEFMELSGNDYHGLIVIKRRDGLEVRVEVLKNYELSISWEGDEFTVIECSPTQQPNSQHEPQKFINVGEQTVDLWDDEGWVASS

SEQ ID NO: 5967 - protein, 603 aa, synthetic construct
MATTSQINTLTAYIYSRVSKGIQVHGDGIRRQIDSAFRFIETRNRDLMEKGQPTYTIADDLITDKGLSAYRGYNTAANGGLGAFLEAARCGEIKRGSLLVVEAVDRISRMPADESRKTFSLFKEYGIDVAIVKFGIIIKHSESTTLENDLLITAAIHLAHMESQQKSSRINDRFDEKRRLEKLGGEKRTTICPLWMKISEDKKSFELIPDRARVVKRIVDMKLSGIGCHRIATTLNEEGVPYFNGKTWSVRIVMKYCKMVQLYGAFQRVRHVRTENGTKKIPAGELEQGYYPAVIDEPTFLRLKNSFKRSGGRQTGAFSNLFSGLLYCPKCGAAMSYFKPSRGSLKVRCRKQLDKQGCDQRALNYEEIEERLIRALAGLDYAKINNSSFTDLSAELSTLEATIAEIEISADSVVKQISESSNARLIQVLSDKLESLYSEIDSNKAKYNELSLIHSNYDVSIIDSLELTENEDRERYNHFVKQFVKYILCTDKKQGGTLRVVFKADAIGELPFSFSDDDTNDRAVSDVFTSNKAVSSSSTIRAINMDKSSTVYLPILKEITEVKQPSDLSDTRERLKYMHAVRVAVRLNPSKWGEIAKRAQLKY

SEQ ID NO: 5968 - protein, 452 aa, synthetic construct
MKAAIYIRVSTQEQIENYSIQAQTEKLTALCRSKDWDVYDIFIDGGYSGSNMNRPALNEMLSKLHEIDAVVVYRLDRLSRSQRDTITLIEEYFLKNNVEFVSLSETLDTSSPFGRAMIGILSVFAQLERETIRDRMVMGKIKRIEAGLPLTTAKGRTFGYDVIDTKLYINEEEAKQLQMIYDIFEEEKSITTLQKRLKKLGFKVKSYSSYNNWLTNDLYCGYVSYADKVHTKGVHEPIISEEQFYRVQEIFSRMGKNPNMNRDSASLLNNLVVCSKCGLGFVHRRKDTVSRGKKYHYRYYSCKTYKHTHELEKCGNKIWRADKLEELIIDRVNNYSFASRNVDKEDELDNLNEKLKTEHTKKKRLFDLYISGSYEVSELDGMMADIDAQINYYEAQIEANEELKKNKKIQENLADLATVDFDSLEFREKQLYLKSLINKIYIDGEQVTIEWL

SEQ ID NO: 5969 - protein, 564 aa, synthetic construct
MNYQVDENGKIMNQQPEQITALYCRLSRDDELQGDSNSIVNQKSILSKYAEEHRLLNTRFFIDDGVSGTTFDRPGLNEMLDLIDEEKVSTVIVKDMSRLGRDYLKVGLLTEIQLPEKGVRFIAINDGVDSNQGVSEFIAFRNVINEWYAKDTSKKIKAVFTAKGQSGKPLSTFPPYGYIKDPEDKNRWIVDEAAAEVVREIFRLCMEGNGPTKIARILSERRVLIPSAYAKSNGRSAPADVPADRCKWCDSTVAHILERKEYLGHTVNFKTYKESFRNKKQRKNPKENQMVFENTHQPIIEQDVWDTVQQLRQNKRRPSKTGKTNMFSGIAHCADCGSKLYYCTTRYFETRHDHFRCSASQKAVDPCTSHFIRAVVLEEMVLAHMRYVIGFVQRYEDSFRVSIEAERSTEIQKELSAKRKQIAQSQKRVDDLDVLFRKVYEDNASGKLTDERFMQLSRGYDLEQKTLRQMITMLEKEIDQQEQKTTQVEDFIAKCKRYSSLETLTPAILNDLVIKVFVEAPDKSTGKRRQGIHISYNLVGILPPLERFQPVVVERPNKEKAETA

SEQ ID NO: 5970 - protein, 547 aa, synthetic construct
MKLLVTYIRWSTKEQDSGDSLRRQTNLIDAFYSKHKNDYYLLPAHRYVDKGKSGFHQQHKNQGSDFRRMFENVMSGAIPEGSLIVVENFDRFSRADIDTAIDDVRKILRKGVSILTLGDGELYDKSALTDPVKLIKHIIIAERAHQESLVKQKRIAQVWNHKTQLARELKKPMGKQAPGWLELSEDGSHYIVDEDKASLVNIIYDKRLSGMSMFAICKWLNEQGYPTINQRKVRISKTKKPDGNWSALSVKHILTSRSVLGYLPAKISTEDRKTVLREEIEGFYPQIVTDSKFYAVQQLLEETGKGKTSSGDHWLYVNILKGLIRCKCGLVMTPTGIRKPVYQGTYRCNGNKESRCSYGTVSRKLLDTQLCSRLFSKLSQLHDEATDTAKLDELQRRLNTVDSELEKLTETLIQLPNITQIQEALRVKQEEKDELIVQLSREKARVKSVSSLDLSGLDMESVEGRTEAQIIIKRLVKEIVVSGNEKLVDIYLHNGNMIRGFPLDGKDDHTLTLEEATDEMQSLDDMLIFGEPVTRIYPAGDMEEVDA

SEQ ID NO: 5971 - protein, 452 aa, synthetic construct
MKAAIYIRVSTQEQIENYSIQAQTEKLTALCRSKDWDVYDIFIDGGYSGSNMNRPALNEMLSKLHEIDAVVVYRLDRLSRSQRDTITLIEEYFLKNNVEFVSLSETLDTSSPFGRAMIGILSVFAQLERETIRDRMVMGKIKRIEAGLPLTTAKGRTFGYDVIDTKLYINEEEAKQLRLIYDIFEEEQSITFLQKRLKKLGFKVRTYNRYNNWLTNDLYCGYVSYKDKVHVKGIHEPIISEEQFYRVQEIFARMGKNPNMNRDSASLLNNLVVCGKCGLGFVHRRKDTVSRGKKYHYRYYSCKTYKHTHELEKCGNKIWRADKLEELIIDRVNNYSFASRNVDKEDELDSLNEKLKTEHTKKKRLFDLYISGSYEVSELDAMMSDIDAQINYYEAQIEANEELKKNKKIQENLADLATVDFDSLEFREKQLYLKSLINKIYIDGEQVTIEWL

SEQ ID NO: 5972 - protein, 430 aa, synthetic construct
MSTDQDEQLSSYENQVNYYRDYISKHEDYELVDIYADEGISATNTKKRDAFNRLIQDCRAGKVDRILVKSISRFARNTLDCIKYVRELKELGVGVTFEKENIDSLDSKGEVLLTILSSLAQDESRSISENATWGIRKKFERGEVRVNTTKFMGYDKDESGRLIINPQQAETVKFIYEKFLEGYSPESIAKYLNDNEIPGWTGKANWYPSAIQKMLQNEKYKGDALLQKTFTVDFLTKKRVQNDGQVNQYYVENSHEAIIDKDTWELVQLELDRRKDYREEHQLKAYIIQNDDNPFTTKVFCKACGSAFGRKNWTTSRGKRKVWQCNNRYRVKGQIGCQNNHIDEETLEKAVVMAVELLSENVDLLHGKWNKILEENRPLEKYYSMKLAGIINKPSWEFDSYEMCQVLDSITISEDEQISVNFLEGTEVDL

SEQ ID NO: 5973 - protein, 588 aa, synthetic construct
MKEVEIIKKNDYLENRRRGKYIDRKRVAAYCRVSTDSEDQLNSYKSQVSYYTDLINNNIEWCMVDIYADEAITGTQVNKREDFQRMINDCMNNEIDMIITKSISRFARNTLDTLKYVRMLKEKNIAVYFEDEKINTLTMDGELLLVVLSSVAQQEVENISANVKKGLKMKMRRGELVGFQGCLGYDYHKEDKTLTINEKEAEIVRYIFNRYIEGAGGSIIGQELENLGYKTKYGSTTWSNSTVLGIIKNEKYIGDVLLGKTFTIDPISKRRLDNLGEEEKYYVKNNHEPIISREIFDKAHEILNRRSKNRGKYEAGVTKREKYSRKYAFSCMMECGFCGGTLTRRNWHSGSEYSKVIWQCVVATKKGKKYCPESKGISERVIENAFVESYRLLCDEKKSVLEELLNRINDTVGSSEVNNKIKKIEKELSVIEKKINNLVDMRLDDIIEKETYEIKYQELIDNQEKLLNERNKLNVVAKNEKSMKQRLKEFKKTLEENEVLDKFDRGVFESVVEKVIIGEKNKDGENDPTKITFIYKTGFKNTLSSDEFKIPRKNARGRHKRKELCLHGNNEVENLCSHSSSNTCGNCS

SEQ ID NO: 5974 - protein, 532 aa, synthetic construct
MKAAIYSRKSRFTGKGDSIENQIQLCIDYAKSIGVKDFLIYEDEGFSGSNIDRPQFKKMMQDAKDKKFSYLVCYRLDRISRNVSDFSTLIEKLNELSISFISIKEQFDTSTPMGRAMMFISSVFAQLERETIAERIKDNMYELARSGRWLGGNTPHGFNSEKITFLDENLKERSMYKLQVNDEQMEIVKLIYNKYLELRSLSKLYKYVYNNGIRGPRGGKFDPSSLSRILRNPAYVKANDEILDYLKNSGMDVVGTPDRKCGILTYAKNTSNSIAAIAKHHGVIEPEIWLEVQNQLDKNRDKTPRISTGKTALLSGLIKCGKCGSNMRITYKGKKTDKDLKYYYICGTKKTLGSDSCNCKNLNGPLVESLVIDKIKNCKEESIISAFNNNNIKTDNVFNIFKSETNLLKNQILDKEKLIKNLVIELAKNTGSTASDYIVSQIESLNNEISILKDKINTLESSNINISSDSINIDIIVSNLKRFNDEVDNASLDDKRLLLSTIINSIVWDSSLGNLNIVYMGAEVDNSVSLSN

SEQ ID NO: 5975 - protein, 520 aa, synthetic construct
MKKAVYCYARVSSRGQAKDGYGMSRQQTMLRDYVAAYDDSQHNRGYEFGDISWLYAEGVSAYSGKNIEDGSVLKNFIDDVLQKKITNSVLVIENLDRFSRAAPNRAAGLFLSLINAGCDIHEVETEMIHHQYSDLNIISGGLQRAHNESKRKARLSIKNWDERIKNTIEGTSVLTHRVPSWIEVKNNKYVIKEGEAEKFNLIFKMYADGFGPAAIRDELKKKKMQINESEPTINHLVKIIKDQRLIGKFNSTGRKILDGMIIYPVVVEQSLFETVNDLRKQRNPLGKVNVKANNLFAGLCICMNCGRYVQVNSVDKKGDTYFRCGGSLLKIDKCKERGFKYKIIENALLEHIRNFDFSMLRSNDDDIQIKINYLSIELATKENYSSEILADMEKEYIPDPNDRRILKNLQRRISEIRTEITRLKQSNVGYEKFSDLKESCTDDLLDSKNTNLRLNFNVKIKRVIKNIKMKRLGNAIMLVVNYIGVNEKQAMVIDSKTGDVKFMAVQNDDLKSVEYLINKS

SEQ ID NO: 5976 - protein, 599 aa, synthetic construct
MKKAYSYIRYSSPQQASGDSYRRQLAATQAYCDANGYELDTELSIYKELGVSGFKGDQEHLKQFINDCETGKVKKGSLLVVENLDRLSRQAINVAMRQFLSLLEYVDIYTLQDKKHYSNNDGRDSENQLLDIMTSLIIMSRAHEESLTKQKRLKESWANQRKNAHKVKMSGCYPHWLVRSDDKTEFFVKEDRAQIIKDMLDMCINGLGATQIVRTLNQNIERYPPPSQKKEFWVRSTVKRLLSDRRLLGEHQLYKGHHAKREPVGEPIKDYFPQVIDEKTFVNAQISLKSRKIGAGKVKADSFSNIFRGFLRCGHCDSPVEYVNKAAKQASTLYLTCSNAKRGGDCNHSKHYRYLPLEHMLIHLSTANGFLPKPEKPSDLEQQLEIIKEKKEQANEKLSVLLEKNFTAPIILEKIEELTNDVEQYSYQIAEIEDKLLSIKPDYTYEDLYLDAVLESDLLKKFSNRSMFNSYLRKKIDSAYLYSIGLFPCIAFKMNNKSVHVLVLDERYNFGGCSLPNEKDKLIRLNGEEIEAIDEMIWKMFGNAIDFINGIDEENEELNKIIRKISLLMSKFIMDNKNKELISEFNSFLNTSIEKSYQN

SEQ ID NO: 5977 - protein, 599 aa, synthetic construct
MKKAYSYIRYSSPQQASGDSYRRQLAATQAYCDANGYELDTELSIYKELGVSGFKGDQEHLKQFINDCETGKVKKGSLLVVENLDRLSRQAINVAMRQFLSLLEYVDIYTLQDKKHYSNNDGRDSENQLLDIMTSLIIMSRAHEESLTKQKRLKESWANQRKNAHKVKMSGCYPHWLVRSDDKTEFFVKEDRAQIIKDMLDMCINGLGATQIVRTLNQNIERYPPPSQKKEFWVRSTVKRLLSDRRLLGEHQLYKGHHAKREPVGEPIKDYFPQVIDEKTFVNAQISLKSRKIGAGKVKADSFSNIFRGFLRCGHCDSPVEYVNKAAKQASTLYLTCSNAKRGGDCNHSKHYRYLPLEHMLIHLSTANGFLPKPEKPSDLEQQLEIIKEKKEQANEKLSVLLEKNFTAPIILEKIEELTNDVEQYSYQIAEIEDKLLSIKPDYTYEDLYHDAVLESDLLKKFSNRSMFNSYLRKKIDSAYLYSIGLFPCIAFKMNNKSVHVLVLDERYNFGGCSLPNEKDKLIRLNGEEIEAIDEMIWKMFGNAIDFINGIDEENEELNKIIRKISLLMSKFIMDNKNKELISEFNSFLNTSIEKSYQN

SEQ ID NO: 5978 - protein, 598 aa, synthetic construct
MDEKPRIAHIYSRVSKGTQVKGDGLRRQIEIASKFIEDVNISNSRDGLPVYTLADSPIYDRGLSAYFGLNTDENAGLGAFLKAAENGQVEKGTLLIVEAIDRISRLPVDDARALFARFKKYGIDVAICRFNLIIYHDKSSDLGQDLLITTAIHLAHLESEQKSKRIRARFTHKRLLEKEGGERRTSMSPSWIELSKDKTHFVLIPERARIVRKMVDLKLQGWGAHRITVYLNEQGYPCWNRSNTWYTKIVEKYLKMIQLVGDFQPVEHVHGEKGVRKEPVGDVIKGYYPALITEEEWIRLKASFKRSGGRQTGAFSNLFSCMLYCPTCGSCMSYFKPNRGRIKVRCRKQIDKQGCDQRALNYEEIEPRLIKALAGLDYAKINNNSFASLQKELNTLEAQVAELEASADDIKTQMLEESDPRIISVYVNKLKAIYTEQDKAKARFEKLSTQTSDYDVNTLEQLQLERNEDRERYNGFVRSFVKYVIASDSKLGKPLRIVFKSEAVGEVPVFFNDDKNNKAISDIFIAQKDVNEAAPIRLINMSRVHGNLGKLAAIDTVPVPDDLGDALERIKYLFAVRQAVLQNPEKWQAIADDARLFE

SEQ ID NO: 5979 - protein, 552 aa, synthetic construct
MTEEKQRFAVTYQRFSSVRQVGNSSLDRQTDTQKAWLRQNPNVTVIDNFVDKAMSGWSGKHLKEGSLGQLMKAIEDGIIQPGTLILVEHFSRLTRQNIDNAEELVKRIWKAGITLVTVRDNTEYPPEAVNNMSLRIRLIVEMEQAFKESEWRSAKVKASYIRREKLAKEEGKAPRIRKPFWLNPDGTLNHLHQAVKDMFNWYLDGLGQQRIVVRLREKYTDTAIQKINPSTVMRWIQSEIVRGYWRGNRVYEPAVDDQLFFDVQAIHKSRLYKNVKPDRQWPLSGLMQCGVCGRGMSIQKSGKSNPVVRCSSKQRDHSCDRKTTFPYFIVHIYMMTHVLQHAIRLHSDKSSNKGLQIELGKVERKLATTRKKLNDEKEFYNKASNEGQNTTMILQLMNETYQKVEELEEQEKSLKASLKQSNRAVSAESRDLLFTPETFNLEMHKLGFKIVVGEEELSTIGFDKPVSKMVYLGYCRKERAYKYADGSSDFVKVWPSSLVTDELLNMQMLKNYINSSSGLKYIWDHIYDDDLEEKLKKRSKEQKEKKLKEKGE

SEQ ID NO: 5980 - protein, 507 aa, synthetic construct
MKRVISYIRFSSEKQAKGDSLRRQSKMVTDWLKAHPEYYLDESLTFRDLGVSGFTGKHLKGGLGDFLTAIEKGLVKAGDTLLIESLDRLSRQNVDRASELLRNILRSGVDVVTLSDGEHYTKESLRDPLSLIKSILIMQRSHEESLRKSERIQAAWNRKKELISEGIKISKRCPAWLKLNDDRKSFSVIPEKVETVKRCFQLRLEGKSIWEIVRTLNDEDRQSMNQYKPGKFGQTSVQDLLKNRSVIGYFTPKGCEEIAGYYPAIIDETTFYKVQQLSHSRYGKRSVSDKPLSVNLFKGVIRCSECGHALIITGFSDTRNGIYRCPLRNENRCSAKGLSRKQTDGTLLTLLSRLDRFNSDTTNIIDMLRLHREHISSNIEKLVQLSLEIEDLNAITSKLKQLKGELSQVDADIEKETQRLKSIDVGCLSDCDLTTKAGRIEAQLIIKSAVKEVVLNTAKRRCKVTFHNGKLIDLPITETPSDNVTEAIQSLSEVTERGLIDVDEVII

SEQ ID NO: 5981 - protein, 560 aa, synthetic construct
MKTKLYSYIRFSSMKQADGSSFERQKRTAKEIAAKYDLELVTSYQDFGVSAFKGANSKTGALSRFLDEIGRSVPVGSWLVVENLDRISRQSVIEAQELFLSIIRRGITIVTGMDGKVYSKESVNANPIDLLLSVMLFARANEESQTKRNRTNSSALLKVKAHQENPQNPAVAIEEVGRNIWWADTSSGYVLPHPVYFPVIKKIVELKQNGYSNGRILDYLNERIAPPNYTTNKDTPKKWARSMLGRMFTNRALLGIKEITIEGVTYELNNYYPRVMEDAEFYQLKKTIGLRSFSYPTKSSPVITLLSGAGLLRCGHCGASMVKRSGASKERLAQYRYMCDGADSRRTNCDHPNWGFRGDQLDKAVLQLLADKIWIAEDKANPIPGMQAQIEDISRKIDNLISLSAMTGATKELADQITTLNHEREAIYNQIKVIEENMYSVDSQGWEKLAQFDLEDVCSEERLKVRLKIKEAVKSIKCYKIDTNYNHFVMEYIDGKTQRIVIERSRRNRKGRIFVDMKTINDRQILESNGLVLHPCLDMLTDKNWKPEEEIPGPLQEFGI

SEQ ID NO: 5982 - protein, 559 aa, synthetic construct
MKTKLYSYIRFSSMRQNDGSSYERQIRMAREVAAKYDLELVNDYQDLGVSAFKGANSKTGALSRFLDAIGRSVPVGSWLFIENLDRLSRADIVSAQELFLSIIRRGITIVTGMDNKIYSLDTVTANPMDLMFSILLFIRGNEESQTKRNRTNSSALIKIKSHQENPQNPAVAIEEVGKNMWWTDTTSGYVCPDPVYFPIVKEIVELRKNGRSTSEILNYLNETYTPPPAVSNKKHSKWPRAMIGRLFHTRALIGIKEVSVDGVKYELKDYYPRVIDDATFYHLKKNIGARAWNFGDKEEVKPIPLLSGIGLLKCEHCSSAMIKVKGTNKRADQYRYSCEGIRSHRFDCEHPNWSFRGDQLEKAVLQLLADKIWIAEDKANPVPALKVQIDEISRKIDNLIALSAMTGATKELADQITTLNSERETLYNQIKMAEEEMYSVDSQGWEKLAEFDLEDVYNEERIKVRFKIKQALKRIGCRRIDRNKNLFVLEYVDGKTQRVVIENSRGTRKGRIFIDLKTINDRQILESNGLVLHPCLDMLTDKNWKPEEEIPGPLQEFGI

SEQ ID NO: 5983 - protein, 605 aa, synthetic construct
MMIQSIDADSKNVKPLVQVTIYCRVSSLMQTDGYGLQRQQDAIRAYLEDFDVPKELGYEIDRDNYVLLEDAGKSAYHGYHFSKGQLGQFRQKVLDGEITCGLFIIENVDRFCRMEEYLAIQEFTNLINNGIDILEVDTGEIFSRKVRKSLNKLTVSIERAYAESERKSRISTRSWKNRKRKSLEEGIAINNNTPDWLSLSEDKQSYIVNKERVEILNEIFKMYAEGFGGTAIVNKLNKEKRYYNKTSWSTNKFYHLLRNRRLIGYLGDERHYPAVIDSILFEQVQSLLNGNVRKGKKAGTMMRSIFNGIAKCGFCGNGMICQTMTSSASYLRCIAERSKTTKCTHAKLIRYKESEQIILEHLCNINWDELKKGNSTHRDDIDVLKTQMSIITDKLQKLDLLIQETEDDDDKISLINIKNKNRKELAAIDEKISALTTNLEIPDLEVIASLKEIQDLENVELRQKVYSLLSKTVSSIECTRTDTPDPFYIFNINYIGAREKHLLIVELKNNCKVTRFVEKISDDLVTYYTPSFVVAYSNNWESGLPEIRGLQDCNGITIKAELMDCMHLFSILDRTNRGEAKVIRDWLVIPKVQEFFFHTSAYEGD

SEQ ID NO: 5984 - protein, 507 aa, synthetic construct
MKRVISYIRFSSEKQSRGDSLRRQSKMVNDWLKAHPEYYLDQDLSFRDLGVSGFTGKHLKGGLGDFLTAIEKGLVKAGDTLLIESLDRLSRQDVDQASELLRNILRSGVDVVTLSDGEHYTRESLRDPLALIKSILIMQRAHEESLRKAERIQAAWDAKKEAAKAGIKVSKRCPAWLKLNDDRKSFSVIPEKVETVKRCFQLRLEGKSIWEIVRTLNDEGHQSMSQYKPGSFGQSSVQDLLKNRSVIGYFTPKGREEIAGYFPPIIPETDFYKVQQLSYSRYGRKPASDKPLSVNLFKGVIRCSECGHALIITGFSDTRNGIYRCPLRNENRCSAKGLSRKQTDGTLLALLSRIDRFDSDMTNTIDTLKLHREHISSNIEKLVQLSLEIEDLSAITSKLKQLKGELSQVDADIEKETQRLKSIDVGCLSDCDLTTKAGRIEAQLIIKSAVKEVVLNTAKRRCKVTFHNGKTITLSITENPSEDVTEAIQSLSEAIERGLIDVDEVII

SEQ ID NO: 5985 - protein, 464 aa, synthetic construct
MKRAALYIRVSTMEQAKEGYSIPAQTDKLKAFAKAKDMAVTKIYTDPGFSGAKMERPALQEMISDIQNKKIDVVLVYKLDRLSRSQKNTLYLIEDVFLKNNVDFISMQESFDTSTPFGRATIGMLSVFAQLERDTITERMHMGRTERAKQGYYHGSGIVPLGYDYVDGELIINDYEAQIIQEIYDLYVNQGKGQQYITKRMVAKYPDKVKTLTIVKYALTNPLYIGKISWDGKVYDGHHTPIIDKSMYDKAQEIIARKAQKGGEQHGNQLGLLLGITYCGKCGAKVFRYVSGGKKYRYNYYMCRSVKKMLPSLVKDWNCKQPSLRQELVEKKVIDSLKSLDFKKIERELKQVENKTKSKITTINNQISKKHNEKQKILDLYQYGTFDVTMLNERMKKIDNEINALTDNISNLEGTKSESLINKLETLKTFNWETETTENKILIIKEFVERIELFDDEVIIKYKF

SEQ ID NO: 5986 - protein, 384 aa, synthetic construct
MTYYVVYRLNRLHRNLKNALKLIKLCQTYHVHILSVHDGYFDMDQAFDRLKLNIFISLAELESDNIGEQVKNGLQEKAKQGQLITTHAPFGYDYHNGTFIINQNESPTVKAVFNYYIKGHGYKKIAQLLEKDDTFINRQPCQVRNIIMNPNYCGRVINQYGQFDNMFPSIVSANVYEQAQRLRLQKQTKRTPSDNQLKQKIKCPYCNATLTNMTIRKKNHTLRYYVCPKNMNASRFVCDFKGINAQTLEDKVLEVCRDFYQNQRIYTKIKSAIDKRIKRQRNIETHHTLTQEQLIEKLAQGIIDAETFREQTQSLRQQPQRTTSINGHQIQHTIQNIIQKRFTLNILYPYIETIHITKDKNLIGIYFKNEPLNIVNQTMQSSIA

SEQ ID NO: 5987 - protein, 542 aa, synthetic construct
MQQLKTKRVGIYVRVSTEMQSTEGYSIDGQINQIKEYCDFHHFEVKDIYADRGISGKSMNRPELQRMLKDAKEGNIDCVMVYKTNRLARNTSDLLKIVEDLHKQNVEFFSLSERMEVNTSSGKLMLQILASFSEFERNNIVENVFMGQTRRAQEGYYQGNLPLGYDKIPNSKHELMINQHEANIVKYIFESYAKGHGYRKIANALNHKGYVTKKGKPFSISSITYILANPFYIGKIQFAKYKDWSEKRRKGLNDKPVIAEGKHSPIINQNLWDKVQMRKKQVSQKPQVHGKGTNLLTGIIHCPQCGAPMAASNTTNTLKDGTKKRIRYYSCSNFRNKGSKVCSANSVRADVIEDYVMKQILEIVKSDKVIQRVVARVNQENQVDYASLHHDIAYKQQQYDEIQIKLNNLIKTIEDNPDLTSVIRPSIQKYDKQLNDIMSQINQLKKQQNEDKPSYNAKKIGEILRHVFHNIEQMKKSQLKALYLAVIDRIDIRKDSNHKKQFYVTLKLDNEVIKQVFNDTPLDEVLLSTSSLFLPQPFYLTI

SEQ ID NO: 5988 - protein, 673 aa, synthetic construct
MIGAEALREEIFQYDKTKFKGICVPYARFSTKGQSKVGKKSLERQLSKAREYAKRNNLFINEDLIFTDKGVSGYSNQGELSKAFKKGQMATMLLLLEEVPPEERDNVYITFHNFDRFSRMSPDAAQAHFNKILNRGFKIVTTIDNQLYDRRDKGMSNMLISIIKMTTAWQESLNKSIYITDALSRKKKVIEYLYNHASQKGKHKHIGVVQPSIPRWIDQESITYDYTDVNGSKRTDTFKKFSLNSHKAEIVRKIFDLKIAGLGYTRICQKLNNDGVEVFEQGRFKKAKKWHPYAVQNIITSDKVLGHITLKEMVTEEYHCKETDEIKTKKVKKEVTSKLENYYPAVVDEEVFRLANVLKFQEKKGKPLGRIGERTNIFATFMSCYCGATLQYSRSQINKRSNKAPVYREQLRCNNALVKNGCFDDYINYVELEHAFFKYVHHIDFREVCLVGDKSLETEIKNLQAEITYLNGQKKELKLKNSGLEKTFESAISQGLNADYVLVALNEAKKSADLIETKINDLKVRITKLQLSLDSKESDFLDIVEYSMRIKNSSTETKIMMRKKLNDFLHSKIKWMEVCSSKHSKFVILCFHDDVIRTFAYSENYANDLMFNTIKINYEVEDSQLNYELFLIYIHQIKRSLRGETEVVSNGDLIEALQRLKRKFYSGKGIDYV

SEQ ID NO: 5989 - protein, 560 aa, synthetic construct
MTKLYSYIRFSSMRQGEGSSYERQIKMAKEIADRYGLELVNDYQDLGVSAFKGANSKTGALSRFLDEIGRSIPVGSWLFIENLDRLSRQDIISAQELFLSIIRRGITIVTGMDNKIYSIETVTANPMDLMFSILLFIRGNEESQTKRNRTNSSALLKIKAHQQNPQSPAVAIEEIGKNMWWTDTTSGYVLPHPVYFPILQKIVKMKQEGHSTGSVLDYLNEHHEPPAPTSNKQHRKWSIAMVSRLFKTKALIGVKEVNVDGVQYELKDYYPRVLSDSEYYFLKNNLIKKAWSFGHAQEKTIPLLSGIGLLKCAHCGSPMVKRKAANGKVEQYRYTCDGEGSGRTDCLYPNWGFRASSLEGAVLQLLADKVWIAEDKANPIPEIQVQIDEISRKIDNLINLSAMTGATKELANQITDLNTQREALHEEIRLFEREMYSVDSQGWEKLAQFDLSDVQNEERLQIRLKIKGALRSIECARVDRNKNLFVLVYLDGLRQRIVIENNRGIRKGQIFVDLKTINDRQILESAGMVLHDHIDILIDEKAFYDGLPKEEDGPLSKFGI

SEQ ID NO: 5990 - protein, 524 aa, synthetic construct
MAKSVITIPATKSKYTATPLSCKKKRKVAAYARVSTDHEEQQSSYDAQVDYYTNYINGRDDWEFVSVYADEGITGCNTKKRDGFNSMVEDALAGKIDLIITKSVSRFARNTVDSLTTIRKLKEHGTECYFEKENIWTFDGKGELLITIMSSLAQEESRSISENCTWGQRKRFQDGKVTVPFGRFLGYDRGEDGNLVLNEKEAQIVRRIYGLFLQGRSPYSIAKLLTAEGIPTPGGKKKWCGTTVKSILTNEKYKGDALLQKVYTADFLTKKKIKNDGQVPQYYVENNHAAIIEPGVFDRVQKLMALRHPGQNRNSSISPFSSRIKCGECGSWYGSKVWHSNDKYRKVIWQCNHKFDGDCKCETPNITEDEIRSLFIKAMNILITEKDALIEDFEAIKDTVFDTSALAQERTDLQIEMNTVAGLIEECIAENARIAQDQGEYQKRYDSLAKRFDRTRDRLEAVERSIAEKQAHREMVEQFLSELAKQDAVTEFTDELWYSMIDYVTIHNKDDIRFTFQNGTEIKM

SEQ ID NO: 5991 - protein, 517 aa, synthetic construct
MRKITRLEPKKTALPTRKKVAAYARVSKDTERLLHSASAQVSYYSELIQKNPEWEYAGVYVDCGITGTLTYKRDEFKRMLTDCETGKIDIILTKSISRFARNTVDLLETVRHLKSIGVEVWFEKEGIRSFSEDGELMLSLLASFAQEESRSISENVKWGIHKRFKSGEIGVANKHILGYRYDEEQKKYIIIPEEAESVRWMFQMYIDGVTLRDIADNLNNAGIRTILGNDFQEASVRQLIFNEVYAGDIRRQKCYVSDPIKKDKVPNRGELPQYYMTDCHEAIIDRETYAKVKAEMERRASLLNPTYCFTKKIRCGTCGAQFTRKKGKVRGKTYVHWICRSKKETGMTCSSVNFSEEELKNICADVLETDCFDEEIFENRVKDIVVLKNGDVEFHLVGGETRRWKNLHLNPPRHKVTLTDAFQGKIRCAKCGNTYHRVNSANKWVYWYCMGKKKKGMTCDNINYTDFKLRQITAHILGLEDFDEQVFSEQIEGITVLEDGNLEYHFYEGRTERWQRV

SEQ ID NO: 5992 - protein, 561 aa, synthetic construct
MDLINVCAYCRVSTDKEEQKQSFEAQQRFFKNKLSKENKYNLIDIYTDEGLSGTKFRKRESFNRMLHDAGLDKVESSSNIAEVRNKYISTDYILSERKPKFKYIFVKDSSRFARNTEVNRILNRLRDKGVYVYFEDLNKSTENDTDKMLIEFIFSMAQQESIDKSNKVRFGNKRSAEAGVVRFGREVYGYTINNKENTLRENKEEADIIRKMFNMRLEGKGSRVMSKELADEGMVTRKGTKFEPGSIRYILKNPVYMGKLVRNKSKVSSIGDSSSRITNPMEEWIIEDSDKVDKIISEEIFYEVQKIILKSAKNSRGKYNGRKEYAGKIVCGSCYKNYNRSWGVNDIKYYVCSNRKKHSKCMNPNLTEKFVDAEIDKYLVKGEYKTMVRGYCKLLIYIMSDKAQKIIDDVPAEKINEIQAEIDKYKNKISILLDILLEDGSESSKEMFNNKKSEFDSKIKELEKELVELNSTKKVKEEKLDKLGEIQESIEKYYSTIPEEISKKDFIQKNLIHIKVNKDKTLTILNRGMEFVFNTFNTLGLSEKEIDEYLNMTLHNETYDT

SEQ ID NO: 5993 - protein, 547 aa, synthetic construct
MKLLVTYIRWSTKEQDSGDSLRRQTNLIDAFYSKHKNDYYLLPAHRYVDKGKSGFHQQHKAQGSDFRRMFENVMSGAIPEGSLIVVENFDRFSRADIDTAIDDVRQILRKGVSILTLGDGELYDKSALTDPVKLIKHIIIAERAHQESLVKQKRIAQVWNHKTQLARELKKPMGKQAPGWLELSEDGSHYIVDEDKASLVNIIYDKRLSGMSMFAICKWLNEQGYPTINQRKVRISKTKKPDGNWSALSVKHILTSRSVLGYLPAKISTEDRKTVLREEIESFYPQIVTDSKFYAVQQLLEETGKGKTSSGEHWLYVNILKGLIRCKCGLVMTPTGIRKPVYQGTYRCNGNKESRCSYGTVSRKLLDTQLCSRLFSKLSQLHDEATDTAKLDELQRRLNTVDSELEKLTETLIQLPNITQIQEALRVKQEEKDELIVQLSREKARVKSVSSLDLSGLDMESVEGRTEAQIIIKRLVKEIVVSGNEKLVDIYLHNGNMIRGFPLDGKDDHTLTLEEATDEMQSLDDMLIFGEPVTRIYPAGDMEEVDA

SEQ ID NO: 5994 - protein, 483 aa, synthetic construct
MRTAVYVRVSTEEQAKEGYSIRAQTERLKAYCLSQGWEIVDFYIDDGQSAKDMERTNLKRMIQHIEQGLIECVLVYKLDRLTRSVLDLYKLLEIFDAHGCKFKSATEVYDTTTAMGRMFITIVAALAQWERENLSERVRMGMEQKAREGQWVINMAPFGYELDKKNKSLIINEKEAAIVNRIFNMYLSGKGMKKIATELNAVNIPTKTGNTWSDNKIGYILKNPTYVGTIRYNYRVHNDQYFEVENAVPAIIDRATFEKVQNVATARKKVHPKAATSEFIFSGTIKCAKCGAPFSGKYGYSKRGEKIHRPRSYYCSKQILGLCTQRNISERFIEHHFLKYLQDIEINQDEIKNVKPDNEQKNIEQQILFLEKDLRAIEQRRKKWQYAWVNNMIDDEDFAARMEEESQTEVKIQEELNNIKPAANSMDPVEFKIILKDIRTNWSTLTAIEKKMMLQLLVNKIVVDKISPKPKVDSVEIVEIEFN

SEQ ID NO: 5995 - protein, 455 aa, synthetic construct
MRVACYDRTSVYEEAKISNDAQYDAVKEYVLEKYEQFPQRFSDKGESGGKADRPAFRQLRAWVCASEEEGVIYVWRYDRLARQAKIALEFIELCQQHQVQVYSISEPLPTSFSHASTNKLFVQLLFTFAEQQRNVIIENVRAGLAYKKQQRQYLSSAVPYGYRLVNGKIQQEAHEAKVVRHIFQLYLTKKYGYKKLCQRLTQQKFFFRERPFQPYHIYSILKNPLYYGEIKGGSLGKYLGTFEPILSKATFLQVQEIRQSRCTAKKDTYPYLLRQKIKCPFCGRHLSSKYQWNTKKTLHYYHCTDRSCQGIFLRAERVESEVLEKIQAFFQHEGVYQALIAQLTQQLAEKRKDEKHKVIQQKKQEAQWLKAFEEGNCSLEELKQQLQALQKPMTTSSFLSLQECEAKVKEWLQLKDLSSRQLLCDHVCRIEVTKEKTVCGIYFRQLTQNILEGNE

SEQ ID NO: 5996 - protein, 545 aa, synthetic construct
METIRTKRVALYIRVSTQEQALEGHSIQAQEQNGRQFAERMGYEVVEVYADEGISGKSTKNRFAYQRMMKDARNHRFDLLVIWKLTRLGRNMLDVLQTVEELLRYDVGLHSISEQFDVTTSTGKLMLQLLGSFGEFERNQIAENVQMSMQSLVKDKKRYAGGRRLGYVSGIDTNGQKQLVIEPEEAKIVRLIYAKYLGGEGYRAIANFLNRQGYQTVKKNAFSTTAVKDILRNKIYAGYLEYARYINWETKRRKGKNPRPILVKGTHEPIISEEDYQKVQERLALEGKQPKWNHTGENVLTGLLRCPECGAAMAASNVTNTLKDGTKKRIRYYSCSVFRNKGASVCHANSIRAEQAETFVADRLKEIVQLPEVLPRLVAALNEEIVRQSQPLEQELVVLLERKEELKTKIEKWEAALEDSPELFPMLKDRLDELTEKRRQLHIRENEILGIFQQQGEPIQVKDVQRILTSLDRFLAQSEKKQIKALYRTFIEKITFDPNHKEMLEITMKFTPAVVQQLNEQYQIAVSKTKDTAIFVLKTPFTLTI

SEQ ID NO: 5997 - protein, 592 aa, synthetic construct
MNNMQQLYFGNLALDPNRQRRIVYYGRVSTEHEAQLEALEKQMQWYEDQTKYHPNWTVVGKYIDEGITGTLAKKRPSFMKMIEDAKQRKFDLIVTREVCRFARNTVDTLVLTRELKNYGVEVYFVSDNIWTMDGDGELRLTIMATLAQEESRKISERVRAGQAVSRENGVLFGNGNIIGYDRVGSTYVINPEQAATIRTIFELYSQGLGQMKIVNELTRRGCKDGNGNVKWSCIKISRILRNATYMGYICYNKSKVNNFLEKKRIKNLDEDSFILKKGDFEPIISEALWHQCENIRNGRIHKYQMPSGEERRRGTRIAQNLWVKKLRCRCGAGYNRFKWRVLRDGTPVYGYQCNYRTQNPAKTFVEKNHLDSQKYCDAIAICEWKLDLMAKMIFDQLWGDQREAVLKACQMVESCILSTTLQTDSEKAEKQKKIEKLEQRLLNLGQMRADGELTREQFQKLYAQTTTELDALKTQQNSVPDSAEEKVSFDLNKIKKGLSQMVDITAPRISEELIDEFVEAVTPVENHHYRWKMTFGEMKSGQERYNLMEPENSPVLSFTIDFETARQYRMSNGLPAQFRQRDWTDLNVEVYL

SEQ ID NO: 5998 - protein, 474 aa, synthetic construct
MEDARAGKFKTVIVEALDRLSRDQEDLAGLHKRLAFAGVEILAIHDGKTDAIQVGIRGLVSTLFLADLKNKIRRGMTGVIREGRHAGGKAYGYQPTPGQPGVMQIFEPEAEIVRRIYRETIEGKMSREIAIGLNQDKIAPPRGTQWNASTINGSAQRGYGIIRNPLYAGEIVWNRVHMVRDPETGKRISRPNPESEHKRTPAPHLAIVDRETYDQALSMLEGKSRRGQGGSNTRRPKRLLSGITRCGHCGGGMSIHDHHGKTVRIRCSRSTQSGICGNNKRYRLDKIEKAVVTGLRDQLNHPEVLVEYVKAYREERRLDADAAVRERASVERRVADLDGQLDRLMKAMTRGILPIEAVEAQYAPLKAEKEELEKKLVDIPAAPVVELHPAAITRYKKSIDALADRLASLDDITDSDVHKAFRDLVDHVTIIDREDGGVEVEIVGQLAALVGKQAEMLGGRVVAGEGLEPPTRGL

SEQ ID NO: 5999 - protein, 546 aa, synthetic construct
MTKAYSYIRISSKKQERGEGIRRQLERADAYAKKHGLEIDTQLQDIASGYHAKHVTHGALGAFLDLVKEGRIEAGSVLIVESLDRLSRADVISAQAQLLTLLSAGIDVVTLTDEARYSRDRDFTQLIISLTIMSRANEESSRKADFSLKYHSQRLNDIAAGHKRHIVKLPRWLDQTRIDGSKEYDYSLNRHAETAKEIFRLYNKGLGASVIAQRFNQQSIPVYETKTKWHVNGILRVIRSIVAKGDYQVDDVVLPDFFPAVVSRKEWQIANDRLSKQDRTGRRGKTVTNLFSGLTKCFVCGGNARVVGGGSAYKYLTCETAHKTGIHCDGEVKWGKRALPYDPIEKAILDNVGLFVEVEESPKDASDLAKEVAAHLLELDGINKKINNLLDLAEDIDNVEDRANFRKRLAERRSEKATIEQMLSEKQTLINEVATAKDRKVDLKSYVDDERTKWPDMTVDDLYESRSNVALRIKSIVSAVRIDAGSNEVHVAVGGVTKGWTFSGKGDVVSSFDFSHLPIETIQKMTKGVGLSVSEKDIEKVRGSGA

SEQ ID NO: 6000 - protein, 478 aa, synthetic construct
MNVALYPRVSTAEQAKEGYSIREQIDRLTKYCDAMGWHIYKIYSDPGYSGANTQRPGLQEMIKDIKLKRVSKVVVYKLDRLSRSQLDTLYLIEKVFLANGVDFVSMSENFDTATPFGRAMIGILAVFAQLEREQIKERMCIGKEGRAKEGLYHGSKWLPIGYDYVNGQLVVNDYEKLQVCEVYHLFVQGMPLRAIETLFIKKGYRHKYGNWNPKTMKRVMKNKTNLGYINHHDTFYKGQHQPIIDEDTFEQAVKLLKIRSDAFKQTGIKPGIQTSLLGGLIYCKHCGGRYTKQSGRKWKGNPAPLYYTCYSRSKKVKAMIKDPNCKNKNYKMEELNNLVFDRIKELALDRSVISELKKENQSDTDNTAKIQLLRNEIKKIDAQISKLMDLYSLDNVSIDIISQKLQSLGQSRNNLEIELSSLSKYESELSEEEAYELACSFKEVLKKADFNETRMVIESLINRIEIDNDKVSIYWKFI

SEQ ID NO: 6001 - protein, 493 aa, synthetic construct
MRVAIYIRVSTDMQAEEGFSIEGQRSRLISFAESQDWVIHDFYVDDGYSAKDLKRPDMQRMLEDMEKKLFDVVLVYKLDRLTRSVGDLHSLLKTFDLYGVKFKSATEIFETTTAMGRFFITLVGAMAEWERGTISERVRFGVEQMVAEGRRPGGVVPYGYTQDEQLIPEEAALIREVRDLYMSGKGYKSVAMIMNRSGKLRRGREWTDATVAYTLENPYYAGIIRIGSKTPAGTYVNSKRDERVKCVYGKGSHEPIFTQEEYEELKKYMKRKSQGGFSKVGEYWFSGVLRCGRCGAAMFGRLTTKRTTTKGIVRTQYYICSNRHHSKTCDLPIFRQTHIEHLVFQYINQIQEDMEKLNEEAMKIFADEGKKKSAIDSAKRELSKVAERREKWQYMFVEGLIGKQEIRKRMAEEDKREKEIRQRIAQEQKAFSGIPRIEELVGLAEGWAYFDDQEKKEIIHTVFDKIVVNTDLRKIKGVKNKFFDAYIQEISFN

SEQ ID NO: 6002 - protein, 558 aa, synthetic construct
MKGKIALYSRVSTSEQSEHGYSIHEQEQVLIKEVVKNYPGYDYETYIDSGISGKNIEGRPAMKRLLQDVKDNKIEMVLSWKLNRISRSMRDVFNIIHEFKEHGVGYKSISENIDTSNASGEVLVTMFGLIGSIERQTLISNVKLSMNAKARSGEAITGRLQGYRLSLNPLTQKNDLVIDENEANIVREIFDLYLNHNKGLKAITTILNQKGYRTINQKPFSVFGVKYILNNPVYKGYVRFNNHQNWAVQRRSGKSDKNDVILVKGKHEAIISEDVFDQVHEKLASKSFKPGRPIGGDFYLRGLIKCPECGNNMVCRRTYYKTKKSKERTIKRYYICSLFNRSGSSACHSNSINAEVVERVINVHLNRILSQPDIIKQIASNVIEELKQKHSNQTEIKYDIDSLEKQKAKLKTQQERLLELFLDDQMDSEMLKAKQSQMNQQLEVLDQQIKEAQQANQSQDEIPNFDKLKGRLILMITRFSVYLRKATPEAKNQLMKMLIDSIEITTDKQVKLVRYKIDESLIPQSLKKDWGSFFMPKFQFEIYGQNDYFIDQITTFTT

SEQ ID NO: 6003 - protein, 522 aa, synthetic construct
MVMKDDRAYVRVSTLKDSQKDSPEHQEAFIRERASRENITISKVYEDRDTATSIVAREDVQKMIADAKRGEIRSIWFASLSRFSRDALDAISLKRILVNALKIRVVSIEDGYDSAVKDDELLFGIKSVVNQNTSGDISQSSRRGIRQSAAKGNYIGSIPPYGYRKVVVDGRKTLEVIPEQAEIVKKIFELYLNGNGEKNIVNYLNGDNEKNTPIPSYRGGVWGLTSVQRILQNENYTGYTVYGRHTTEVAYNDLSDLMDRGKKLVMKPKSEWQKTPFQTHEAIISKEVFDRAQEIRLLRGGGTRGGRRSFVNVFSKFIFCAECGTAMVSMGSKTKNKNGKDYRYLMCSRRRRTGEIGCSNGKWLPYYEFRDELIKDILERVRESIRVLEEEGASEINSQLPESNTEKDKRKLEKRIEENRKLLFEVRRQHMLGEIDDAQYEFEKGQYEKDISDSEHRLAIIEANERRSLDREKVIRETKQYLKELTEMKTYDDVEKTRMLLMQMVKRIEVNKDGEVDVQTYV

SEQ ID NO: 6004 - protein, 452 aa, synthetic construct
MKAAIYIRVSTQEQIENYSIQAQTEKLTALCRSKDWDVYDIFIDGGYSGSNMNRPALNEMLSKLHEIDAVVVYRLDRLSRSQRDTITLIEEYFLKNNVEFVSLSETLDTSSPFGRAMIGILSVFAQLERETIRDRMVMGKIKRIEAGLPLTTAKGRTFGYDVIDTKLYINEEEAKQLQLIYDIFEEEKSITTLQKRLKKLGFKVKSYSSYNNWLTNDLYCGYVSYADKVHTKGVHEPIISEEQFYRVQEIFSRMGKNPNMNRDSASLLNNLVVCGKCGLGFVHRRKDTVSRGKKYHYRYYSCKTYKHTHELEKCGNKIWRADKLEELIIDRVNNYSFASRNVDKEDELDSLNEKLKTEHAKKKRLFDLYISGSYEVSELDAMMSDIDAQINYYEAQIEANEELKKNKKIQGNLADLATVDFDSLEFREKQLYLKSLINKIYIDGEQVTIEWL

SEQ ID NO: 6005 - protein, 520 aa, synthetic construct
MKNKSVTVIPATKRVGTLKVDAEEKPKLRVAAYCRVSTDTDEQASSYEVQVEHYTNFINNNSEWELAGIYADDGISGTSTKDREEFNRLIQDCMENKVDRIITKSISRFARNTLDCLKYIRQLKEKNIPVFFEKENIDTMDSKGEIMLTIMASLAQQESQSLSQNVKLGLQYRYQQGEITINHNRFLGYTKDEDGHLIIEPTEAEVVKRIFKEYLEGSSLIQIARNLEADRILTGAGNKNWAGTTVKGILVNEKYMGDALLAKTHTVDFLTKKRVKNNGIVPQYYVENSHEPIIPKTLFLQVQEEITRRANLKNKKGSITYSSKYALSGIAHCGKCGEIYRRLHWNNRGKKSIVWRCYSRLDKNKDCDARTILEDDLKQAVVDGINRVFAGEGRIKEILNSSIRKLLKVDNTSEIKTIDLQLQSLQQQLLEQSSRSQDITNIGEQIIQLKEQKQNILLGKAVNDNSKQRMDEMLEFIDKNELDGLEYDEVLVRRLVEQVIVYDDYITIKLKSGIDMKVQS

SEQ ID NO: 6006 - protein, 563 aa, synthetic construct
MERDDLPTLRALGFEDEELRALGLWDVPTGEPFDLAEAYIRRSKRSDDLASLRAHVRDICRTALSEGKRIRHVWFEQKSASKAYVKREEFDNAVSAVKAGLSKTLYIWKTDRLSRRGMGHVGLLLDEFDKRGARIVSVTEGLDSSKGSRMVFAILSERARDEAKDIALRTKNGVDAHKAEGKWLGGVTPYGLECPKETGKLQHKAAEYPTARAIAVALLDGKTPAEIANDLNTRNVPTRKGKRWRAQTIIHLAHSPSWAGLIPNRERATDEFGQPLGKWHRGGEPLLNAKGHPIKCGKGVVSYAEWVRINELISGRSKPGSAIGDKTRGIRKAATIMTGTLRCPHCKGPMGNGGRNYRCQARINQGPSVCKGVASDRKRIDDAMGALWIGHVLRLSAESPTIHNIARRFLNYQDPEKEARKRAVSAALDSAVSRELRLNKEFFVGGMDETQYDALRKDLGAQIESLKTELAELSKGADLTPLMSTEALAALWESEGMEGKRALLSAALKSVTLLPAKCRGDRTPITERLVPEWRDTDGMPDDVRKGAQKTIERRRARKLAGAA

SEQ ID NO: 6007 - protein, 496 aa, synthetic construct
MKTEKNGIPLSVAVKSFENVADLYIRVSTTEQAEEGYSVEAQEAKLQAYCKAMSYTINRVCIDPGYSGTSMDRPGLQELITDVRSNRCKKILVWKLDRLSRSQKDTLILLEDVFLANSCDFISVMESFDTSTPFGRCIVGILAAFAQMERENIRIRTTLGRVEKIRKGYFSGSHAPLGYKFKDGCNELLVNPYTSIMVREVFRLFLSGTGLSAIGRYMLDKYGPGQYDWAKNTAIRRILSNPVYMGKVRLNGELFDGIHEAIISETDWYMAAALLEHNKAIDKRSYRYALGTPGRGDNLLTGLLFCGDCGARMYARKVSKTKKKYICHSVARTSAAMIKSNHCSNRLHPYTVEELDAVIINEIKKLSIDRSYFDSMVERCRDEKPLDFSAIQERIAEIDKQTGRLLNIYQTGLVCLEEISARLGTLKEEKEKLQQNLLSSDSATASCSLDATWKSLQGFSAIIASGDLEAMQRLIHSLIDKVVVLNNDITIYWSFC

SEQ ID NO: 6008 - protein, 481 aa, synthetic construct
MITTNKVAIYVRVSTTNQVEEGYSIDEQKDKLSSYCDIKDWNVYKVYTDGGFSGSNTDRPALESLIKDAKKRKFDTVLVYKLDRLSRSQKDTLHLIEDVFIKNGIEFLSLQENFDTSTPFGKAMIGLLSVFAQLEREQIKERMQLGKLGRAKSGKSMMWAKTSYGYDYHKETGTVTINPAQALTIKFIFESYLRGRSITKLRDDLNEKYPKHVPWSYRAVRTILDNPVYCGFNQYKGEIYPGNHEPIISKEEYDKTQSELKIRQRTAAENVNPRPFQAKYILSGIAQCGYCGAPLKIMLGVKRKDGSRLKKYECHQRHPRTLRGVTTYNDNKKCDSGFYYKDKLEASVLKEISKLQDDADYLDKIFSGDNAETIDRESYKKQIEELSKKLSRLNDLYIDDRITLEELQSKSAEFISMRGTLETELENDPALRKNKRKADMRKLLNAEKVFSMDYESQKVLVRRLINKVKVTAEDIVINWKI

SEQ ID NO: 6009 - protein, 481 aa, synthetic construct
MITTNKVAIYVRVSTTNQVEEGYSIDEQKDKLSSYCDIKDWNVYKVYTDGGFSGSNTDRPALESLIKDAKKRKFDTVLVYKLDRLSRSQKDTLHLIEDVFIKNGIEFLSLQENFDTSTPFGKAMIGLLSVFAQLEREQIKERMQLGKLGRAKSGKSMMWAKTSYGYDYHKETGTVTINPAQALTIKFIFESYLRGRSITKLRDDLNEKYPKHVPWSYRAVRTILDNPVYCGFNQYKGEIYPGNHEPIISKEEYDKTQSELKIRQRTAAENVNPRPFQAKYILSGIAQCGYCGAPLKIMLGVKRKDGSRLKKYECHQRHPRTLRGVTTYNDNKKCDSGFYYKDKLEAYVLKEISKLQDDADYLDKIFSGDNAETIDRESYKKQIEELSKKLSRLNDLYIDDRITLEELQSKSAEFISMRGTLETELENDPALRKNKRKADMRKLLNAEKVFSMDYENQKVLVRRLINKVKVIAEDIVINWKI

SEQ ID NO: 6010 - protein, 481 aa, synthetic construct
MKTMNKVAIYVRVSTTSQVEEGYSIDEQKAKLSSYCDIKDWNVYKIYTDGGFSGSNTDRPALESLIKDAKKRKFDTVLVYKLDRLSRSQKDTLHLIEDVFIKNGIEFLSLQENFDTSTPFGKAMIGLLSVFAQLEREQIKERMQLGKIGRAKAGKSMMWAKTSYGYNYHKETGTVTINPAQALAVKFIFESYLRGRSITKLRDDLNEKYPKHVPWSYRAVRTILDNPVYCGFNQYKGEIYPGNHEPIISKEEYDKTQSELKIRQRTAAENVNPRPFQAKYILSGIAQCGYCGAPLKIMLGVKRKDGSRLKKYECHQRHPRTLRGVTTYNDNKKCDSGFYYKDKLEASVLKEISKLQDDADYLDKIFSGDNAETIDRESYKKQIEELSKKLSRLNDLYIDDRITLEELQSKSAEFISMRATLETELENDSALRKNKRKADMRKLLNAEKVFSMDYEKQKVLVRGLINKVQVTAEDIVIKWKI

SEQ ID NO: 6011 - protein, 680 aa, synthetic construct
MTTPTDPLVTMAASLEPKRAISYIRVSTHGQASRGDAAEGFSIPAQREANKRKASQLGALIIKEFIDRGESARSAKRPELQNMLGYIKEHPEVDYVIVHKLDRLARNRVDDVDINRVFDECNVRLISTSENIDQTPGSMLLHGIMSAIAEFYSRNLGHEVTKGMSQKAKNGGTNGRATLGYVNKRGKNGDGKDTAWVEIDPERGPHITEAFRLYATGDWTVAKLAAHLEAAGLTSRATSRHPSRPLGKNQLLGILRNPYYRGVVVYQGAEYPGKHPALIDTETWLLVQSVLTSHYHGERNRTHNHHLKTTVRCGLCGNRLTIQNSTNRHDTTYAYFVCRYRSRHQPKCGFHAALIDAVDEQVAGIYKTIRITTGQRQHIEKHLLAELDRIYAQQAAASKNLTNQRERLKAEQAKLLQAHYADAIPLELMKQEQQRITRQICTIDKEIAGYTANRQQVEDHLAQALDLLEDCHKLYQHAPAHLKKMLNNVFFEQVLINPPEANGLDGAGGTGQMIANDRELVASDGWAALHDGELVGVSTGEQFGNSIESARSEKAYSHLNSQADSSSVQAVPHINPPFDVLGNPVLQAEIFNSGQNADLATGTDRTQPDDKYPEQAQNLELSLQAASTNLNNLLQTPDTTKQKSPPEKHHSDEGLDMRIMVGPVGFEPTTCGLKVRSSTN

SEQ ID NO: 6012 - protein, 475 aa, synthetic construct
MKTMNKVAIYVRVSTTSQVEEGYSIDEQKDKLEAYCKIKDWKIYDVYVDGGFSGANTQRPELERLISDVKRKKVDIVLVYKLDRLSRSQKDTLFLIEDVFAKNDVAFISLQENFDTSTPFGKASIGMLSVFAQLEREQIKERMMLGKEGRAKNGKSMSWTTIPFGYDYSKETGVLSVNPTQALIVNRIFTEYLNGKPVVKIIRDLNAEGHVGRKRPWGETITKYLLKNETYLGKVKYKDKVYEGQHEPIITQELFDLVQLEVERRQISAYEKYNNPRPFRAKYMLSGLMKCGYCGASLGLRYTRKDKNGISHHKYQCRNRHSKDLEKRCESGWYSKEELERIVIKELERIKFDPKYKNETLAKKEETIKVEEIKKQLERINNQVSKLTELYLDEIITRKELDEKNDKIKTERQFLEEQLENQKSNVLSIRKRKLTRLLKDFDVEKLSYEDASKIVKNIIKEIIVTKDGMSITLDF

SEQ ID NO: 6013 - protein, 554 aa, synthetic construct
MFTKNVSVKLNKYHLYQRVSKQVQAEEGLGIQRQEQVCEHWISEYNNRLVSEGKSVYSKGFIYEDRGKSAYTAANFNKGELGTLINDIKNGKIEKGDLIVIELIDRFSRANVDFVRGEFQRILDAGVKIAITKWNLVFEENMESVSSVTGRILLEIGMYLAYQESSQKSSRIKASRKLLEDSGRKSIAKPPFWLARNLDLKSYTIIEENAEIIRNIFDLKLNFNYGAQKIIKKLGNLEIYRYSFDENGNLIKTTKNSPLNESSINAYLRNQNVIGKLKGKDYYPRIIDDRTFYAVQRRTRENTGGVGDIFRNVFVGVGKCGCLIRKENENGCGSLVKCGYIMAFSSRKVKNPTKGMYLKCNRKRKSTRCDAENINYYLAQNKIYNVLKSLKFDIEQSVDISHLEEKIISIDKSMSKIREYMTQYSDDEEWEKQYNIKRIEREKIENEIKTSKSRITGRLSNLDMDFSEEKDRVLFNQFLKDNRITVYFTKDRMEIIIGSMNNFSIKCGYNDNEREIDQLVESISQKDFVGLETISRGSEGKELLRFKLPTVSDS

SEQ ID NO: 6014 - protein, 481 aa, synthetic construct
MITTNKVAIYVRVSTTNQVEEGYSIDEQKDKLSSYCDIKDWNVYKVYTDGGFSGSNTDRPALESLIKDAKKRKFDTVLVYKLDRLSRSQKDTLHLIEDVFIKNGIEFLSLQENFDTSTPFGKAMIGLLSVFAQLEREQIKERMQLGKLGRAKSGKSMMWAKTSYGYDYHKETGTVTINPAQALTIKFIFESYLRGRSITKLRDDLNEKYPKHVPWSYRAVRTILDNPVYCGFNQYKGEIYPGNHEPIISKEEYDKTQSELKIRQRTAAENVNPRPFQAKYILSGIAQCGYCGAPLKIMLGVKRKDGSRLKKYECHQRHPRTLRGVTTYNDNKKCDSGFYYKDKLEAYVLKEISKLQDDADYLDKIFSGDNAETIDRESYKKQIEELSKKLSRLNDLYIDDRITLEELQSKSAEFISMRATLETELENDPALRKNKRKADMRKLLNAEKVFSMDYENQKVLVRRLINKVKVTAEDIVINWKI

SEQ ID NO: 6015 - protein, 481 aa, synthetic construct
MITTNKVAIYVRVSTTNQVEEGYSIDEQKDKLSSYCDIKDWNVYKVYTDGGFSGSNTDRPALESLIKDAKKRKFDTVLVYKLDRLSRSQKDTLHLIEDVFIKNGIEFLSLQENFDTSTPFGKAMIGLLSVFAQLEREQIKERMQLGKLGRAKSGKSMMWAKTSYGYDYHKETGTVTINPAQALTIKFIFESYLRGRSITKLRDDLNEKYPKHVPWSYRAVRTILDNPVYCGFNQYKGEIYPGNHEPIISKEEYDKTQSELKIRQRTAAENVNPRPFQAKYILSGIAQCGYCGAPLKIMLGVKRKDGSRLKKYECHQRHPRTLRGVTTYNDNKKCDSGFYYKDKLEASVLKEISKLQDDADYLDKIFSGDNAETIDRESYKKQIEELSKKLSRLNDLYIDDRITLEELQSKSAEFISMRGTLETELENDPALRKNKRKADMRKLLNAEKVFSMDYEGQKVLVRRLINKVKVTAEDIVINWKI

SEQ ID NO: 6016 - protein, 557 aa, synthetic construct
MAKRVRTLLRVSSKQQLHDDDIPLQRAEAQRYIATHKDWVFDKEYLEGAISAYKNGIDDRDILQEILEDAKNDEFDVLLAYMSDRIGRQEEYAFYVATLNRLGVEVWTINDGELKTEDHVDKLITYIKFWQNEGESKKTSKRVHDARVESVREGKFIGGKAPYGYKSVDSGILSNKGRMLKKLVIVEEHAEVVRKIYSLAIHQGYGYEKIAKYLNKEGIPAPSLPQWKGGTVASILKNPTYMGYYSINRRKTIYTKKKLDRSEWTLSKKQIPEIVIISEQDWERAQLIREARKNRIQASKDKSFQAFEEQYNTPFSTSGKLALIGFTYCGYCGKRLKNSGYLNRWETKEGEKKVSYAGRYSCPSKCKERGSYTQDYLEPIVFSIVEEYMENLKAVDISEEIKTMQRQLTAGTDKQLKNIEKEIQKLREDIATLEDKIPEAIRGDYYFSVEKLSAMIQEKEQKIVKLTEQEKQIHQKVAQNQFASNDLEKFISIIPNWKEEFQDADIATKKMLLSSLIDRIEVKDMDIRIKFKIRLEDFLDFTSEDVLPKTMHNDVQG

SEQ ID NO: 6017 - protein, 525 aa, synthetic construct
MGKVRIIPAHQQKGNSVQPQKNRLPFEQLRVAAYCRVSTDYDEQASSYETQVAHYKELIQKEPTWEFAGIYADDGISGTNTKKREQFNQMIAACEAGKIDLIVTKSISRFARNTIDCLKYIRDLKAINVAIFFEKENINTMDAKGEVLITIMASLAQQESESLSQNVKMGIQYRYQQGKVFVNHNHFLGYTKDAQGNLVIEPEEAKVIKRIFYSYLNGMSMKQIADSLKADGILTGGKTKNWQSSGVSKILKNEKYMGDALLQKTYTIDFLSKKRVKNNGIMPQYYVENDHPAIIPKPVFMQVQQLIKQRQNGITTKNGKHRRLNGKYCFSQIVFCGKCGDIFQRNMWYRPEKVAVWRCASRIKRSKTGRRCMIRNVKEPLLKEATVEAFNQLIEGHELASKQIKANIMKVIKNSKGPTLDQIDQQLEEVQMKLIQAANQHQDCDALTQQIMDLRRQKEKVQSRETYQQAKLHSIDEINELVNLHKYGLVNFDEQLVRRLVEKITIFQRYMEFTFKDGEVIRVNM

SEQ ID NO: 6018 - protein, 557 aa, synthetic construct
MITKTAYCYCRVSSSQQADDNGGFGMTRQQATLIEYISSFGENKELGYALSPDQVVFLRAEGESGFTGKNIEKGSILLNFIEDIKSKKIKNSVLLIENIDRFSRFNVNESTELFLSIVNNGCDIHECDGGVIHHRKSDTNLISAGLTRARAESYRKSKFSIKNWDKRFENTIKDKSVLTHHSPSWLNTDGGFYTIIESEAVVYRKIFEMFNNGYGQAAIRTYLNDNGMTINGNTIGTWMIHKVLKDDRLWGRLRTKSDLRKEHDGLLIYPVVVEREIVNTAALILSSKGKSIKINKRANNIFTGLMICGVCKNGHLLVNHDKRGSYLRCSNSLSSNTRCIARGFKYGIVEQALIKFIKNIDTKILDSNDDNILELDRLGEELKYYLDYMNQVQQDFNSVDIPDPNDRKLLKNLQSKVRVLEDEILKIKSFENSEADFEVIQVASINSDLLDPFNVDLRKEFNIKLRKIIQQIEAFRYDKSNILIIIKYYAVKNQQWLLIDSKTGDMKSHTYIDEEHVVIEGVDKKPLRFDVKTKQYKLDGTQISVEDLISELKIISQ

SEQ ID NO: 6019 - protein, 556 aa, synthetic construct
MITKTAYCYCRVSSSQQADDNGGFGMTRQQATLIEYISSFGENKKLGYALSPDQVVFLRAEGESGFTGKNIEKGSILLNFIEDIKSKKIKNSVLLIENIDRFSRFNVNESTELFLSIVNNGCDIHECDGGVIHHRKSDTNLISAGLTRARAESYRKSKFSIKNWDKRFENTIKDKSVLTHHSPSWLNTDGGFYTIIESEAVVYRKIFEMFNNGYGQAAIRTYLNDNGMTINGNTIGTWMIHKVLKDDRLWGRLRTKSDLRKEHDGLLIYPVVVEREIVNTAALILSSKGKSIKINKRANNIFTGLMICGVCKNGHLLVNHDKRGSYLRCSNSLSSNTRCIARGFKYGIVEQALIKFIKNIDTKILDSNDDNILELDRLGEELKYYLDYMNQVQQDFNSVDIPDPNDRKLLKNLQSKVRVLEDEILKIKSFENSEADFEVIQVASINPDLLDPFNVDLRKEFNIKLRKIIQQIEAFRYDNNILIAIKYYAVKNQQWLLIDSKTGDMKSHTYIDEEHVVIEGVDQKPLRFDVKTKQYKLDGTQISVEYLISELKIISQ

SEQ ID NO: 6020 - protein, 421 aa, synthetic construct
MQQLIKDADTGLYDAVLVYKLDRLSRSQKDTLYLIEDVFQKNNIHFISLSENFDTSTAFGKAMIGILSVFAQLEREQIKERMSMGRVGRAKSGKIMEFNNPAFGYEVDGDNYKVDPLRAEIVKRIYKMYLSGTSINKIKETLNLEGHIGNKKNWSDTRIRYILSNPTYLGKIRYDGKTYDGKFSPIIDEETFNKTQNELKERQTATYKRFNMKLRPFQSKYMLSGLLRCGYCGATLFVNSYVYNGKRKLRYNCPSTYKSKQKTRTYKIMDPNCPFKLVYAKDLEPAVINEIKNLALNPQSIQKPVKKKPDIDVEAIQKELAKVRKQQQRLIDLYVISDDVNIDNISKKSADLKLQEETLKKQLAPLEEPNDDDKIVAFNEILAQIKDIDSLDYDKQKFIVKKLIKKIDVWNDNKIKIHWNI

SEQ ID NO: 6021 - protein, 507 aa, synthetic construct
MKRVISYIRFSSEKQAKGDSLRRQSKMVNDWLKAHPEYYLDQDLSFRDLGVSGFTGKHLKGGLGDFLTAIEKGLVKAGDTLLIESLDRLSRQDIDIASELLRRILRAGVDVVTLSDGEHYTSESLKDPLALIKSILIMQRAHEESLRKSERIQAAWNRKKELISEGIKVSKRCPAWLRLNDDRKSFSVIPEKVETVKRCFQLRLEGKSIWEIVRTLNDEGHQSMSQYKPGKFGQTSVQDLLKNRSVIGYFTPKGCEEISGYYPAIIDETTFYKVQQLSYARHGRKPASAKPLSVNLFKGVIRCSECGHALIITGFSDTRNGIYRCPLRNENRCSAKGLSRKQTDGTLLTLLSRLDRFDSDTTNTIDTLKLHREHISSNIEKLVQLSLEIEDLSAITSKLKQLKGELSQVDADIEKETQRLKSIDVGCLSDCDLTTKAGRIEAQLIIKSAVKEVVLNTAKRRCKVTFHNGKSITLPITENPSEDVTEAIQSLSEVTERGLIDVDVVEI

SEQ ID NO: 6022 - protein, 509 aa, synthetic construct
MRRAISYIRFSSERQLKGDSVRRQSKLVTDWLDKNPEFYLDSSLSFKDLGKSAFSGKHLKGGLGDFLTAIEKGLVKAGDTLLIESLDRLSRQDIDIASELLRRILRAGVDIVTLSDGEHYTRESLKDPLSLIKSILIMQRAHEESLRKSERVQAAWNRKKELISEGIKVSRRCPAWLRLNDDRRTFTIIPDKVEVVKRAFDLRLQGLSFWAITRTLNDEGHLSLNQYTPKQKGWSDTAVKKLLRNRAVIGCFTPAGREEVQGYYPAIISESLFYRVQQLNTGQYGRASVSSNPLSVNLFRGIIKCSECGATIVLGGYALKRFGMYRCPNRSANRCSAKAISRKQTDATILYMLALCDRFETENTDTIDSLKLQREDLQRKISKMAELAIELDDMTIITEKLRDMKNALSKLNHDIEEETKRIKAITTGSLKDIDRTTKEGMIETQLLIKGVLKEIVIDAAKRRCKVTFHNGKAITLPITEDPSENVTEAIQSLSEVTERGLLDVDVVAI

SEQ ID NO: 6023 - protein, 547 aa, synthetic construct
MKLLATYIRWSTREQDSGDSLRRQTNLIDAFYSKHKEEYYLLPAHRYVDKGKSGFHQQHKNQGSDFRRMFDNVMSGTIPEGSLIVVENFDRFSRADIDTAIDDVRQILRKGVSILTLGDGELYDKSALTDPVKLIKHIIIAERAHQESLVKQKRIAQVWNHKTQLARELKKPMGKQAPGWLELSEDGSHYIVDEDKASLVNIIYDKRLSGMSMFAICKWLNEQGYPTINQRKVRISKTKKPDGNWSALSVKHILTSRSVLGYLPAKISTEDRKTVLREEIEGFYPQIVTDSKFYAVQQLLEETGKGKTSSGEHWLYVNILKGLIRCKCGLVMTPTGIRKPVYQGTYRCNGNKESRCNYGTVSRKLLDTQLCSRLFSKLSQLHDEATDTAKLDELQRRLNTVDSELEKLTETLIQLPNITQIQEALRVKQEEKDELIVQLSREKARVKSVSSLDLSGLDMESVEGRTEAQIIIKRLVKEIVVSGNEKLVDIYLHNGNMIRGFPLDGKDDHTLTLEEATDEMQSLDDMLIFGEPVTRIYPAGDMEEVDA

SEQ ID NO: 6024 - protein, 507 aa, synthetic construct
MKRVISYIRFSSERQAKGDSLRRQSKMVTDWLKAHPEYYLDQDLSFRDLGVSGFTGKHLKGGLGDFLTAIEKGLVKAGDTLLIESLDRLSRQDIDIASELLRRILRAGVDVVTLSDGEHYTKESLKDPLALIKSILIMQRAHEESLRKAERIQAAWDAKKEAAKAGIKVSKRCPAWLKLNDDRKSFSVIPEKVETVKRCFQLRLEGKSIWEIVRTLNAEGHRSMNQYKPGKFGQTSVQDLLKNRSVIGYFTPKGCEEISGYYPAIIDETTFYKVQQLSHSRYGKRSVSDKPLSVNLFKGVIRCSECGHALIITGFSDTRSGIYRCPLRNENRCSAKGLSRKQTDGTLLTLLSRLDRFDSDMTNVIDTLKLHREHISSNIEKLVQLSLEIEDLSAITIKLKQLKGELSQVDADIEKETQRLKSIDVGCLSDCDLTTKAGRIEAQLIIRSAVKEVVLNTAKRRCKVTFHNGRLIDLPITENPSEDVTEAIQSLSEVTERGLIDVDEVII

SEQ ID NO: 6025 - protein, 581 aa, synthetic construct
MARKRTNLIGNTPSVRETKVAIYIRVSTIHQVDKDSIPMQKKDLIAYCQLILGTDNYEIFEDAGYSGKNTDRPAFQNMMGRIRKGEFTHVLVWKIDRVSRNLLDFAEMYEELRSLRVTFVSKNEQFDTSTAIGEAMLKIILVFAELERNMTSERVTATMISRANSGQWNGGRIPFGYSYDPKEKVFSIREDEASICRELKDLYLLNRSLVYVSRALNEKGYKTRAGVSWSPHSVWIIASSPFYAGIYRYNRYKGVESRTINPEEEWVMIQNHHPAIFTLEEHQAMRSIMKSNQRNMDNLPGRVHLSTKTHIFQGIMYCDKCGSKMVSTPGRLHVDGYRTSNYGCPLRRNTKKCNNPTVNDIIIGEFVINYILNMLNAKKTFSTINTPDELNAALLSGSVFSEVSSVEENGLNSFFNLLSRYGSDRSYIFSVKSPRKKKAAVDPELSKLRKEKEKQERALQRLQDLYLYSETSMSEKDFIIRKSEISSHLDNINRQLGLMTQDQASFLSDEEFIKQASHLLIQKELKNKKYIYFKKLVSTVDPDILKAYMETILDSIYTADGKITAITFKNGLTHRFIYKDK

SEQ ID NO: 6026 - protein, 481 aa, synthetic construct
MKTMNKVAIYVRVSTTNQVEEGYSIDEQKDKLSSYCDIKDWNVYKVYTDGGFSGSNTDRPALESLIKDAKKRKFDTVLVYKLDRLSRSQKDTLHLIEDVFIKNGIEFLSLQENFDTSTPFGKAMIGLLSVFAQLEREQIKERMQLGKLGRAKSGKSMMWAKTSYGYDYHKETGTVTINPAQALTIKFIFESYLRGRSITKLRDDLNEKYPKHVPWSYRAVRTILDNPVYCGFNQYKGEIYPGNHEPIISKEEYDKTQSELKIRQRTAAENVNPRPFQAKYILSGIAQCGYCDAPLKIMLGVKRKDGSRLKKYECHQRHPRTLRGVTTYNDNKKCDSGFYYKDKLEASVLKEISKLQDDADYLDKIFSGDNAETIDRESYKKQIEELSKKLSRLNDLYIDDRITLEELQSKSAEFISMRGTLETELENDPALRKNKRKADMRKLLNAEKVFSMDYESQKVLVRRLINKVKVTAEDIVINWKI

SEQ ID NO: 6027 - protein, 568 aa, synthetic construct
MTSPKQPTSTPLAHSYIRFSSIAQEKGDSINRQIASATSWSEKRGIPLSDVVYRDLGISAFKKVDRPGLRQLTESIRAGIIRQGDYILLERLDRLSRKDLDIAQEEVKSMLRLGVNIIAIEDGLELTPDSLNDPSALIRIIILAENAHRQSREKSERIKAAYASARQRARDGKAVKRRLPCWLEVAPDDVYTFHPVYLPIVQRIIELRHAGRGYSSIAKTLNAEGLPGRIGKSGTTSKGWTGGSVREIVTSRALYGFYQPHITVEKERDDGTTKRVLQPDGDPIVDHYPPVIGYREWLAIQPDTTATAKNRIPAGGYNKTDRLSGVARCGVCGGRVALRIYRRPSKKAQGGMKDYRHWVCVAGYSSGTCPVTRAFPDLDLVIIKSIGHLEVDVAPPAPSTCSSSSAVDTIRATLDANRERAEQLKSLLVDPEGGDVGFVYNALSTLQNRIKDLEAELEQLEKVEVSGGNTTQEDIDRLKSLVDDVELFNHELRKIVGAIRVQHFGKKGFKGVIEQVNGKRVGFVSTAPENPKRGHAKERIEFFARGLGIPEPGDVEQLYPWETDEQED

SEQ ID NO: 6028 - protein, 539 aa, synthetic construct
MKRAAIYARYSTDLQNDQSVEDQFRLCKAHAERLGLNVVGEFSDRAKSGASMFGRPGLANLIQAADRAEFDVLVSEAPDRISRDIADLAHIHKTLKFRGIEMNCVNGGAMDTVQIGMYGVIGQMQREEGAKKVRRGMVGVVRSGRNPGGKAYGYRPIFGRKGELEIVEDEAATVRRIYELYAGGMAPRSIAAILNEENVPAPRGERWNASTINGSGQRGNGILRNPIYAGRIVWNRIQMVKDPSTGRRISRVNPESEHEEVAAPHLQIVDSGLFDFVQQRKEATGGADRAKGPRSKRILSGLLRCGACGGGMALVGPDRSGNRIQCSTFRESGTCKNSRRYYVERIETEVVDGLRRQFADTSIIEAYVEAYQVEQKRLRGDAQRARASAQRALQEAKDGITKIVEKISKGLIEDEEAAALLAPLRAERDRQKAILETTEEPPNVIEIQPKAVKRFRENIESLAQIVREKDGEASPEIAAPFRQLVAAVVINPTEKGQPYEINIKGYLSSLIDSELSVIKMVAEDRLNRPPQISFGRFAA

SEQ ID NO: 6029 - protein, 481 aa, synthetic construct
MKTMNKVAIYVRVSTTNQVEEGYSIDEQKDKLSSYCDIKDWNVYKVYTDGGFSGSNTDRPALESLIKDAKKRKFDTVLVYKLDRLSRSQKDTLHLIEDVFIKNGIEFLSLQENFDTSTPFGKAMIGLLSVFAQLEREQIKERMQLGKIGRAKAGKSMMWAKTSYGYDYHRDTGTITINPAQALAIKFIFESYLRGRSITKLRDDLNEKYPKHVPWSYRAVRTILDNPVYCGFNQYKGEIYPGNHEPIISKEEYDKTQSELKIRQRTAAENVNPRPFQAKYILSGIAQCGYCGAPLKIMLGVKRKDGSRLKKYECHQRHPRTLRGVTTYNDNKKCDSGFYYKDKLEAYVLKEISKLQDDADYLDKIFSGDNAETIDRESYKKQIEELSKKLSRLNDLYIDDRITLEELQSKSAEFISMRGTLETELENDPALRKNKRKADMRKLLNAEKVFSMDYENQKVLVRRLINKVKVTAEDIVINWKI

SEQ ID NO: 6030 - protein, 570 aa, synthetic construct
MTSTKTPTKHSTSTPLAHSYIRFSSIAQEKGDSINRQIASATAWSERNGILLSDVVYRDLGISAFKKVDRPGLRQLTESIRAGHIRKGDYILLERLDRLSRKDLDIAQEEIKSILRMGVNIVAIEDNLELTPESVNDAQALIRIIILAENAHRQSREKSERIKAAYASARQKARQGKAVRRRLPCWLEVKEDTYTFHPVYLPIVQRIVELRRQGRGYSSIAKTLNAEGLPGRIGKSGTASKGWTGGSVREIVTSRALYGFYQPHITVEKERDDGTTKRVLQPDGDPIVDHYPPVIGYRKWLAIQPDTTTTTAKNRVPAGGYNKTDRLSGVARCAVCGGRVALRIYRRPSKKAQGGMKDYRHWVCVAGYSSGTCSVTRAFPDLDRMVIKAIGHLEVDVATPDPSTCSTSAVDSIRATIDANKERAEQLKSLLVDPEGGDVGFVYNALSTLQNRIKDLEAELEQLEKVEVSGGNTTQEDIDRLKSLVDDVELFNHELRKIVGAIRVQHFGKKGFSGVIEQVNGRRVGFVSTAPANPRRGHAKERIEFFARGLGIPEPGDVELFPWETEGQDD

SEQ ID NO: 6031 - protein, 581 aa, synthetic construct
MTNNHQTPSPRSTSSTTSTPPQVVSYSRYSTKKQSKGFSLERQDENLKRWSDANGIPISDLSFADLGISAFSGTAVREGLSNMLEAVRHGAVPRGWWIAFERIDRLSRRGITETRRLIDQILQHEVNIVCIGEGIELRSDDDANDELKGSLMVAIHAHLAREQSAKASERIRATAAAKRRRARETGAPIKKRLPYWLELSPDGTKYQFKAGRIETVRYIVKRRLEGRGFHGICAELNAMNTPPLTRMSKQWNDMAVASTVRNVALFGQYQPAITNEVEKVDSDGRRKMVRVAIPDGEPLDNYFPAVVDRATWDAIQSDSRTKMKAGRRGDNPVSGLTFCRHCGGTLPMKPASKTSTNGTRHTYRYWTCRGAVDGKCSHGKGIKDLDLFVIKACRRIVPRTLGQGGGGQDPAAAFEYQSLLEQRGKLIAQIATLDAAMADPELGAASLKHIARQIDVATANLEQVDAEIAAVEARQKADQDTTPEAVERLKQLEGDPVAYNLHLKTLVHRIVAGAVRLDDGSWSDVALLFRFTVELLNGSRIDVTVSRRNRWDKDPVEFYSHSEDATAGGEDDLYPWEQDQD

SEQ ID NO: 6032 - protein, 565 aa, synthetic construct
MTSPKQPTSTPLAHSYIRFSSIAQEKGDSINRQIASATSWSEKRGIPLSDVVYRDLGISAFKKVDRPGLRQLTESIRAGIIRQGDYILLERLDRLSRKDLDIAQEEVKSMLRLGVNIIAIEDGLELTPDSLNDPSALIRIIILAENAHRQSREKSERIKAAYASARQRARDGKAVRRRLPCWLEVKEDVYTFHTVYLPIVQRIIELRHAGRGYSSIAKTLNAEGLPGRMGKSGSGTSKGWTGGSVREIVTSRALYGFYQPHITVEKERDDGTTKRVLQPDGDPIVDHYPPVIGYREWLAIQPDTTATAKNRVPAGGYNKTDRLSGVARCAVCGGRAALRIYRRPSKKEGVKEYRHWVCVAGYASGACSVTRAFPDLDLMIIKAIGHLEVDVATPAPSTCSSSGAVDTIQATIDANRERAEQLKSLLVDPEGGDVGFVYNALSTLQNRIKDLEAELEQLEKVEVSGGNTTQEDIDRLGSLVDDVELFNHELRRIVSAIRVQHFGKKGFSGVIEQVNGRRVGFVSTAPANPRRGHAKERIEFFARGLGIPEPGDVEDLYPWETEDQD

SEQ ID NO: 6033 - protein, 580 aa, synthetic construct
MNQTPSPTRSTSTTSTPPPQVVSYSRYSTKKQSKGFSLERQDENLKRWSDANGIPISDLSFADLGISAFSGTAVREGLANMLEAVRQGAVPRGWWIAFERIDRLSRRGITETRRLIDQILQHGINIVCIGEGIEIRPDDDANDELKGSLMVAIHAHLAREQSAKASERIRATAAAKRRRARETGSPIKKRLPYWLELSPDGTKYQFKAGRIETVRYIVKRRLEGRGFHGICAELNAMKTPPLTRMSKQWNDMAVASTVRNVALFGQYQPAITNEVEKVDSDGRRKLVRVAVPDGEPLDNYFPAVVDRATWDQIQSDSRTKMKAGRRGDNPVSGLTFCRHCGGTLPMKPASKTSTNGTRHTYRYWTCRGAVDGKCDHGKGIKDLDQFVIKACRRIVPRTMGQGDDVGQDPAAAFEYQSLLERRGKVTAQIATLDAAMADPELGAASLKHIARQIDVATANLEQVDVEIATVEARQKAELDTTPEAVERLKQLESDPVAYNLHLKTLVHRIVAGAVRLDDGEWSDVALMFRFTVELLNGQRIDVTVSRRNRWDKNPVEFYSHSEDATAGGEDDLYPWEQDQD

SEQ ID NO: 6034 - protein, 573 aa, synthetic construct
MTSPKPPIKHPNPSTTRQTPLAHSYIRFSSRAQEKGDSIQRQIASATSWSERNGIPLSDVVYRDLGISAFKKVDRPGLRQLTESIRAGIIKKDDYILLERLDRLSRKDLDIAQEEIKSILRMGVNVVAIEDNLELTPESVNDAQALIRIIILAENAHRQSREKSERIKAAYASARQRARDGEAVRRRLPCWLEVAPDGNTYTFHPLYLPIVQRIIELRHAGRGYSSIAKTLNAEGLPGRIGKSGSGTSKGWTGGSVREIVTSRALYGFYQPHITVEKERDDGTIKRVLQPDGDPIVDHYPTVIVYREWLAIQPTVTAKNRVPAGGYNKTDRLSGVARCGVCGGRVALRIYRRPSKKAEGGTKDYRHWVCVAGYSSGACSVTRAFPDLDQMIIKAIGHLEVVATPAPSTCSTSAVDSIRATIDANKERAEQLKSLLVDPEGGDVGFVYNALSTLQARIKELEQELEQLEKVEVSGDGNTTQADIDRLAGYVDDVELFNHELRKIVKAIRVQHFGKKGFRGVIEQVNGRRVGFVSTAPANPRRGHAKERIEFFARGLGIPEPDVELFPWETEQDD

SEQ ID NO: 6035 - protein, 502 aa, synthetic construct
MTLAFSYARFSTKSQAIGTSLERQLNASRLFCSERSLTLSPKGYHDLGVSGFKQVKRPELEQMLHAIQSGDIPSGSYILIEAIDRLSRKGISHTQDVLKQILQYKVKVAFVGEDAKTLNGQVLDEHSLNDLSSVILVALAADLAHKESVRKSKLVKAAKLIIRKKATEGHKVRGHTMFWIDWSDKKQDFVLNDRVKDVQTIIQLRREGQGPRKIAKTMNELGIKGPRGNLWNHMSVTIVLKSPVLYGAYQTHQIIEGQKVPDILLENHYPALLTKEEYIKIQADSSKANKGRPSKANPFSGVLRCECGQAMLFSKRTNLDKNGDPLEYEYHFCIGSTEGRCKNKKRIRDLVPLLASIMDKLVINQTPTKNLNAELIKATEQKIEKLNNMLVELDNPPMSVLKTIQKLEQELDILLNTHIEEPVQADVKTLSSISDAQEYNQHLKRLVKQIVVYQINGPRNLRIKVHKTDGHYQNFLVKDNKILFKSDTKALKELIDEFNKAR

SEQ ID NO: 6036 - protein, 533 aa, synthetic construct
MAQPVAYSYIRFSTKRQAAGDSLRRQTEKARAYARKHGLHLDERLSYQDLGVSAYDRSNAERGELAAFLQAIDEGVVKPGSYLLVEQLDRLSRAKPLVALRQLEGIISAGVVVVTLDDERVYDSETSEDMGTLFLSLATMFRAHNESQTKSIRIHAAWQAKRDRREPVITAECPRWLRPKPDRSGYELILDKAESVRRVFELTIGGYGNVALARRANTEGWAHPGDAEEWNQTIITKLIANRAVIGEYQPHIRKEGRRVPQGEPWQDYYPRVVSDEVFALANAAKAQRARVPGRRDRHYKNIFQGILVCGTCGGSFVRKNKHSNKQPNYSLYMCARRVSGATKCSSVNGKQLEINLLTNIYVEGYSHIRTDEEADALRARITLLNTEQVAMQQRIQRIADAIETTDSPTMYERLTDAEGKLATITEDLRKTEHAMGELRLAERNIGIMMQTTFAEDYNRIQDESEVEFRAQLREKVLSVVNRIVIYPDSYAAVLFYRHTGEPAVQPLTTDFDLSAEPALLSSARAVLSRLESS

SEQ ID NO: 6037 - protein, 506 aa, synthetic construct
MRSVITYLRFSSAIQGAEGADSTRRQNDLFKQWLKKNSDAQVVASFSDEGLSGYKGKHLTGQFGDMLARIESGEFPEGTLLLVEAIDRIGRLEHLETEALMNRIIAHGIEIHTLQDGLIYTRDALSDDLGISIIQRVKSYVAHQESKQKSFRVSQKWKQRAKLALAGEQRLTKMVPGWIDPDTFKCNEHAETVRLIFKLLLDGESLHNIARHLQANNISSFSRRKDANGFSVHSVRTILRSETTRGTLPASQRNDRPAIPNYYEAAIDASTFNKAQEILDKNRKGRTPASDNPLTINIFKGLFRCQCGASVHPTGTKNKYAGVYRCNNNPDGRCDVPPLKRKPFDKWMIDNFLGMIDVGNDGEAEGKIASLQHEVEIVTARIKKATALLLEMDDIDELKIQIKELNQRRTELQTTIDNMRRKASLTDKELPQLKDIDLTTKAGRVECQLILSKHLKGLTLGKDSVTVTLQNDTEIIVPTDPLPLNDGTSIFEIAEKELLEIDAYQL

SEQ ID NO: 6038 - protein, 490 aa, synthetic construct
MKKIAIYIRKSVKGDENSISLEAQTEVIKHYFKSENKFTVYKDDGFSGGNTNRPAFQKLMADAMEGKFDTVACYKLDRIARNTLDFLTTFNTLKEYGINLICVEDKYDPSTPAGRLMMTLLASLAEMERENIKQRVSDSMLNLAKQGRWTGGTAPFGYRVISKDGGKYLELEDSKNIKYIFNEFINGKGIIKLGNEFNCDKKKISRMLHNITYLQSSKDANIYLKQVLGYEVIGQVDGCGYLPYGKYKILNGKKVRNYDGLKVATVSKHEAVIDLDTFIKAQDRLKTFAGKKAPRISTKTFLAQMVQCGICGANMLVTLGQKRKDGTRKLYFSCPNKCGNKFKDVSELENDILTTLKDVNFFDEIRKNTNIMNKDNSKIKKSMLKELEEKKKILDGLMDKLALVDSNLANVIIEKMNSVNVDINDLQNKIDLLEKEEIASSYNKEDFKLKEENRKHFIEDFENMDMEEKQNSIRGVINKVVWDGKNIIIS

SEQ ID NO: 6039 - protein, 566 aa, synthetic construct
MGFKKLVNDIKVEKRRKLIAIYCRVSTEEQSENGYSIDEQERLLEEWCKKMGYVIYKCYSDRGISGKNIKDRPALKELLSDAKEGKFDMVISWKINRVSRKLEDVLKIVNILEKNNITFKSYSEPFETDTPAGRMQFQMMALIGEFERGTIAQNVKMGMIAKAKSGNWCGGRVLGYDLVPNNSPEEEKKGKNKLEINEKEAEIVRFIFNEYSKGKGYKAITNKMNKLGYKTKKGNNFSVGSIRDILTNPVYIGEIRYNVRQNWSEKRRRNINPNPIRVKGKHEAIIDRELWDKVQLILESKKGKPSRIYDGEYPLTGILRCPKCGAGMVISRTTNTLADGTKKRIAYYCCGNWKNKGTSVCNSNTIRVDKANEYVFKKIEELVSNEAMIKAVVKNINKERKDKVKPAKRLLGDIDKELEKLDKRKRKIFEAYEDDILTKEEFQTRKNELNEKIRILEEEKKPLLNTISEEVSEEIPYEFIKDILMNFSKILNSSISREQQKKLLHMIISEITMNESREIDSIKLNINDKLVDYLVKEGGVPIKGIPSSFMLRNIGLNILNLDIILY

SEQ ID NO: 6040 - protein, 488 aa, synthetic construct
MKKIAIYIRKSVKGDENSISLEAQTEVIKHYFKDKNEFVVYKDDGFSGGNTNRPAFQELMADAMEGKFDTVACYKLDRIARNTLDFLTTFNTLKEYGIDLICVEDKYDPSTPAGRLMMTLLASLAEMERENIKQRVSDSMLNLARSGRWTGGNTPFGYKVVTIDGGKYLELEDEENIKYIFNEFINGKSIFKLAREFNFGKKKISRILRNITYLKSSKNANIYLKQVLGYEVVGEPNGYGYLPYGQNKVIGGKIVRNNDKIATVSKHEAVIDLDTFIRTQERLKTFEGKRAPRISNKSFLAQMVKCGCCGANMLIVLGYKRKDGTRKLYFACPNKCGNSFKDIIEVENDVLISLKNVNFFNEINKNKSIVNKDNSKIKKSMIKELEEKKKILDGLMDKLALVDSALANVIIEKMNSVNVDINDLQDKIDLLEKEEIASSYNKEDFKLKEKNRKHFIEDFENMTMEEKQNAIRGVINNIVWDGENIIIS

SEQ ID NO: 6041 - protein, 529 aa, synthetic construct
MTKAAFYGRFSSNNQREESAEAQLRASSDFADRNNYEIVAKYIDRAKSGTSSRKRTEFLRMIKDAEKGLFQVIIVHKLDRFSRDKYDSAFYKRKLKQCGVKLISVTEQLDDSPESVILESVIEGMAEYYSKNLARETMKGLKENAYKCKHTGGMPPLGYDVNSEKKYIINEREAESVRLIFEMYITGYSQSDMVNELNERGFKTKLGTIFKTNSIHSILTNEKYTGVYVYNKSAKKNAFGKRNSHAYKDESEIIRIEGGMPQIISKETFEKAQEVLKARKRAPGANKAKESYLLAGLIRCGCCGKHYQGNRRKAKNKPIYVSYRCSYRRLTSSKVCDNKEIRKEYIEEYVLSELERKIFNDKAIPHLVEGINKNLQMKNKFEEEKKEVIKREIEEIEAQINNIVTAIASGFMQEEFKVKMNELKSRKSELEFKLLELKSDEITQVITESDVRILLNNFSSYVMSRNIPECKKFIQSFVKEVVIYKEHIEVTFNVSFSLLKNNQGVEVVSKIRRYELYERYSDSFYIKVS

SEQ ID NO: 6042 - protein, 490 aa, synthetic construct
MKNIAIYIRKSVKGDDNSISLEAQTEVIKHYFKNENKFTIYKDDGFSGGNTNRPAFQKLMHDATQNKFEAVACYKLDRIARNTLDFLTTFNTLKEYGIDLICVEDKYDPSTPAGRLMMTLLASLAEMERENIKQRVTDSMLNLARSGRWTGGTPPLGYKVITIDGGKYLELEDKNNILYIFDEFINGKGILKLSNEFNCDKKKISRILHNITYLKSSTEANTYLKQTLKYEIVGTPNGCGYLPYGKNKVINGKKVKNVDGLKIASISKHKAIIELETFIKAQEKLKTFEGRKAPRISNKSFLAQMVQCTCGSNMLIVLGHKKKDGTRKLYFSCPNKCGNTFGDVKEIEEDTLLTLKDVNFFEKINQNKPTINNKDNSRIKASLLKELENKKKILDGLVQKLALVDSNLANIVIDKMEALNENIKELQSKIDLLEKEEISLSYNKEDLNLKEKNRKHFIKEFENMDMQEKQTSIRKVINKITWTGENIIIS

SEQ ID NO: 6043 - protein, 446 aa, synthetic construct
MKCAIYIRVSTNKDEQKTSLINQKDLFNRLLKENNWDLFDYYIDIESGTTAKRENLQRMIKDAEESKFDIILVKELSRLARNGSLAYKIRDLAQINNIQIIALDNSINTLNNHTQNFGLFAWLYERESENTSIRLKAAFKSRANKGLFKGTIPPYGYKCKNGHLIIKDDITPSIVKRIFDEYLSGSGFDAIAKGLFEDNIPTPSMVSKKNTQNNIWYGSSVRIILENPNYTGDLVQNRSNSVSAISKKRIKNNPNDYIIVENTHQAIISKEMFKAVQSLINNRRKIRPQQNSHLFSNLLFCADCGHRFHFKKNRRGYVCGFYNKLGNAACSSHIVREEILKKTLLSEFKLISSQLNKENYLKKAQKNLLKLKSTLKKDLNRYDLEISKLERKKNSALDKLIEDLIDKETYNQYISTLNSELYNLRTKKNLLKNNYLNKYHLIILMI

SEQ ID NO: 6044 - protein, 549 aa, synthetic construct
MKNKLKSSLNIESPKIAIYMRVSTSKQADNQSLDTQENTINSYIASRHDWINPICYKYVESHSASLKPKASNNLKESSFDSLKRPKLRELFLDATIGKFDYVLCASHDRLTRNTNEGIILKHLFSRLNITLIYCRPGETISSENEALNKFFENLLVNIAALESNITGGRVALANKHKIQNNFWAGGPPPFGYNLVSQPNNKRNSFLEINFEEARIVKKIFELYNLGCSYNEILTRLNRDFTLPPKRLWTHNTLKEILRNPVYTGFLVWNKRGGARKPNRHSHNDFVKSNLVEKNIIIPENEFLETQKLRNILSKDSKFLSTDFLLRDFLYCNKCNKKLLAKNYGNNKRFYYCHSHNNMEINKKCRSIKASKIESTILSNINDLINSSLQSEVQIEKFYDNYIENFNAELLDNKKSLEITTNQLKSSTDLLELCVNEINISKDNLTVDYENFNSNSTEFSFINALSEFQVITQTEIKSLKARKEYLTYKINSSPKSFDDFKSNLNKSFKLFKYDEEKQKLISSPRSFRLFLFKVVKKIILSDHEITIIFK

SEQ ID NO: 6045 - protein, 537 aa, synthetic construct
MKKAAIYTRKSKFTEKGDSIESQIKLCSKYLDNINIKDYCIYTDEGFSGKNTDRPEFQRMLSDAKAKKFDVIICYKFDRISRNVSDFSNLINKLNELNISFISVVEQFDTNSAIGRAMMYLCTVFSQLERETISQRITDNMYSLATKGYWLGGETPTGFRSEKKFFNSNNKQKMYSSLVPIKEELDLVKLIFNKYLEFNSISKIEKYLLSNNIKTKRNKDWSKASISLILRNPAYVKADEETFKYIESTGSKVYGNPDGKHGLLIYKKNKGRKGAKHDISEWIYAVSEHEGIIDSDIWVAIQKQIKKNAILAPALGTSNIALLTGLIRCAKCNSPMRVAYGKRNPKTNKKNYYYVCTLKTKSGKTRCDSKNLPGLDLDNLILDKLKEMSLDKNTLLKELNKYKDTIESNFHNDVLKNIQNNISKNNSMIDNLLNNVALSTDSEVTTILLEKISKLKDENKLLTQKIDDLKSELEAQETLLNDCNSLITKLKYFSKFIDNSSIEEQKQLVSSVIEKVIANGDTGSIEIKFRPLLDFKI

SEQ ID NO: 6046 - protein, 502 aa, synthetic construct
MNKKICIYLRKSRADEELEKTLGEGETLSRHRNALLKFAKENKLNVTDIKEEIVSGDSLFFRPKMLELLKEIENNMYYGVLVMDIDRLGRGGMKDQGIILDAFKISKTKIITPIKTYDLDNEMDEELTEFKTFFSRRELKTINRRMQGGRVRSVEEGNYIATNPPFGYDIDFIKKNRTLKINEDEAPAINLIFKLYIEGNGASFIANELNNLGYKTKLGNNFSPSSVLTIIKNPIYIGKIPWKRKDIKKSKIPGKVKDTRTRDKAEWIIANGKHPAIITNEIWESSQTILKGRYHIPYQLSNAPVNPFAGLITCGICGKKMVMRKARGINRLMCIYKCGNKSTRFDSVEYDCLEALKDYLSNYSAEIKNSIQKEDIDMYSIQITNLKKELTTLNNQRLKLFDLLERNLYDEDTFLERSKNVNDRIENITHTLKSLEKKVKKNSYTSYEDDIKHFENVLDAYNLTKDISKKNNLLKSILYKIEYTKTEKGKDYEIKLFPKLRK

SEQ ID NO: 6047 - protein, 549 aa, synthetic construct
MKNKLKSSLNIESPKIAIYMRVSTSKQTDNQSLDTQEKTINSYIASRHDWINPICYKYIESHSASIKPKVSNTLKESSFDSLKRPKLRELFLDATIGKFDYVLCASHDRLTRNTNEGIILKHLFSRLNITLIYCRPGETISSENEALNKFFENLLVNIAALESNITGGRVTLANKHKIQNNFWAGGPPPFGYNLVSQPSNKRNSFLEINFEEARIVKKIFELYNLGCSYTEILTRLNRDFTLPPKRLWTHNTLKEILRNPVYTGFLVWNKRGGARKPNRHSPNDFVKSNLVEKNIIIPENEFLETQKLRNILSRDSKFLSTDFLLRDFLYCNKCNKKLLAKNYGNNKRFYYCSSHNNMEINKRCRSIKASKIESIILSNINDLINSSLQSEIQIEKFYDKYIENFNAELLDNKKSLEITINQLKSSTDLLELCVNEINISKDNLTVDYEDLSSSSTEFSFINALLEFQVVTQTEIKSLKSRKEYLTYKINSSPKSFDDFKSNLNKSFKLFKYDEEKQKLVSSPRSFRLFLFKVVKKIILSDHEITIIFK

SEQ ID NO: 6048 - protein, 502 aa, synthetic construct
MNNKICIYLRKSRADEELEKTLGEGETLSKHRNALLKFAKEKKLNIVEIKEEIVSGESLFFRPKMLELLKEVEAKKYDGVLVMDMQRLGRGDMKDQGIILETFKNSNTKIITPQKTYDLNNDFDEEYTEFEAFMSRKELKMINRRMQGGRVRSVEEGNYIATNPPYGYDIGFINKSRVLKVNEYESNAIKLIFKLYLDGNGASFIANELNNLGYKTKLGNNFSNSSVLTIIKNPVYIGKIAWKRKDIKKSKTPGKVKDTKTRDKSEWIIADGKHEAIIDINTWDKTQEILKGKYHIPYQLTNSPANPFAGLITCGVCGKKMVMRKARGINRLMCIYKCGNKSTRFDLVESDCFEALKEHLKNYTAEVENELIEENTNIYTSQISQLKKELTTLNNQRLKLFDLLERNLYDEDTFLERSKNINDRIETVSSTLKSIEKLLKKKSKSSYQEDIQFFQSVLDAYNETEDIAKKNSLLKSILYKIEYTKLNGSKEHVIKVFPKLRK

SEQ ID NO: 6049 - protein, 520 aa, synthetic construct
MKNVTKIDQVDFSIFKKLRVAAYCRVSTDSNEQELSLDTQKNHYESYIKANSEWEYAGIYYDDGISGTKTAKRDGLLRLVEDCEKGLIDLVITKSISRFSRNTTDCLALVRKLLNYDVYIIFEKENIHTGSMESELMLAILAGMAESESRSISENEKWSIKKRFQNGTYVISYPPYGYANVDGEMVIVPEQAEVVKEIFAGCLAGKSTHIIAKELNEKGVPTKKGGKWTGGTINGILTNEKYIGDALFQKTITDAAFKRKRNYGEEEQYYCEEHHEAIIDRDTFEKAKEAIRQRGLEKGNCSEDTSKYQNRYVMSGKIKCGECGRSFKRRYHYTSHGRSYNAWCCGGHLEDSKSCSMKYIRDDDIKRVFLTMMNKLHFGNDLVLKPLLIAITTDNSKKNIHSVEEIEKEIAANEEQRKQLNTLLTRGYLERPVFAEAHNKLITEYEHLIARRDMLYRMDDAGYTMEQKLKELVDFLNGAEPFIEWDDSLFERFVEKVKVLSRDEVEFELKFGLRLKERID

SEQ ID NO: 6050 - protein, 502 aa, synthetic construct
MELQNRIQRVAIYLRKSRNKEGEETEETLRKHRKRLIDIANKNKWDYELFQEVGNSMNENRPEYQKLLSKLSEGIFDAVLSVNLARVTRDDAETPKFMSLLRQEDILFITDSERIYDLEVQEDWQALKFTGFVNNWEYENIKAQLRKGKKDSAKMGRWSNGVPNYGLVYNRFDRSLEIDQQKADAVKLAFQLVIDGLGVDRVAKELNRLGYKTNRGRYFSGNAINRMIRAEIYKSVLISNRLKGRNLHEGKLRPKDQWIIAENAAPPIIDEETWKMANEALDQRKLLSPRGKQKKHPLSNLIKCGFCGRTQTVSRRRDRNDALAIQPCNKTDPLGKSKCNNRGIKHDTMISLVIEAINEKYQEISSELIKFEEDTEANDIKSIKINKLQEQINKSKKALNILQIQLEEELINISSFKERRKIRQVELNNLEKELTELLEETKEDALKSKKSFANKLDFFLENWHTIDGADLNHELMSFINKIIWYAPRDSELPPQLKFEWRV

SEQ ID NO: 6051 - protein, 507 aa, synthetic construct
MKRVISYIRFSSEKQAKGDSLRRQSKMVTDWLKAHPEYYLDQDLSFRDLGVSGFTGKHLKGGLGDFLTAIEKGLVKAGDTLLIESLDRLSRQDVDQASELLRNILRSGVDVVTLSDGEHYTSESLKDPLALIKSILIMQRAHEESLRKSERIQAAWNRKKELISEGIKISKRCPAWLRLNDDRKSFSVIPDKVETVKRCFQLRLEGKSIWEIVRTLNDEGHQTLNQYKAGSFGQTSVQDLLKNRSVIGYFTPKGCEEIAGYFPPIIPETDFYKVQQLSYARYGRKPASDKPLSVNLFKGVIRCSECGHALIITGFSDTRSGIYRCPLRNENRCSAKGLSRKQTDGTLLTLLSRLDRFDSDTTNTIDTLKLHREHISSNIEKLVQLSLEIEDLSAITIKLKQLKGELSQVDADIEKETQRLKSIDVGCLSDCDLTTKAGRIEAQLIIKSAVKEVVLNTAKRRCKVTFHNGKVIDLPITENPSEDVTEAIQSLSEVIERGLIDVDEVIV

SEQ ID NO: 6052 - protein, 547 aa, synthetic construct
MKLLVTYIRWSTKEQDSGDSLRRQTNLIDAFYAKHKDDYYLLPAHRYVDKGKSGFHQQHKNQGSDFRRMFENVMSGVIPEGSLIVVENFDRFSRADIDTAIDDVRQILRKGVSILTLGDGELYDKSALTDPVKLIKHIIIAERAHQESLVKQKRIAQVWNHKTQLARELKKPMGKQAPGWLELSEDGSHYIVDEDKASLVNIIYDKRLSGMSMFAICKWLNEQGYPTINQRKVRISKTKKPDGNWSALSVKHILTSRSVLGYLPAKISTEDRKTVLREEIEGFYPQIVTDSKFYAVQQLLEETGKGKTSSGEHWLYVNILKGLIRCKCGLVMTPTGIRKPVYQGTYRCNGNKESRCSYGTVSRKLLDTQLCSRLFSKLSQLHDEATDTAKLDELQRRLNTVDGELEKLTETLIQLPNITQIQEALRVKQEEKDELIVQLSREKARVKSVSSLDLSGLDMESVEGRTEAQIIIKRLVKEIVVSGNEKLVDIYLHNGNMIRGFPLDGKDDHTLTLEEATDEMQSLDDMLIFGEPVTRIYPAGDMEEVDA

SEQ ID NO: 6053 - protein, 506 aa, synthetic construct
MRSVITYLRFSSAIQGAEGADSTRRQNDLFKQWLKKNSDAQVVASFSDEGLSGYKGKHLTGQFGDMLARIESGEFPEGTILLVESIDRIGRLEHLETEALMNRILGNGLEIHTLQDGLIYTKDALADDLGISIIQRVKAYIAHQESKQKSFRVSEKWKQRAKLALAGEQRLTKMVPGWIDPDTLKLNEHAETVRLIFKLLLSGESLHNIARHLQSNGIKSFSRRKDANGFSVHSVRTILRSETTIGTLPASQRNDRPAIPNYYEAAIDAATFNKAQEILDKNRKGRTPASDNPLTINIFKGLFRCQCGASVHPTGTKNKYAGVYRCNNHLDGRCDVPPLKRKPFDKWMLENFLGMIDVGNDGEAEGKIASLQHEVEIVTARIKKATALLLEMDDIDELKIQLKELNQKRTELQTMIDNMRRKASLTDKELPQLKDIDLTTKAGRVECQLILSKHLKGLTLGKDSVIVTLQNDTEITIPTNPLPLNDGTSIFEIAEKELLEIDAYQL

SEQ ID NO: 6054 - protein, 559 aa, synthetic construct
MKTKLYSYIRFSSMRQNDGSSYERQIRMAREIAVKYDLELVNDYQDLGVSAFKGANSKTGALSRFLDAIGRSVPVGSWLFIENLDRLSRADIVSAQELFLSIIRRGITIVTGMDNKIYSLDTVTANPMDLMFSILLFIRGNEESQTKRNRTNSSALIKIKAHQENPQNPAVAIEEIGKNMWWTDTTSGYVLPHPVFFPIVQEVVELRRNGRSTAEILDHLNAIYTPPPAASHKRHSNWSRAMIERLFHTRALIGIKEISVDGVKYELKDYYPRVLDDAEFYHLKKSIGVRACNFGDKEEAKPIPLLSGVGLLKCEHCGSAMVKVKGTNRRPNQYRYSCDAMRSSRIECVHTNWSFRGDQLEKAVLQLLADKIWIAEDKANPVPALKVQIDEISRKIDNLITLSAMTGATKELADQITTLNSERETLYNQIKMAEEEMYSVDSQGWEKLAEFDLEDVYNEDRIKVRFKIKQALKRIGCSRIDKYKNLFVLEYIDGKTQRVVIENSRGPRKGRIFVDLKTINDRQILESNGLVLHPCLDMLTDKNWKPEEEIPGPLQEFGI

SEQ ID NO: 6055 - protein, 518 aa, synthetic construct
MPKAISYIRFSTKIQSVGDSTKRQSKYINDWLKRNPDYYLDESLRFQDLGISGFSGANAKSGAFGEFLAAVESGYIEAGSVLLVESLDRVSRQDIDTAGEQLRKILRSGVEVVTLVDNEWYTKESLKDSLSMIKAMLVMERAHEESAMKSTRLRSVWAAKRERAAKGEIMSKRCAAWLKVSEDRSHFEFIPENVKAVQRVFQLRLEGLSHVKIAKQMNDEGFSTLNQFKSVTGGWSQSSVTELLSNRSVIGFKVPSKSMAVKGVSEIPNYYPSIITDEQFYAVQQLKQGSGRKPSSDLPLLTNLFKGVLRCSECGFIVVVAGVSAKRSGIYKCSMKSEGRCNSVGFSRLQTDRALVQGLLYNTNRLSLNRDNGSAIGSLQSELEQLQKQRERLIKLAMLADDTESMAKDLKALNSQIKDAEKAVSEVHQREQSSQLETISHLDLTVKKHRIEAQIIIKRIVKEIRINTAQKKCDVFLHNGLKLYNFPLDRVVDGEIFLEVLPVLDCDEFDFDTYRMIE

SEQ ID NO: 6056 - protein, 507 aa, synthetic construct
MKRVISYIRFSSEKQAKGDSLRRQSKMVTDWLKAHPEYYLDQDLSFRDLGVSGFTGKHLKGGLGDFLTAIEKGLVKAGDTLLIESLDRLSRQAVDRASELLRNILRSGVDVVTLSDGEHYTSESLKDPLALIKSILIMQRAHEESLRKSERIQAAWDAKKEAAKAGIKVSKRCPAWLKLNDDRKSFSVIPEKVETVKRCFQLRLEGKSIWEIVRTLNDEGHQTLNQYKAGKFGQTSVQDLLKNRSVIGYFTPKGCEGISGYYPAIIDETTFYKVQQLSHYRYGRKPVSDKPLSVNLFKGVIRCSECGHALIITGFSDTRNGIYRCPLRNENRCSAKGLSRKQTDGTLLTLLSRLDRFDSDTTNTIDTLKLHREHISSNIEKLVQLSLEIEDLSAITIKLRQLKGELSQVDADIEKETQRLKSIDVGCLSDCDLTTKAGRIEAQLIIKSAVKEVVLNTAKRRCKVTFHNGKLIDLPITETPSKDVTEAIQSLSEVTERGLIDVDEVII

SEQ ID NO: 6057 - protein, 507 aa, synthetic construct
MKRVISYIRFSSERQAKGDSLRRQSKMVNDWLKAHPEYYLDQDLSFRDLGVSGFTGKHLKGGLGDFLTAIEKGLVKAGDTLLIESLDRLSRQAVDRASELLRNILRSGVDVVTLSDGEHYTSESLKDPLALIKSILIMQRAHEESLRKSERIQAAWDAKKEAAKAGIKVSKRCPAWLKLNDDRKSFSVIPDKVETVKRCFQLRLEGKSIWEIVRTLNAEGRQTLNQHKAGSFGQTSVQDLLKNRSVIGYFTPKGCEEISGYYPAIIDETTFYKVQQLSYARHGRKPASAKPLSVNLFKGVIRCSECGHALIITGFSDTRNGIYRCPLRNENRCSAKGLSRKQTDGTLLTLLSRLDRFDSDTTNTIDTLKLHREHISSNIEKLVQLSLEIEDLSAITIKLKQLKGELSQVDADIEKETQRLKSIDVGCLSDCDLTTKAGRIEAQLIIKSAVKEVVLNTAKRRCKVTFHNGKSITLPITENPSEDVTEATQSLSEVTERGLIDVDEVII

SEQ ID NO: 6058 - protein, 532 aa, synthetic construct
MNFTNQIQEAAVYCRVSTDDQAERGTIESQIEYANKYCDLNGIRIVKIYKDDGITGTLPIEERPAGTELLSDAKEGLFSTLLVFKLDRLGRVTRIIINAIYELEQYGVKLKSMTEPFDTSDPSGRFLLTILAGVADLERSNILQRMQLGTNRAAAAGKWLGGIVPYGYIVNGDRFLEVNETEIPGTGMSEADVIRLIFHLIAEEKMSSIAVAHRLNSLGIPPSYVLRGIKGKRHNHTRGIWFTGRVLCIAKNTTYYGVHRYGKRSPHGRELIEREVPAIVSKEIWDEAQEVMHNNQLTAMRNAKTKYLLRGLIKCAACGSTYVGVNDKGTRYYTCNGKRMYKKLGREKCTALAVNMDWVESEVWEDCMQYINNPNMVVEAIAANRGKATESAKQIHLLEMQLAECENERERVMDVYRAKLITFEEVEKQLRKVADKKSTVQFELSALKSRGEASATFDQQETTLEILNEIKKKLTDSSTVSLDLKFEIFHTLIKKITAISTEDGLTLKVHYVFGESPVSVNRTVKDSLPLPK

SEQ ID NO: 6059 - protein, 547 aa, synthetic construct
MKLLVTYIRWSTKEQDSGDSLRRQTNLIDAFYSKHKDDYYLLPAHRYVDKGKSGFHQQHKNQGSDFRRMFENVMSEAIPEGSLIVVENFDRFSRADIDTAIDDVRQILRKGVSILTLGDGELYDKSALTDPVKLIKHIIIAERAHQESLVKQKRIAQVWNHKTQLARELKKPMGKQAPGWLELSEDGSHYIVDEDKASLVNIIYDKRLSGMSMFAICKWLNEQGYPTINQRKVRISKTKKPDGNWSALSVKHILTSRSVLGYLPAKISTEDRKTVLREEIESFYPQIVTDSKFYAVQQLLEETGKGKTSSGEHWLYVNILKGLIRCKCGLVMTPTGIRKPVYQGTYRCNGNKESRCNYGTVSRKLLDTQLCSRLFSKLSQLHDEATDTAKLDELQRRLNTVDSELEKLTETLIQLPNITQIQEALRVKQEEKDELIVQLSREKARVKSVSSLDLSGLDMESVEGRTEAQIIIKRLVKEIVVSGNEKLVDIYLHNGNMIRGFPLDGKDDHTLTLEEATDEMQSLDDMLIFGEPVTRIYPAGDMEEVDA

SEQ ID NO: 6060 - protein, 506 aa, synthetic construct
MRSVITYLRYSSAIQGAEGADSTRRQNDLFKQWLKKNSDAQVVASFSDEGLSGYKGKHLTGQFGDMLARIESGEFPEGTILLVESIDRIGRLEHLETEALMNRILGNGLEIHTLQDGLIYTKDALADDLGISIIQRVKAYIAHQESKQKSFRVSQKWEQRAKLALAGEQRLTKMVPGWIDPDTFKLNEHAETVRLIFKLLLSGESLHNIARHLQSNGIKSFSRRKDANGFSVHSVRTILRSETTIGTLPASQRNDRPAIPNYYEAAIDASTFNKAQEILDKNRKGRTPASDNPLTINIFKGLFRCQCGASVHPTGTKNKYAGVYRCNNHLDGRCDVQPLKRKPFDRWMIDNFLGMIDVGNDGEAEGKIASLQHEVEIVTARIKKATALLLEMDDIDELKIQLKELNQKRTELQTMIDNMRRKASLTDKELPQLKDIDLMTKAGRVECQLILSKHLKGLTLGKDSVTVTLQNDTEIIVPTDPLPLNDGTSIFEIAEKELLEIDAYQL

SEQ ID NO: 6061 - protein, 506 aa, synthetic construct
MRTVITYLRFSSAIQGAEGADSTRRQNDLFKQWLKKNSDAQVVASFSDEGLSGYKGKHLTGQFGDMLARIEAGEFPASTILLVESIDRIGRLEHLETEALMNRILGNGIEIHTLQDGLIYTKDALADDLGISIIQRVKAYIAHQESKQKSFRVSQKWEQRAKLALAGEQRLTKMVPGWIDPDTFKCNEHAETVRLIFKLLLDGESLHNIARHLQANNISSFSRRKDANGFSVHSVRTILRSETTIGTLPASQRNDRPAIPNYYEASIDVSTFNKAQEILDKNRKGRTPASDNPLTINIFKGLFRCQCGASVHPTGTKNKYAGVYRCNNHLDGRCDVPPLKRKPFDKWMIDNFLGMIDVGNDGEAEGKIASLQHEVEIVTTRIKKATALLLEMDDITELKTQVKELNQKRTELQTMIDNMRRKASLTDKELPQLKDIDLMTKAGRVECQLILSKHLKGLTLGKDSVTVTLQNDTEITIPTNPLPLNDGTSIFEIADKELLDIDAFRL

SEQ ID NO: 6062 - protein, 547 aa, synthetic construct
MKLLVTYIRWSTKEQDSGDSLRRQTNLIDAFYAKHKEEYYLLPAHRYVDKGKSGFHQQHKAQGSDFRRMFENVMSGVIPEGSLIVVENFDRFSRADIDTAIDDVRQILRKGVSILTLGDGELYDKSALTDPVKLIKHIIIAERAHQESLVKQKRIAQVWNHKTQLARELKKPMGKQAPGWLELSEDGSHYIVDEDKASLVNIIYDKRLSGMSMFAICKWLNEQGYPTINQRKVRISKTKKPDGNWSALSVKHILTSRSVLGYLPAKISTEDRKTVLREEIESFYPQIVTDSKFYAVQQLLEETGKGKTSSGEHWLYVNILKGLIRCKCGLVMTPTGIRKPVYQGTYRCNGNKESRCSYGTVSRKLLDTQLCSRLFSKLSQLHDEATDTAKLDELQRRLNTVDSELEKLTETLIQLPNITQIQEALRVKQEEKDELIVQLSREKARVKSVSSLDLSGLDMESVEGRTEAQIIIKRLVKEIVVSGNEKLVDIYLHNGNMIRGFPLDGKDDHTLTLEEATDEMQSLDDMLIFGEPVTRIYPAGDMEEVDA

SEQ ID NO: 6063 - protein, 368 aa, synthetic construct
MKRVISYIRFSSEKQAKGDSLRRQSKMVTDWLKAHPEYYLDQDLSFRDLGVSGFTGKHLKGGLGDFLTAIEKGLVKAGDTLLIESLDRLSRQAVDRASELLRNILRSGVDVVTLSDGEHYTKESLRDPLSLIKSILIMQRAHEESLRKAERIQAAWDAKKEAAKAGIKVSKRCPAWLKLNDDRKSFSVIPEKVETVKRCFQLRLEGKSIWEIVRTLNAEGHRSMNQYKPGKFGQTSVQDLLKNRSVIGYFTPKGCEEIAGYYPSVIDETTFYKVQQLSHSRYGRKPASDKPLSVNLFKGVIRCSECGHALIITGFSNTRNGIYRCPLRNENRCSAKGLSRKQTDGTLLTLLSRLDRFDSDAYYREGDR

SEQ ID NO: 6064 - protein, 557 aa, synthetic construct
MKRKKAYIYTRVSTNMQVEGFSLDAQETRIHQYANAFDIEIVKTYQDAGKSGKTMLGRTEFMAMISDIEAEKDKVDYVLVFKLSRFGRNVADTLKSLAIMESHGVNLICVDDGLDSSKDSGKLVITILSAVAEMERENIISQAMEGRRQKARAGQWNGGFAPVGYSLVNGQLQVNHEEAESVKMIFDLFANSDMGTIAIAKHLANLDIKKPIRHNSTLPYFSSSGIARILDNPVYNGKIAFGRRESTRDKISGETKVTQSENYILTDGIHEAIIDDETWKKVRKKREANAHKYKRENPNKGDSIYILSGLIKCPLCNAGLYGNKSIKRNKNKKDEYYKNYYYYACKHRKHVDGHKCTFNKQLKTGNLDHEVLSIISKLVSRPDFARKLQEKINIQVDTSRIDSEIEQYKSLFRQLSATKMNLIQQIDSLNFEDPHFQQKSIDLDMRLNTIYDKLADVEMLIETSESKREVILKDKMTADNIYKILVNFASFMDVMEDIDKKRLCQMLIEKVEIYDDKNKAGRWVKAIHFKLPIIEEDLEISLDNSTPVEAVVKLSKK

SEQ ID NO: 6065 - protein, 618 aa, synthetic construct
MAGIRTENKIYEVGMYCRLSKDDGTDNESASIATQKSILTDYVKKQGWHLAKTYVDDGYSGTNFQRPSFQNMIKDIESGLINCVITKDLSRLGRNYLDCGLYLEVFFPEHNVRYIAVNDGVDTLNKSAMDITPFRNILNEMYAADISVKIKSAYWARFQQGKFMGTTAPYGYIKDPADHNHLLIDDKVAHVVKEIFDLALKGNGVAKICRHLNKQHILRPAAYAAERGETGFERHFEGNEDKRYIWSGNSVRSILRSPIYAGNLVGYKRIAANMKSKKRPSKLPEEWEVIPNTHEGIVTQEEFDIVQQLITSRRLPQNKGGFVNIFAGVIKCVDCGCALRAMNVHRRKRPEIIDCVQYSCNNYARNGRSECSAHNIEARDLFNAVLADINCFADMAVNDEKAVRAIEKRLTETDQSRAKALEKERKKLNKRLAELDRLFSSLYEDKVMERITERNFEMMSGKYQKEQLEIEARLKEVTETLNESYEKSRGIRDFLALIRNYQGLKELDATVINALIDKILVSEREKMADGTVKQEIKIYYKFIGFVDELHIIPTKRWAAMPAKNCTVCGVEYVPGSGASRYCPACAKKIRREKSNESKRRSREQKRIACMNCPQKMTD

SEQ ID NO: 6066 - protein, 569 aa, synthetic construct
MTDIKDVFKHHKSRVDKIDTIEEKTKKDTYGVLIRVSDVKQVTKDSIPMQRERAYKFIKERDGILYKEYIEEAVSASKNSIKQRPVLQELLKDIEDGKINKVIAYKRDRLSRIQKDWLTILDTIFKNNCDIEFTSAEEQPISSNPMVRGIMEPVLGFLANMESNNTSMRVKETRASIAAKGRWTGGTLPYGYDLNKNKEIVVIKEVIPSLIEIEDLYLNGIGVGSITRYMNGHEVKHLGKRKKGADIKRVVYKGRKTYWTESAVEGVLFNPFYAGIIEYSKEGNKHLQYDQDKFVREKGFHEAIRTLDKQEKIYEMKSKKSISAPRKFSTTFLLTGLVYCSECGSPIQSRTVLKKERNNEKYCYYVCASKQNKDKTSRNEICPSKNFKQNILEDFVVSKLLEMFDGFNKDNLKEEILKGIDQGKSTIETDIVSAQAELKELQNELVSIMNLMKRVSPESPLYEEIITDYEKSYTETLLKKKEIEEKLESLQQSIKENNDKEIEQNIVLDALKNFSIVFKEASQVQRKTLLDSIIKRIDISQDGKLNILCNFEIPKDEKSYVHSINRRPV

SEQ ID NO: 6067 - protein, 510 aa, synthetic construct
MALHENSRIAVYSRKSREDRDSEDTLAKHRNELEYLIKRENFKNVQWFEEVVSGETIDERPMFSLLLPRIENGEFDAVCAVAMDRLSRGSQIDSGRILEAFKQSGTLFITPKKTYDLSIEGDEMLSEFESIIARSEYRAIKRRTINGKKNATREGRLHSGSVPYGYKWDKNLKAAVVVEEKKKIYRMMIKWFLEEEHSCTVIAEMLNELKVPSPSGRSIWYGEVVSEILSNDFHRGYVWFGKYKKSKSNNSIVQNKNLDEVLIAKGHHETMKTDEEHALILNRIEKLRTYKVAGRRLNMNTHRLSGIVRCPYCHKAQAIEQPKGRRKHVRKCLRKSAERTKECEETKGIHEEVLFQSIMKEIKKYNESLFSPTEQDVNDDSYTAQLIGLREKAVKKAKGRIERIKEMYLDGDISKTEYKEKLKISQETLQKAENDLAELIASTEFQNALSAETKKEKWSHHKVQEMIESTDGMSNSEINLILKMLISHVTYTVEDLGDGTKNLNIKVYYN

SEQ ID NO: 6068 - protein, 510 aa, synthetic construct
MALHENSRIAVYSRKSREDRDSEDTLAKHRNELEYLIKRENFKNVQWFEEVVSGETIDERPMFSVLLPRIENGEFDAVCAVAMDRLSRGSQIDSGRILEAFKQSGTLFITPKKTYDLSIEGDEMLSEFESIIARSEYRAIKRRTINGKKNATREGRLHSGSVPYGYKWDKNIKAAVVVEEKKKIYRMMIKWFLEEEHSCTVIAEMLNELKVPSPSGRSIWYGEVVSEILSNDFHRGYVWFGKYKKSKSSNSIIQNKNLDEVLIAKGHHETMKTDEEHALILNRIEKLRTYKVAGRRLNMNTHRLSGIVRCPYCHKAQAIEQPKGRRKHVRKCLRKSAARTKECEQTKGIHEEVLFQSIMREIKKYNEALFSPTEQDVNDDSYTTQLIGLREKAVKKAKGRIERIKEMYLDGDISKTEYKEKLKISQETLQKAENDLAELIASTEFQNALSAETKKEKWSHHKVQEMIESTDGMSNSEINLILKMLISHVTYTVEDLGDGTKNLNIKVYYN

SEQ ID NO: 6069 - protein, 476 aa, synthetic construct
MDRNKVAIYVRVSTQGQVDDGYSLDEQVDLLTNYCKLKEWTLYDVYVDPGISGKNMHRPEIERLTRDAKRKLFDIVLIYDLKRLGRSQKENIVLVEDVFNPNGIRLVSFTENFDASTPVGKMVFGMLSAYAELDRANIAERMMMGKIGRAKAGKAMSWGMPPFAYDYNKETGDLELDEVKAPIVEMIYSEFLKGASVNKIVQKLNSMSYHGKNHEWKHHAVTVIIDNPVYCGMMKYMGQTYQAKHTPIIDKKTFELAQLERKKRLSKYHDADWLGPFQRKYIGSKICYCGLCGAHLKSEKDKKNKLTGIRSISFFCPNTRSRGTGECTNPRFKQSVLEGYILNEVAKLQQNPEKLKDIKPAEDNELHNKIATYEKKIKQNSSKLSKLNDLYLNDLISLDDLKQQSKSLLNENEFMEEQIKLLSATTREDELRKKIDTFLAFPDILTADYDTQKQAVELVISRVEATKEGIDIFFNF

SEQ ID NO: 6070 - protein, 529 aa, synthetic construct
MRKVYSYMRFSRPEQAKGTSIERQSNFAEQYALEHGLELDKSLTMMDKGLSAFHGVHKTKGAFGQFLAAVTAGKVPSGSVLVVESLDRLSREDPLIAQAALTDLILSGITVVTAADNQVYSREEIQQNPFKLIMSLVVMIRANEESETKQRRSNAFLKSALNQYQANGKIRRLGSDPSWLDFNKDNDTYSFNERVEVIRRILNLYNQGIGSLKIARQLTEESIPTLSGKRSAWGQTTVANIVKSHALYGMKRINVQGVEYDLEDFYPALITKSKWLTLQQHRTKRSKSMHGRGEVVHLITGHGKGFTTCGYCGGGLGAQTQKQYKRSGEYSRTVTRLHCLTHKETSSCCSSVFLEPIESAVLFAACIGVEPQSLVPTVNNVNYSALIDEVENKVKHIVEQVTAGAPWELFKDAHDKLKLEKQKLIKERDSQKPDVNQSDVQKWVNKLVELADKARVNDKEARLKCRTLINSICKSIVIKLRGHDLKSEPVVTITFVTDEQFEFKVGKNGAVQFVDNGMAVNRRLKPLLA

SEQ ID NO: 6071 - protein, 551 aa, synthetic construct
MTRVSLYARYSSDNQSVSSIEDQFRICRDQAAREKWKVVGVYKDAAISGASVTLRPGIQALLQDAQAGKFEIVLAEALDRISRDQADVAILYKHFKFAGVTLVTLAEGEISELHVGLKGTMNALFLKDLAAKTHRGLRGRVEKGKAGGGLCYGYDVVKRLNGDGEQVRGERKINEAEAEIVRRIFREFAAGKSPKAIAADLNRDGIPGPNGKAWGDTTIRGHVCRGTGIVNNELYAGVLVWNRLRYIKNPATGKRVSRVNPEAEWIRTEVQELRIVDEDLWQAARRRQEEISRQFENVTKGVRAYRAKHVNELRRPAFLFSGLLKCGCCGGNYGIITRDRYGCLNRYRRGTCDNGHTIRRDDIEQRILSGLTERLVSAERVAKAVRAYAEALNSQNRERRAQVELDRKALEKIERGIAGIMAAIEDGMYQPAMKDRMEELERQKADVLARMEQAPEDVPDIHPNIAEIYKAKVTQLSEALADPELRDQAAEAFRALVDEVVLEPGDKRGEVNATLRGEAMNILDIVSGRKSRNRPQVITKDVAGPRNQTSH

SEQ ID NO: 6072 - protein, 533 aa, synthetic construct
MLKQQANNKEKVALYSRLSRDDGLDKESNSIANQREMLKRYAKENKFYVYDEYIDDGFSGTTFNRPALNRMFEDIEAGKVNVVLVKDMSRLGRNNALFMYYVEEVFPDLDVRFIAINDMVDTAQDDNEIMPFKSVLNEYYARDISKKIRSSIRTTALTGGFTGVFAPYGYLVDPENKKKLIVDPETAPIVKRIFELSQQGTSTHQIARILCKDGILVPRAYRAKKKGILEQSKGFTFPTDWVGKNVKMILENQVYLGHMVSHKSQTKSFKNKKIVPVPKEDWIVVENTHEAIIDKETFEIVQKFISVKKQPNKTGKPNIFVGLVKCPDCGRNLAYSNPNGNEPRFRCRTYARNTELCTTHAISYKALYEIVQNDIKNHVNSMEELGDHFIKEMRELSETSGSQKIHQFNQELVSLEKRIDEIDSIFTKLIEQNALGKITDERFSKMSMNYETEQAEVVQSYRELKSKIKSEEEKVQGTDRFLETISKYKDVTELNRSMLCELIDSIYVYQAEGIGKERTQKVEINYRFLAVSH

SEQ ID NO: 6073 - protein, 585 aa, synthetic construct
MEIELIKANDFSNESVRKRIERLRVAAYCRVSTDDEDQIKSYNSMVTYYTDLIQNNKEWVFVGVYADKAITGTKVDKRDEFQRLIQDCMDGKIDLIIAKSIPRFARNTLDTLKYVRMLKERNIAVYFEVEKINTLKDGEFLMTILSSVAQQEVENTSAYVKKGLKMKMKRGELVGFQGCMGYDYDVATKSISINEEGAKVVRYIFERYVAGAGSTMIARELNEQGIMTIKGNPWVSSSVMGIINNEKYKGDILLGKTFTVDPISKRRLENFGEEDRYYIHDHHEPIISEEMFARAQEIRNRRNGNRKHGVTPGKREKFSRQYAFSCMLECGYCGGNLSRRRWHSNSKYKKTIWQCAKATKDGKRFCPDSKGIPEQVIEEAFVESYRMLCRDNKDVLEEFLKRTEKALGENSAEDQLNKLQKRIDNLSYKRKKLLDNYLNGVVQQDIYEETDVSLKRDLSNEKAKLEYLQQQLDEESSLQRRIADFKKALSQNEVLEEFDRGIFESIIEKVIVGGYDENGEKDPYKITFIYKTGFKNEIGNAKERFGKSDDIGDKVKKLCSDISDKVKGVCSDVSDNTYRISRFIR

SEQ ID NO: 6074 - protein, 451 aa, synthetic construct
MQRVAIYMRVSTDQQAKHGDSLREQQETLDEYIKRNKNLKVVDKYIDGGISGQKLNRDEFQRLLDDVKNDQIDLILFTKLDRWFRNLRHYLNTQEILEKHNVSWNAVSQQYYDTTTAYGRTFIAQVMSFAELEAQMTSERIKSVFSNKIQQGEVVSGKVPLGYKIENKRLVPTPDKDIVIDLFDYYVRVGSLRKTTTYLEEKHGIVRDYQSVRKLLTNEKYIGKLRNNTNYCEPIIDKDVFETVQLRLSQNVKTSGSHDYIFRGLVRCADCNGSMSCSTLKSKYIKKTDGEVSYYIRSCYRCTRRRNNPTRCKNKKTYYERALERYLLDNIQTNIAMRVRTLKKEVTKKDSVKRKKDALFVKIERLKKAYLNEIIELDEYKRDREMLENEIASLKEPKINKNIAPLKKVLSDDFFEKYEKASINQKNELWRSIIESIEVSVDGNITVNFLP

SEQ ID NO: 6075 - protein, 449 aa, synthetic construct
MLKRAALYIRVSTDQQAKHGDSLDAQIATLKDYVSTQDNLTIIDTYIDDGISGQKLYRDEFQRLLEDIKKNRIDIILFTKLDRWFRNLRHYLNIQEILDNSGVTWLAVSQPFFNTDTAYGRSFVNQSMSFAELEAQMASERIKAVFENKIRKGEVVTGSVPFGYKICDKKLIPNENAPIAKYIFRHYSIHNSIRLTVEYLFNEYDITRSSRTIKHMLRNRKYIGEVSGNKNYCPPIVDKETFEKVQNLLDKNISSIAKRTYIFSGLVVCSCCGKKMTGRYRKRKYIKKDGTVMYYTKKVYRCNGNTYKRNKCPNKINIPEEILEEYLLNNIKADAENFEAKQKKIAVSAPEKNNNSKILKKIERLKKAYLNEVISLDEYKKDRKELEQMIVQVKPKETIVFKSNWFNKNIESTYRDFDEEEKRFVWRSVLKNLLVDPHGKITINFLTKN

SEQ ID NO: 6076 - protein, 558 aa, synthetic construct
MSKEKIKVYLYTRVSTSIQIDGYSLEAQKSRMKAFALYNDYEIVGEYEDAGKSGKSIEGRIQFTRMMEDIKSGKDGVSFVLVFKLSRFARNAADVLSTLQIMQDFGVNLICVEDGIDSSKDAGKLMISVLSAVAEIERENIRVQTMEGRIQKAREGKWNGGFAPYGYQLIDGKLLINEEEAIAIRTIFDQYVNTSIGANGLSKYLENHGIRKIPRQNGKNPLFDAGLIRKILKNPVYNGKIAFGRRTLEKVHGTRNEYRQVEQDDYLVAEGIHEAIIPDELWQAAQVKLKAQAKKYEHVNKGKNMRTHLLSGIVKCPICGAGMFGNKSIKYKKDGTKYKDFYYYGCKHRLMNRGHKCTYNKQIREELLDDAVAEVIIKLVSNPKFASMMQEKINMKVDTSAIENEIDNYQKELRKSHSTKFKLIEEIDNLDVDDKHYKRRKQDLDDRLYRMYDKIEELEGQLIEAKAKKETIEAEKLTGDNIYKVLIYFDKLYKVMNDVERRQLIEALISEIQIYEEKQPNGQWLKSITFKLPIIDEDLNISLDNDEQVESVCLMSRV

SEQ ID NO: 6077 - protein, 544 aa, synthetic construct
MAETIELQEKRAVAYSYVRFSTARQELGDSLRRQVAMAEEFCAKYGLDLHPVSYRDLGVSAFKRKNVERGALAAFIDAVKTGKVEKGSYLVIEQFDRLSRAEVDVALKLLLDLVHSGIKLVTLVDEKIWDRESVKDIGNLILAIVFMSRANNESAAKADRLSQAWTQKKKAALESGKIMSRECPRWLTVNADKSAFVVLEDRAESVRRVFAMRINGHGVVSIVNRANREMWPVPGKGDTWHTSLVGRLLSNRALLGEYQPHRSGSEDDKRIPVGELVRDYYPAIIDEQTFLRAQAVRERKGAFPGRRDISYRNWLQGLLKCSCGHSFVRKNKTSSKQPGYARYYCTARNRGVTDCPSMNAREIETAIIHAVSGIAPHFWNGTARLEELNTLLDVQQVDLTAAVSQRDRFAEAIGASKAPIPVLLERLTAAEIEVEKAEKALATTRAEISELQGDSDSVFENIVKAVENVDSLDARAALREDLSRVLVKCVVDVKAGIVNVYIRGEELPLTVPLREDAVIPGAAAGQMTEEEFRRTFGRGPDELE

SEQ ID NO: 6078 - protein, 529 aa, synthetic construct
MRKVYSYMRFSRPEQAKGTSIERQSNFAEQYALEHGLELDKSLTMMDKGLSAFHGVHKTKGAFGQFLAAVTAGKVPSGSVLVVESLDRLSREDPLIAQAALTDLILSGITVVTAADNQVYSREEIQQNPFKLIMSLVVMIRANEESETKQRRSNAFLKSALNQYQANGKIRRLGSDPSWLDFNKDNDTYSFNERVEVIRRILNLYNQGIGSLKIARQLTEESIPTLSGKRSAWGQTTVANIVKSHALYGMKRINVQGVEYDLEDFYPALITKSKWLTLQQHRTKRSKSMHGRGEVVHLITGHGKGFTTCGYCGGGLGAQTQKQYKRSGEYSRTVTRLHCLTHKETSSCCSSVFLEPIESAVLFAACIGVEPQSLIPTVNNVNYSALIDEVENKVKHIVEQVTAGAPWELFKDAHDKLKLEKQKLIKERDSQKPDVNQSDVQKWVNKLVELADKARVNDKEARLKCRTLINSICKSIVIKLRGHDLKSEPVVTITFVTDEQFEFKVGKNGAVQFVDNGMAVNRRLKPLLA

SEQ ID NO: 6079 - protein, 506 aa, synthetic construct
MRHVITYLRYSSAIQGAEGADSTRRQNDLFKQWLKKNSDAQVVASFNDEGLSGYKGKHLSGQFGDMLSRIESGEFSEGTVLLVEAIDRIGRLEHLETEALMNRILGNGIEIHTLQDGLIYTKDALSDDLGISIIQRVKSYIAHQESKQKSFRVSQKWEQRAKLALAGKQRLTKMVPGWIDPETFKLNEHAETVRLIFKLLLDGESLHNIARHLQSNDIKSFSRRKDANGFSVHSVRTVLRSESVIGTLPASQRNDRPAIPNYYEAAIDAATFNKAQEILDKNRKGRTPASDNPLTINIFKGLFRCQCGASVHPTGTKRTYQGVYRCNNHLDGRCDVQPLKRKPFDRWMIDNFLGMIDVGNDGESERKIAALQHEVEIVTARIKKATALLLEMDDIDELKIQLKELNQKRTELQTTIDNMRRKASLTDKELPQLKDIDLTTKAGRVECQLILSKHLKGLTLGKDSVTVTLQNDTEITIPTNPLPLNDGSPIFEIADKELLDIDAYQL

SEQ ID NO: 6080 - protein, 506 aa, synthetic construct
MRTVITYLRFSSATQGAEGADSTRRQNELFKQWLRKNSDAQVVASFNDEGLSGYKGKHLSGQFGDMLSRIESGEFPEGTILLVEAIDRIGRLEHLETEALMNRIIAHGIEIHTLQDGLIYTRDALSDDLGISIIQRVKSYLAHQESKQKSFRVSQKWKQRAKLALAGEQRLTKMVPGWIDPDTFKCNEHAETVRLIFKLLLDGESLHNIARHLQSNDIKSFSRRKDANGFSVHSVRTVLRSVSAIGTLPASQRNDRPAIPNYYEAAIDAATFNKAQEILDKNRKGRTPASDNPLTINIFKGLFRCQCGASVHPTGTKRTYQGVYRCNNHLDGRCDVQPLKRKPFDRWMIDNFLGMIDVGNDGESERKIAALQHEVEIVTARIKKATALLLEMDDITELKTQVRELNQKRTDIQTTIDTLKRKTSLSDKGLPQLKDIDLMTKAGRVECQLILSKHLKGLTLGKDSVTVTLQNDTEITIPTNPLPLNDGSPIFEIADKELLDIDAYQL

SEQ ID NO: 6081 - protein, 507 aa, synthetic construct
MKRVISYIRFSSEKQAKGDSLRRQSKMVTDWLKAHPEYYLDQDLSFRDLGVSGFTGKHLKGGLGDFLTAIEKGLVKAGDTLLIESLDRLSRQAVDRASELLRNILRSGVDVVTLSDGEHYTSESLKDPLALIKSILIMQRAHEESLRKSERIQAAWNRKKELISEGIKISKRCPAWLKLNDDRKSFSVIPDKVETVKRCFQLRLEGKSIWEIVRTMNAEGHQTLHQHKPGSFGQSSVQDLLKNRSVIGYFTPKGCEEISGYYPAIIDETTFYKVQQLSYARHGRKPASAKPLSVNLFKGVIRCSECGHALIITGFSDTRNGIYRCPLRNENRCSAKGLSRKQTDGTLLTLLSRLDRFDSDTTNTIDTLKLHREHLSSNIEKLVQLSLEIEDLNAITNKLKQLKNELSQVDADIEKETQRLKSIDVGCLSDCDLSTKAGRIEAQLIIKSAVKEVVLNTAKRRCKVTFHNSKSITLPITENPSDNVTEAIQSLSEVTERGLIDVDEVII

SEQ ID NO: 6082 - protein, 506 aa, synthetic construct
MRSVITYLRYSSAIQGAEGADSTRRQNDLFKQWLKKNSDAQVVASFSDEGLSGYKGKHLTGQFGDMLARIESGEFSKGTILLVESIDRIGRLEHLETEALMNRILGNGLEIHTLQDGLIYTKDALADDLGISIIQRVKAYIAHQESKQKSFRVSEKWKQRAKLALAGEQRLTKMVPGWIDPDTLKLNEHAETVRLIFKLLLSGESLHNIARHLQSNGIKSFSRRKDANGFSVHSVRTILRSETTIGTLPASQRNDRPAIPNYYEAAIDAATFNKAQEILDKNRKGRTPASDNPLTINIFKGLFRCQCGASVHPTGTKNKYAGVYRCNNNPDGRCDVPPLKRKPFDRWMIDNFLGMIDVGNDGEAEGKIASLQHEVEIVTARIKKATALLLEMDDITELKTQVKGLNQKRTELQTTIDNMRRKASLTDKELPQLKDIDLTTKAGRVECQLILSKHLKGLTLGKDSVTVTLQNDTEITIPTNPLPLNDGSPIFEIADKELLDIDAYQL

SEQ ID NO: 6083 - protein, 547 aa, synthetic construct
MKLLVTYIRWSTKEQDSGDSLRRQTNLIDAFYSKHKEEYYLLPAHRYVDKGKSGFHQQHKAQGSDFRRMFENVMSGVIPEGSLIVVENFDRFSRADIDTAIDDVRQILRKGVSILTLGDGELYDKSALTDPVKLIKHIIIAERAHQESLVKQKRIAQVWNHKTQLARELKKPMGKQAPGWLELSEDGSHYIVDEDKASLVNIIYDKRLSGMSMFAICKWLNEQGYPTINQRKVRISKTKKPDGNWSALSVKHILTSRSVLGYLPAKISTEDRKTVLREEIEGFYPQIVTDSKFYAVQQLLEETGKGKTSSGEHWLYVNILKGLIRCKCGLVMTPTGIRKPVYQGTYRCNGNKESRCSYGTVSRKLLDTQLCSRLFSKLSQLHDEATDTAKLDELQRRLNTVDSELEKLTETLIQLPNITQIQEALRVKQEEKDELIVQLSREKARVKSVSSLDLSGLDMESVEGRTEAQIIIKRLVKEIVVSGNEKLVDIYLHNGNMIRGFPLDGKDDHTLTLEEATDEMQSLDDMLIFGEPVTRIYPAGDMEEVDA

SEQ ID NO: 6084 - protein, 521 aa, synthetic construct
MKKVITIEPAKQVTHKVDLPSFTKRRVAGYARVSTDHEDQTTSYEAQMTYYTDYINSRSDWEFVKMYSDEGISGTNTKKRLGFQEMVEDALVGKVDLILTKSVSRFARNTVDSLSTVRKLKEAGVEIYFEKENIWTFDSKGELLITIMSSLAQEESRSISENVTWGRRRQLAEGQVTFSYSQVLGFKKSDTGGFEIDQEEAKIVRYIFHQVLLGNNPNKIARELTAQGIPTPQGKRKWSYGTVKRMLRNEKYKGDALLQKSFTTDFLTKSTKPNEGELPQYYVENNHEAIIKREVFDLVQVELDKLEKKRQTNNIFTGRLFCGDCGSAFGSKVWHSTSKYKRTIYQCNAKYKGEHKCQTPHVTEEEIKGWFLSAMNQLLSNREEIVANTELLIDLAKDTSPLENKIDDLEQQLETIRQDIEDLVDRNARKAQNQDLYQEQYDTLITAYQERQKELQEATSSLEEQKSKQLSLDGFIQQLKQQEDLITDFNQELWQTSVERLDIKEGKKISLTFKNGVRIDL

SEQ ID NO: 6085 - protein, 507 aa, synthetic construct
MKRVISYIRFSSEKQAKGDSLRRQSKMVTDWLKAHPEYYLDQDLSFRDLGVSGFTGKHLKGGLGDFLTAIEKGLVKAGDTLLIESLDRLSRQDIDIASELLRNILRSGVDVVTLSDGEHYTRESLRDPLALIKSILIMQRAHEESLRKAERIQAAWDAKKEAAKAGIKVSKRCPAWLKLNDDRKSFSVIPEKVETVKRCFQLRLEGKSIWEIVRTLNDEGHQSMSQYKPGSFGQSSVQDLLKNRSVIGYFTPKGCEEIAGYYPAIIDETTFYKVQQLSYARYGRKPASDKPLSVNLFKGVIRCSECGHALIITGFSDTRSGIYRCPLRNENRCSAKGLSRKQTDGTLLALLSRLDRFDSDMTNTIDTLKLHREHISSNIEKLVQLSLEIEDLNAITNKLKQLKNELSQVDADIEKETQRLKSIDVGCLSDCDLTTKAGRIEAQLIIKSAVKEVVLNTAKRRCKVTFHNGKIIDLPITENPSEDVTEAIQSLSEVTERGLIDVDVVEI

SEQ ID NO: 6086 - protein, 507 aa, synthetic construct
MKRAISYIRFSSEKQSRGDSLRRQSKMVNDWLKAHPEYYLDQDLSFRDLGVSGFTGKHLKGGLGDFLTAIEKGLVKAGDTLLIESLDRLSRQAVDRASELLRNILRSGVDVVTLSDGEHYTSESLKDPLALIKSILIMQRAHEESLRKSERIQAAWDAKKEAAKAGIKVSKRCPAWLKLNDDRKSFSVIPEKVETVKRCFQLRLEGKSIWEIVRTLNDEGHQTLNQYKAGKFGQTSVQDLLKNRSVIGYFTPKGCEEISGYYPAIIDETTFYKVQQLSHYRYGRKPVSDKPLSVNLFKGVIRCSECGHALIITGFSDTRNGIYRCPLRNENRCSAKGLSRKQTDGTLLTLLSRLDRFDSDTTNTIDTLKLHREHISSNIEKLVQLSLEIEDLSAITSKLKQLKGELSQVDADIEKETQRLKSIDVGCLSDCDLTTKAGRIEAQLIIKSAVKEVVLNTAKRRCKVTFHNGKLIDLPITETPSDNVTEAIQSLSEVTERGLIDVDEVII

SEQ ID NO: 6087 - protein, 547 aa, synthetic construct
MKLLVTYIRWSTKEQDSGDSLRRQTNLIDAFYSKHKNDYYLLPAHRYVDKGKSGFHQQHKAQGSDFRRMFENVMSGVIPEGSLIVVENFDRFSRADIDTAIDDVRQILRKGVSILTLGDGELYDKSALTDPVKLIKHIIIAERAHQESLVKQKRIAQVWNHKTQLARELKKPMGKQAPGWLELSEDGSHYIVDEDKASLVNIIYDKRLSGMSMFAICKWLNEQGYPTINQRKVRISKTKKPDGNWSALSVKHILTSRSVLGYLPAKISSEDRKTVLREEIEGFYPQVVTDSKFYAVQQLLEETGKGKTSSGEHWLYVNILKGLIRCKCGLVMTPTGIRKPVYQGTYRCNGNKESRCSYGTVSRKLLDTQLCSRLFSKLSQLHDEATDTAKLDELQRRLNTVDSELEKLTETLIQLPNITQIQEALRVKQEEKDELIVQLSREKARVKSVSSLDLSGLDMESVEGRTEAQIIIKRLVKEIVVSGNEKLVDIYLHNGNMIRGFPLDGKDDHTLTLEEATDEMQSLDDMLIFGEPVTRIYPAGDMEEVDA

SEQ ID NO: 6088 - protein, 507 aa, synthetic construct
MKRVISYIRFSSEKQAKGDSLRRQSKMVTDWLKAHPEYYLDQDLSFRDLGVSGFTGKHLKGGLGDFLTAIEKGLVKAGDTLLIESLDRLSRQDIDIASELLRNILRSGVDVVTLSDGEHYTRESLRDPLALIKSILIMQRAHEESLRKAERIQAAWDAKKEAAKAGIKVSKRCPAWLKLNDDRKSFSVIPEKVETVKRCFQLRLEGKSIWEIVRTLNDEGHQSMSQYKPGKFGQTSVQDLLKNRSVIGYFTPKGCEEIAGYYPAIIDETTFYKVQQLSHSRYGRKPVSAKPLSVNLFKGVIRCSECGHALIITGFSDTRNGIYRCPLRNENRCSAKGLSRKQTDGTLLTLLSRLDRFDSDTTNTIDTLKLHREHISSNIEKLVQLSLEIEDLNAITNKLKQLKNELSQVDADIEKETQRLKSIDVGCLSDCDLTTKAGRIEAQLIIKSAVKEVVLNTAKRRCKVTFHNGKAITLPITENPSEDVTEAIQSLSEVTERGLIDVDVVAI

SEQ ID NO: 6089 - protein, 491 aa, synthetic construct
MGLAAIYLRLSRNEEQLDIDEILSSHRNALTKLAKQQKLTYDMYQEISSGVNTDRPQLNLLLSRLDDYDALLVMDIDRISRDNAHAEEIKKMLILHDIKILTPQGAIDLSQESNEMLFSFQAMMANFEYKQIRKRLGRGRLAAAEQGKWTMSNRVPLGYKKNEEKRLEIVEDEAKIIRFIFQKTLERVSANEIAKQLDTLGWRSRNGKVLTSAHISQVRRNVVYYGVVQACRRVNGRVVDEVFVENAHEPIISKQTFLEVQEILAENTTGNFFNKAKSIRKLQGLIYCNCCKRKRYIQCDGHGVDFVKSCIYKVDNNNCRDRGHKYAPIEQFVLQKVKEKKSAFEQELRMLKSLDTVEVENKLLIQKESLEKQLDKFNKRQRNLKEMRMDGEITKVEFYEMRDRNEEQIKQVRQQMELIDIRLENLSNTDEEQKRLEDAIKKLDMLEELNDEVCNAFLKKFIKKIWFSSNTEANHDTTRERVEATVEIEWL

SEQ ID NO: 6090 - protein, 547 aa, synthetic construct
MKLLVTYIRWSTKEQDSGDSLRRQTNLIDAFYSKHKNDYYLLPAHRYVDKGKSGFHQQHKAQGSDFRRMFENVMSGVIPEGSLIVVENFDRFSRADIDTAIDDVRQILRKGVSILTLGDGELYDKSALTDPVKLIKHIIIAERAHQESLVKQKRIAQVWNHKTQLARELKKPMGKQAPGWLELSEDGSHYIVDEDKASLVNIIYDKRLSGMSMFAICKWLNEQGYPTINQRKVRISKTKKPDGNWSALSVKHILTSRSVLGYLPAKISTEDRKTVLREEIEGFYPQIVTDSKFYAVQQLLEETGKGKTSSGEHWLYVNILKGLIRCKCGLVMTPTGIRKPVYQGTYRCNGNKESRCNYGTVSRKLLDTQLCSRLFSKLSQLHDEATDTAKLDELQRRLNTVDSELEKLTETLIQLPNITQIQEALRVKQEEKDELIVQLSREKARVKSVSSLDLSGLDMESVEGRTEAQIIIKRLVKEIVVSGNEKLVDIYLHNGNMIRGFPLDGKDDHTLTLEEATDEMQPLDDMLIFGEPVTRIYPAGDMEEVDA

SEQ ID NO: 6091 - protein, 506 aa, synthetic construct
MRTVITYLRFSSATQGAEGADSTRRQNDLFKQWLKKNSDAQVVASFSDEGLSGYKGKHLTGQFGDMLARIEAGEFPGGTILLVESIDRIGRLEHLETEALMNRIIAHGIEIHTLQDGLIYTRDALSDDLGISIIQRVKSYLAHQESKQKSFRVSEKWKQRAKLALAGKQRLTKMVPGWIDPDTLKLNEHAETVRLIFKLLLSGESLHNIARHLQSNGIKSFSRRKDANGFSVHSVRTILRSETTIGTLPASQRNDRPAIPNYYEAAIDAATFNKAQEILDKNRKGRTPASDNPLTINIFKGLFRCQCGASVHPTGTKNKYAGVYRCNNHLDGRCDVPPLKRKPFDRWMIDNFLGMIDVGNDGEAEGKIASLQHEVEIVTARIKKATALLLEMDDITELKAQVKGLNQKRTELQTTIDNMRRKASLTDKELPQLKDIDLTTKAGRVECQLILSKHLKGLTLGKDSVTVTLQNDTEITIPTNPLPLNDGSPIFEIADKELLDIDAYQL

SEQ ID NO: 6092 - protein, 547 aa, synthetic construct
MKLLVTYIRWSTKEQDSGDSLRRQTNLIDAFYAKHKEEYYLLPAHRYVDKGKSGFHQQHKNQGSDFRRMFENVMSGVIPEGSLIVVENFDRFSRADIDTAIDDVRQILRKGVSILTLGDGELYDKSALTDPVKLIKHIIIAERAHQESLVKQKRIAQVWNHKTQLARELKKPMGKQAPGWLELSEDGSHYIVDEDKASLVNIIYDKRLSGMSMFAICKWLNEQGYPTINQRKVRISKTKKPDGNWSALSVKHILTSRSVLGYLPAKISTEDRKTVLREEIESFYPQIVTDSKFYAVQQLLEETGKGKTSSGDHWLYVNILKGIIRCKCGLVMTPTGIRKPVYQGTYRCNGNKESRCSYGTVSRKLLDTQLCSRLFSKLSQLHDEATDTAKLDELQRRLNTVDSELEKLTETLIQLPNITQIQEALRVKQEEKDELIVQLSREKARVKSVSSLDLSGLDMESVEGRTEAQIIIKRLVKEIVVSGNEKLVDIYLHNGNMIRGFPLDGKDDHTLTLEEATDEMQSLDDMLIFGEPVTRIYPAGDMEEVDA

SEQ ID NO: 6093 - protein, 540 aa, synthetic construct
MPKAISYIRFSSRIQAYGDSTKRQNKYINEWLKNNPDYHLDESLRFQDLGISGYSGANAKSGAFGEFLAAVESGVIEAGSVLLVESLDRVSRQDIDTARERLRKILLAGVDVVTLADNSWYKKESLNDPLSLIKAVLIMQRANEESATKSKRLRSAWDAKREEAAKGKIMSRRCVAWLRVSDDMSHFELIPDNVKAVQRVFQLRLEGLPFVRIARQMNEEGFYTLNQRNPVKGAWSHTTVKALLDNRSVIGFKVPSNCTVTQGVKEIPNYYPAVISEEQFYAVQQLKQGAGRRPSSEKPLLTNLFKGVMRCGECGFVTVVNCATEKWHGVYRCSMRYEGRCDAKSINRRLADKSLVQGLLYNTNRLSLNRDNGSAIGTLQSELEQLQKQRERLIKLAMLADDTESMAKDLKALNSQIKDAEKAVSEVHQREQSSQLETISHLDLTVKKDRVEAQIIIKRIVKEIRLNTAGKKCDVFLHNGLKLLNFPLDRVVDGAQWLEVLPLIDGDEFDFEGFTTKPRHIALEEAPNWVKEMEEQSNQP

SEQ ID NO: 6094 - protein, 507 aa, synthetic construct
MKRVISYIRFSSERQAKGDSLRRQSKMVNDWLKAHPEYYLDQDLSFRDLGVSGFTGKHLKGGLGDFLTAIEKGLVKAGDTLLIESLDRLSRQDVDQASELLRNILRSGVDVVTLSDGEHYTRESLRDPLALIKSILIMQRAHEESLRKAERIQAAWDAKKEAAKAGIKVSKRCPAWLKLNDDRKSFSVIPEKVETVKRCFQLRLEGKSIWEIVRTLNDEGHQSMSQYKPGSFGQSSVQDLLKNRSVIGYFTPKGREEIAGYFPPIIPETDFYKVQQLSYSRYGRKPASDKPLSVNLFKGVIRCSECGHALIITGFSDTRNGIYRCPLRNENRCSAKGLSRKQTDGTLLALLSRLDRFDSDTTNIIDMLRLHREHVSSNIEKLVQLSLEIEDLNAITSKLKQLKGELSQVDADIEKETQRLKSIDVGCLSDCDLTTKAGRIEAQLIIKSAVKEVVLNTAKRRCKVTFHNGKTITLSITENPSEDVTEAIQSLSEVTERGLIDVDVVEI

SEQ ID NO: 6095 - protein, 452 aa, synthetic construct
MKAAIYIRVSTQEQVENYSIQAQTEKLTALCRSKDWDVYDTFIDGGYSGSNMNRPALNEMLSKLHEIDAVVVYRLDRLSRSQKDTITLIEEYFLKNNVEFVSLSETLDTSSPFGRAMIGILSVFAQLERETIRDRMVMGKIKRVESGLPLTTAKGRTFGYDVVDTKLYVNKEEAQHLQLIYDIFEEEKSITFLQKRLKKLGFKVKSYSSYNKWLMNDLYIGYVSYGDKVHVKGVHEAIISEEQFYRVQEIFSRMGKNPNMNKESSSLLNNLIVCEKCGLSFVHRVKDTVSRGKKYRYRYYSCKTYKHTHELEKCGNKIWRADKLEEIIIDRVKNYSFATRNLDKEDELDSINAKLQVEHSKKKRLFDLYMNGSYEVAELDKMMADIDAQINYYNSQIEANEELKRNKKVQESLAELATVDFDSLEFREKQIYLKSIINKIYIDGEQVTIEWI

SEQ ID NO: 6096 - protein, 507 aa, synthetic construct
MKRVISYIRFSSEKQAKGDSLRRQSKMVTDWLKAHPEYYLDESLTFRDLGVSGFTGKHLKGGLGDFLTAIEKGLVKAGDTLLIESLDRLSRQAVDRASELLRNILRSGVDVVTLSDGEHYTSESLKDPLALIKSILIMQRAHEESLRKSERIQAAWDAKKEAAKAGIKVSKRCPAWLRLNDDRKSFSVIPEKVETVKRCFQLRLEGKSIWEIVRTLNDEGHQSMSQYKPGKFGQTSVQDLLKNRSVIGYFTPKGCEEIAGYYPAIIDETTFYKVQQLSHSRYGRKPVSAKPLSVNLFKGVIRCSECGHALIITGFSDTRSGIYRCPLRNENRCSAKGLSRKQTDGTLLTLLSRLDRFDSDTTNTIDTLKLHREHISSNIEKLVQLSLEIEDLNAITSKLKQLKGELSQVDADIEKETQRLKSIDVGCLSDCDLTTKAGRIEAQLIIKSAVKEVVLNTAKRRCKVTFHNGRAITLPITENPSEDVTEAIQSLSEVTERGLIDVDEVII

SEQ ID NO: 6097 - protein, 604 aa, synthetic construct
MKKVFVYHRVSSDQQLDGSGIARQAELLEGYLERTGICAEMDDPAPVVLSDQGVSAFKGLNISEGELGAWMEQVRNGMWDSSILVVESIDRFSRQNPFDVMGYINALMAHNVAIHDVMANIVISRSNSKDLPFVMMNAQRAYDESKYKSDRIRKGWAKKREQAFNKGTIVTNKRPQWIEVENDKYVLNHKAAVVKEIFALYQTGMGCPTIAKQLQRKEGEQYKFNRPWTGELVHKILTNRRVTGKIFISEIIRNHDDIENPVTQKKYNMDVYPVVINEEEFELVQELLKSRRPNAGRVTVKKDGQEEVLIKSNLFSGIARCTKCGGPMYHNVVRAKRTPKKGDPKIEEYRYIRCLNERDGLCENKAMAYETVERFVVEHMLGMDLSTVIKEQEFNPEIEVLRIQIDQVKDQITNYENGIERRKSAGKPISFDMREELDDAKSELERLLARQASLATVQVDVPVLQDVNVTELYNVNNVDIRTRYENELNKIVSNIRLKRNGTSYTIDINYKQNELKKHVLFVENKKKEQTLISEVIIEDVDGAKFYYTPSFMIRLKDGEIRFQQTKEDLSVIDYSLLLNYVDAVDRNDAVGVWMRNQFNFLTSN

SEQ ID NO: 6098 - protein, 559 aa, synthetic construct
MKTKLYSYIRFSSMRQNDGSSYERQIRMAREVAAKYDLELVNDYQDLGVSAFKGANSKTGALSRFLDAIGRSVPVGSWLFIENLDRLSRADIVSAQELFLSIIRRGITIVTGMDNKIYSLDTVTANPMDLMFSILLFIRGNEESQTKRNRTNSSALIKIKSHQENPQNPAVAIEEVGKNMWWTDTTSGYVLPHPTYFPVVQEIVELRKNGRSTAEILDHLNETYAPPPAVSNKKHSKWSRAMVERLFHTRALIGIKEVSVDGVNYELKDYYPRVIDDATFYHLKKNIGARAWNFGDKEEVKPIPLLSGIGLLKCDHCGCAMVKVKGTNKRSDQYRYTCDATRSRRLDCEHPNWSFRGDQLEKAVLQLLADKIWIAEDKANPVPALKVQVDEISRKIDNLIALSAMTGATKELADQITTLNSERETLYNQIKMAEEEMYSVDSQGWEKLAEFDLEDVYNEERLKVRFKIKQALKRIGCSRIDRNKNLFVLEYIDGKTQRVVIENSRGTRKGQIFVDLKTINDRQILESNGLVLHPCLDMLTDKNWKPEEEIPGPLQEFGI

SEQ ID NO: 6099 - protein, 506 aa, synthetic construct
MRSVITYLRYSSAIQGAEGADSTRRQNDLFKQWLKKNGDAQIVASFSDEGLSGYKGKHLTGQFGDMLARIEAGEFPEGTILLVESIDRIGRLEHLETEALMNRILGNGIEIHTLQDGLIYTKDALADDLGISIIQRVKAYIAHQESKQKSFRVSQKWGQRAKLALAGEQRLTKMVPGWIDPETFKLNEHAETVRLIFKLLLDGESLHNIARHLQSNGIKSFSRRKDANGFSVHSVRTILRSETTIGTLPASQRNDRPAIPNYYEGVVDIPTFNKAQEILDKNRKGRTPASDNPLTINIFKGLFRCQCGASVHPTGTKNKYAGVYRCNNHLDGRCDVQPLKRKPFDKWVLENFLGIIDVGNDGESERKIAALQHEVEIVTARIKKATALLLEMDDITELKTQVKGLNQKRTEIQTTIDTLKRKTSLSDKGLPQLKDIDLMTKAGRVECQLILSKHLKGLTLGKDSVTVTLQNDTEITIPTNPLPLNDGSPIFEIADKELLDIDAYQL

SEQ ID NO: 6100 - protein, 638 aa, synthetic construct
MKPKLYSYVRFSSVKQREGNSLERQQDTALKIAARYNLELDTTAFHDLGMSAFKGRNAHEGKLSEFIKQIGVKVPVGSWLVVENLDRISRDDAWTALDIFKSILSKGIVVVTGMDEKVYKYADVKNNPTDLIISLLMFTRAHDESLTKKNRVEAQARSLIQYNLTRKAGTPAKAIESVGQNVWWVDTKSGYVTPHPMYFSAAQKIIELKQNGETLLGIQRYLNEHYPAPKKRIYKDQTGQALKPKTEQWGKHLIRTFLNPTVYGQKVFTLDKRDKSGAVIYEPDSEQPLKETFVIPDYYPALISEIDYLTLSKLDRHRAVTRSSSKYPEGNPEPEIPLLSGIGILFCGKCGSFMFKSGSNENKYRYICGSKIVQGKPCGKKGFTAYQLEHTVLQLIADHVWNNHQEDKTAWYESEIEKTSESIDKLLKLATLTDSLEELAEQIRSYKHKKATLEREFQQYKISRSEIQTTGWDQFRNFDVHDTKNPDRKRIRLKVKQAIKRINCYDIDGRHGHFEVTFADETKQRIVIKFNRNRSPGVSYVEAQTVNDHDLLKMQGFVMHSFIDELISPDKFAQQIKDKHEVSILNPTFITKLEDGVNRDESNGLAIKVDSTTSKSYVTVNGIKYEINSLEDLEKLLQ

SEQ ID NO: 6101 - protein, 604 aa, synthetic construct
MKKVFVYHRVSSDQQLDGSGIARQAELLEGYLERTGICAEMDDPAPVVLSDQGVSAFKGLNISEGELGAWMEQVRNGMWDSSILVVESIDRFSRQNPFDVMGYINALMAHNVAIHDVMANIVISRSNSKDLPFVMMNAQRAYDESKYKSDRIRKGWAKKREQAFNKGTIVTNKRPQWIEVENDKYVLNHKAAVVKEIFALYQTGMGCPTIAKQLQTKEGEQYKFNRPWTGELVHKILTNRRVTGKIFISEIIRNHDDIENPVTQKKYDMDVYPVVINEEEFELVQELLKSRRPNAGRVTVKKDGQEEVLIKSDLFSGIARCTECGGPMYHNVVRAKRTPKKGDPKIEEYRYIRCLNERDGLCENKAMTYETVERFVVEHLLSMDLNTVIKEQEFNPEIEVIRIQIDQVKDQITNYENGIERRKSAGKAVSFEMREELDDAKLELEQLLARQASLATVQVDLPVLQDVNVTELYNVNNVDIRTRYENELNKIVSNIRLKRNGNFYTIDIIYKQNELKRHVLFIENKKKEQKLISEVIIENVDGAKFYYTPSFVISVKDGEIRFQQTKEDLTIIDYSLLLNYVDAVDRCDAVGVWMRNNMSFLFTK

SEQ ID NO: 6102 - protein, 611 aa, synthetic construct
MRTVKAFVYSRVSTLQQVDAFGLSRQISTVMDFLENAKLPAELGYQLDPSNHEILESDKGLSGYKGHSFTKGSLGRFKERVRAGEITEGCLLIESVDRFSRKQGYDAIDEFTFLIKRNIDIVEVETGQIFSHKLEHKLSALSTSIERAHQESKRKARISMKSWKHRKEASLANGVALNNNTPDWLSLSTDKLSYEIDYHRVETIKRIFQMYRNGYGVTHIVKVLNDEGNRYNGKGWNTVTVYNKLRDRRLNGFLVGKYKTIPKRINESTNEAEKRILENLKIKKEAHDNAKRIYPVVVDDDLFLKVQSLMDRNVSNKKQKSTTTKQRNLFNGLTKCYECGSPMIVQSMSNGGQYLRCYRQRTKDEKCNSKMLRYSVTEKVLLEHIKGLDLDDIYGDKTQNYSVDTLKNLLQQTNNKLLELNVKIKSANDEEELFAIMEFKRKRNIEKEDLIAKINSIENASEVVRLSYNYDIGEIVNQDNTVLRRKTNENISKVVSSIKCLRTDSSYIGAYYSYDIAYHKDIIKHLLITDNNGVLLSEISIYQKNNERTYIVKEDNKMVFKVESNGDVWVLYASRKKSINDLLHYINVMMVGREPEVFAYVLNEDMIEWID

SEQ ID NO: 6103 - protein, 611 aa, synthetic construct
MRTVKAFVYSRVSTLQQVDAFGLSRQISTVMDFLENAKLPAELGYQLDPSNHEILESDKGLSGYKGHNFTKGSLGRFKERVRAGEITEGCLLIESVDRFSRKQGYDAIDEFTFLIKRNIDIVEVETGQIFSHKLEHKLSALSTSIERAHQESKRKARISMKSWKHRKEASLANGVALNNNTPDWLSLSTDKLSYEIDYHRVETIKRIFQMYRNGYGVTHIVKVLNDEGNRYNGKGWNTVTVYNKLRDRRLNGFLVGKYKTIPKRINESTNEAEKRILENLKIKKEAHDNAKRIYPVVVDDDLFLKVQSLMDRNVSNKKQKSTTTKQRNLFNGLTKCYECGSPMIVQSMSNGGQYLRCYRQRTKDEKCNSKMLRYSVTEKVLLEHIKGLDLDDIYGDKTQNYSVDTLKNLLQQTNNKLLELNVKIKSANDEEELFAIMEFKRKRNIEKEDLIAKINSIENASEVVRLSYNYDIGEIVNQDNTVLRRKTNENISKVVSSIKCLRTDSSYIGAYYSYDIAYHKDIIKHLLITDNNGVLLSEISIYQKNNERTYIVKEDNKMVFKVESNGDVWVLYASRKKSINDLLHYINVMMVGREPEVFAYVLNEDMIEWID

SEQ ID NO: 6104 - protein, 534 aa, synthetic construct
MEQVRNGMWDSSILVVESIDRFSRQNPFDVMGYINALMAHNVAIHDVMANIVISRSNSKDLPFVMMNAQRAYDESKYKSDRIRKGWAKKREQAFNKGTIVTNKRPQWIEVENDKYVLNHKAAVVKEIFALYQTGMGCPTIAKQLQTKEGEQYKFNRPWTGELVHKILTNRRVTGKIFISEIIRNHDDIENPVTQKKYDMDVYPVVINEEEFELVQELLKSRRPNAGRVTVKKDGQEEVLIKSNLFSGIARCTECGGPMYHNVVRAKRTPKKGDPKIEEYRYIRCLNERDGLCENKAMTYETVERFVVEHLLGMDLNTVIKEQEFNPEIEVIRIQIDQVKDQITNYENGIERRKSAGKAVSFEMREELDDAKLELEQLLARQASLATVQVDLPVLQDVNVTELYNVNNVDIRTRYENELNKIVSNIRLKRNGNFYTIDIIYKQNELKRHVLFIENKKKEQKLISEVIIENVDGAKFYYTPSFVISVKDGEIRFQQTKEDLTIIDYSLLLNYVDAVDRCDAVGVWMRNNMSFLFTK

SEQ ID NO: 6105 - protein, 460 aa, synthetic construct
MLLVESLDRVSRQDIDTARERLRKILLAGVDVVTLADNSWYKKESLNDPLSLIKAVLIMQRANEESATKSKRLRSAWDAKREEAAKGKIMSRRCVAWLRVSDDMSHFELIPDNVKAVQRVFQLRLEGLPFVRIARQMNEEGFYTLNQRNPVKGAWSHTTVKALLDNRSVIGFKVPSNCTVTQGVKEIPNYYPAVISEEQFYAVQQLKQGAGRRPSSEKPLLTNLFKGVMRCGECGFVTVVNCATEKWHGVYRCSMRYEGRCDAKSINRRLADKSLVQGLLYNTNRLSLNRDNGSAIGTLQSELEQLQKQRERLIKLAMLADDTESMAKDLKALNSQIKDAEKAVSEVHQREQSSQLETISHLDLTVKKDRVEAQIIIKRIVKEIRLNTAGKKCDVFLHNGLKLLNFPLDRVVDGAQWLEVLPLIDGDEFDFEGFTTKPRHIALEEAPNWVKEMEEQSNQP

SEQ ID NO: 6106 - protein, 452 aa, synthetic construct
MKAAIYIRVSTQEQVENYSIQAQTEKLTALCRSKDWDVYDTFIDGGYSGSNMNRPALNEMLSKLHEIDAVVVYRLDRLSRSQKDTITLIEEYFLKNNVEFVSLSETLDTSSPFGRAMIGILSVFAQLERETIRDRMVMGKIKRVESGLPLTTAKGRTYGYDVVDTKLYINEEEAQHLQLIYDIFEEEKSITFLQKRLKKLGFKVKSYSSYNKWLMNDLYIGYVSYSDKVHAKGIHEPIISEDQFYRVQEIFSRMGKNPNMNRDSASLLNNLIVCEKCGLSFVHRVKDTVSRGKKYRYRYYSCKTYKHTHELEKCGNKIWRADKLEEIVIDRVKNYSFATRNLDKEDELDSITEKLKTEHSKKKRLFDLYMNGSYEVAELDKMMSDIDAQINYYNSQIEANEELKRNKKVQESLEELATVDFDSLEFREKQIYLKSIINKIYISDEQVTIEWI

SEQ ID NO: 6107 - protein, 449 aa, synthetic construct
MKQAIGYLRQSTTKQQSLAAQKQTIKALAEKHNIQHITFYSDKQSGRTDKRNGYQQITELIQQGQCDVLCCYRLNRLHRNLKNALKLMKLCQTYHVHILSVHDGYFDMDKAFDRLKLNIFISLAELESDNIGEQVKNGIKEKARQGKLITTHAPFGYHYHNGTFTIDTVKSPTVKAVFNYYLQGYGYKKIAQYLEADDNFINRKPYQVRNIILNPNYCGRVINQYGQYENMFPAIVSTTIYEEAQVTRTQKQVKRKPSENQLKQKIKCPYCHSTLTNMTVRKPDHSLRYYVCPQNMNNARFVCEFKGINAQELETSVLATCQDFFQNQQLYSKINHTIQQRLKRQRDIETKTTLNHEQLIEKLAQGKIDADTFREQSQSFRQQSNPITSINAHQIRKVFQNIIQQRFTLNMLYPYIDEIHITKNKTLTGIYFKNEPLNIVNQTAQSSIA

SEQ ID NO: 6108 - protein, 611 aa, synthetic construct
MRTVKAYVYSRVSSMQQVDAFGLDRQISTVMDFLENAKLPVELGYRLDPNNHEVLESDKGLSGYKGHNFTKGSLGRFKERVRSGEITEGCLLIESVDRFSRKQGYDAIDEFTFLIKRNIDIVEVETGQIFSNKLEHRLSALSTSIERAYQESKRKARISKKSWKHRKEESLANGVALNNNTPDWLALSNDKKTYEIDIQRVQTITKIFELYRDGYGVTQIVNLLNKEGERYNGKGWNTVTVYNKLRDRRLNGYLVGKYPSIPKKDNESTSETEKRVLENLKIKREANENAKRIYPIVVEDDLFLKVQSMMDRNVSTKKQRSSTTKQRNLFNGLTKCHECGSPMIVQSMSNGGQYLRCYRQRTKDEKCNSKMLRYYVTERVLLEHIKGLNLDDIYGDKSGNLSLESLNNLLSQVNNKLVVLNEKIKSASDEEELFAIMDFKRKRIAEKEDILNQINALENESEVVRLSYDYDIEEITNQDNTVLRRKTNEHIAKVVSSVKCLRMDSSYIGAYYLYDISYHKDIIKHLLLTNNDGVLLSEISINEINNQRVYSVKEDNKIVFKVESNGDVWVLHASRQKSIDELLHYINVMMVGREPEGFAYEVNEDMIEWVD

SEQ ID NO: 6109 - protein, 505 aa, synthetic construct
MTLAFSYARFSTKSQSTGTSLERQLNASRLFCSERGLTLSPKGYHDLGVSGFKQVKRPELEQMLQAIQSGDIPSGSYILIEAIDRLSRKGISHTQDVLKQILQYKVKVAFVGEDAKTLAGQVLDENSLNDLSSVILVALAADLAHKESVRKSKLVKAAKSIIRKKGTEGHKVRGHTMFWIDWSEKKQDFVLNDRVKDVHKIIQLRREGQGPRKIAKTLNELNIPGPRGNPWNHMTVTVVLRSPVLYGAYQTHQIIDGQKVPDVLLENHYPAVITQEEFVTIQADSSKSNKGRPSKANPFSGVLRCECGQAMLFSKRTNLNKDGEPLEYEYHFCLGYAEGRCKNNKRIRDLVPLLVQLMDKLVINQAPKKNLNVELIKQKEQKIEQLNKMLIELDSPPLSVLKTIQTLEAELDILLNTHVEEPVQADVQTLSSITDAQEYNQHLKRLVKKIVVYQKNGPKNLRIKVYKTDGHYQNFLVKDGTVLFKSDTKALKELIDGFNKERRER

SEQ ID NO: 6110 - protein, 604 aa, synthetic construct
MKKVFVYHRVSSDQQLDGSGIARQAELLEGYLERTGICADMDDPAPVVLSDQGVSAFKGLNISEGELGAWMEQVRNGMWDSSILVVESIDRFSRQNPFDVMGYINALMAHNVAIHDVMANIVISRSNSKDLPFVMMNAQRAYDESKYKSDRIRKGWAKKREQAFNKGTVVTNKRPQWIEVENDKYVLNHKAAVVKEIFALYQTGMGCPTIAKQLQTKEGEQYKFNRPWTGELVHKILTNRRVTGKIFISEIIRNHDDIENPVTQKKYDMDVYPVVINEEEFELVQELLKSRRPNAGRVTVKKDGQEEVLIKSNLFSGIARCTECGGPMYHNVVRAKRTPKKGDPKIEEYRYIRCLNERDGLCENKAMTYETVERFVVEHLLGMDLSTVMKEQEFNPEIEVLRIQIDQVKDQITNYENGIERRKSTGKPISFEMREELDDAKSELERLLARQASLATVQVDVPVLQDVNVTELYNVNNVDIRTRYENELNKIVSNIRLKRNGNFYTIDIIYKQNELKRHVLFIENKKKEQKLISEVIIENVDGAKFYYTPSFVISVKDGEIRFQQTKEDLSIIDYSLLLNYVDAVDRCDAVGVWMRNNMSFLFTK

SEQ ID NO: 6111 - protein, 516 aa, synthetic construct
MAGKQVTVIPMKPRQWAAENTEEKPKLKVAAYCRVSTEMEEQASSYEAQVQHYTDYIQRNPDWELVGIFADEGISGTGTKKRDGFNRMIEACQNGEVEYIITKSISRFARNTVDCLQYIRQLKELKIAVFFEKENINTMDAKGEVLLTIMASLAQQESQSLSQNTKMGVQYRFQQGQLRINHNHFLGYTKDEDGNLVIEPKEAEVIKRIFREYLEGSSLQEIANGLMADGILTGGKRKLWRGEGVRLILRNEKYMGDALLQKTYTTDFLTKKRVKNDGSYAQQYYVEDSHPAIIPKDIFMQAQQELDRRKSMKNKKSQCFSGKYALSGITVCGDCGNAYRRVHWKNRGTVWRCKSRVDKREHNCTGRTIYETDLHGAVIKAINETLIDRDAFLQQLNDNINSVMTDGLTDRLAELDSQLKELEAEIISLAVGGQGYDELASQIFSLRDERDAVAKQIAANTNLQQRVDEMVVFVKEHDVINEYNEVLVRRLIEKVTIFEKNIVVDFKSGVRVTVEI

SEQ ID NO: 6112 - protein, 517 aa, synthetic construct
MKTIHKLARPELPEASKLKVAAYARVSTSSNEQLASLQTQITHYENHIKNHEQWDYVGVYYDEGISGTKTVKRDGLKRLIKDAELGKIDLILTKSISRFSRNTVDCLNLVRQLTDIGVTIFFEKENINTGDMESELLLSILSSLAESESYSHSENLKWAIRNRMSKGKFKAYPPYGYKRKGYDFHIVAAEAKVVKQMFQWALDGISTGMIAKRLNDGKQFTKRGANWQATSVRSILKNEVYTGTLTMQQTFVDDQYKRRINKGELPMYQIKNNHEPIVSKEDYDRVQELIRRKAEAKGNTGDGKKYTKRYAFSGNIICDKCGSKFKRVHTYWKGNTKKVQWKCTGHLKNKDSCDALPITDEDLKVAYLTMLNKLIFGHKLVLEPFMKSLNKAGANQEGLEVLADEIDKIQEKLEVLASLTASSILSTKVSLEEQSKLQQERAVAQEKQRLIIESVNGKSTQQIELEALYKFARMAEMLTDWDEDLFKKFTNSITVYNRQEVGFELKCGLLLKERLPE

SEQ ID NO: 6113 - protein, 558 aa, synthetic construct
MTKLYSYIRFSSMRQSEGSSYERQIRMAKEIADRHGLELVNDYQDLGVSAFKGANSKTGALSRFLDEIGRSIPVGSWLFIENLDRLSRQDIISAQELFLSIIRRGITIVTGMDNKIYSIETVTANPMDLMFSILLFIRGNEESQTKRNRTNSSALLKIKAHQQNPQNPAVAIEEIGKNMWWTDTTSGRVLPHPVYFPVLQKIVKMRQEGHSAGSILDYLNEHHEPPAPTSNKRHGKWSRAMVSRLFTTKALIGIKTVRVDGVEYELQDYYPRVLSDSEFYFLRKNIIKKAWDYSHDKEKVIPLLSGIGVLRCVHCGATMVKQSAVNGKREQYRYSCDGRRSGRTDCPYPNWGFRAATLEGAVLQLLADKIWIAEDKANPIPEIQVKIDDISRKIDNLINLSAMTGATKELANQITDLNTQREALHEEIRLFEREMYSIDSQGWEKLAEFDLGDVQNEERLKVRMKIKGALHEIECSRLDSKKNLFVLVYLDGLRQRLVIENNRGLKKGQIIVDLKTINDRQILESAGMVLHPCIDMIIDKNWKAPEEIPGLLSEEFGI

SEQ ID NO: 6114 - protein, 547 aa, synthetic construct
MKLLATYIRWSTKEQDSGDSLRRQTNLIDAFYAKHKDDYYLLPAHRYVDKGKSGFHQQHKAQGSDFRRMFENVMSGAIPEGSLIVVENFDRFSRADIDTAIDDVRQILRKGVSILTLGDGELYDKSALTDPVKLIKHIIIAERAHQESLVKQKRIAQVWNHKTQLARELKKPMGKQAPGWLELSEDGSHYIVDEDKASLVNIIYDKRLSGMSMFAICKWLNEQGYPTINQRKVRISKTKKPDGNWSALSVKHILTSRSVLGYLPAKISTEDRKTVLREEIESFYPQIVTDSKFYAVQQLLEETGKGKTSSGEHWLYVNILKGLIRCKCGLVMTPTGIRKPVYQGTYRCNGNKESRCSYGTVSRKLLDTQLCSRLFSKLSQLHDEATDTAKLDELQRRLNTVDGELEKLTETLIQLPNITQIQEALRVKQEEKDELIVQLSREKARVKSVSSLDLSGLDMESVEGRTEAQIIIKRLVKEIVVSGNERLVDIYLHNGNMIRGFPLDGKDDHTLTLEEATDEMQSLDDMLIFGEPVTRIYPAGDMEEVDA

SEQ ID NO: 6115 - protein, 506 aa, synthetic construct
MRHAITYLRFSSAIQGAEGADSTRRQNDLFKQWLKKNSDAQVVASFSDEGLSGYKGKHLTGQFGDMLARIEAGEFPEGTILLVESIDRIGRLEHLETEALMNRILGNGIEIHTLQDGLIYTKDALADDLGISIIQRVKAYIAHQESKQKSFRVSQKWEQRAKLALAGKQRLTKMVPGWIDPETFKLNEHAETVRLIFKLLLDGESLHNIARHLQSNGIKSFSRRKDANGFSVHSVRTILRSETTIGTLPASQRNDRPAIPNYYEAAIDAATFNKAQEILDKNRTGRTPASDNPLTINIFKGLFRCQCGASVHPTGTKNKYAGVYRCNNNPDGRCDVPPLKRKPFDKWMIDNFLGMIDVGNDGEAEGKIASLQHEVEIVTARIKKATALLLEMDDITELKTQVRELNQKRTDIQTTIDTLKRKTSLSDKGLPQLKDIDLMTKAGRVECQLILSKHLKGLTLGKYSVTVTLQNDTEITIPTNPLPLNDGSPIFEIADKELLDIDAYQL

SEQ ID NO: 6116 - protein, 506 aa, synthetic construct
MRHVITYLRYSSAIQGAEGADSTRRQNDLFKQWLKKNSDAQVVASFNDEGLSGYKGKHLSGQFGDMLSRIESGEFSEGTILLVEAIDRIGRLEHLETEALMNRIIAHGIEIHTLQDGLIYTRDALSDDLGISIIQRVKSYIAHQESKQKSFRVSQKWEQRAKLALAGEQRLTKMVPGWIDPDTFKLNEHAETVRLIFKLLLSGESLHNIARHLQSNGIKSFSRRKDANGFSVHSVRTVLRSESVIGTLPASQRNDRPAIPNYYEAAIDAATFNKAQEILDKNRKGRTPASDNPLTINIFKGLFRCQCGASVHPTGTKNKYQGVYRCNNHLDGRCDVPPLKRKPFDRWMIDNFLGMIDVGNDGESERKIAALQHEVEIVTARIKKATALLLEMDDITELKTQVKGLNQKRTELQTTIDNMRRKASLTDKELPQLKDIDLTTKAGRVECQLILSKHLKGLTLGKDSVTVTLQNDTEITIPTNPLPLNDGSPIFEIADKELLDIDAYQL

SEQ ID NO: 6117 - protein, 547 aa, synthetic construct
MKLLVPYIRWSTKEQDSGDSLRRQTNLIDAFYSKHKNDYYLLPAHRYVDKGKSGFHQQHKAQGSDFRRMFENVMSGVIPEGSLIVVENFDRFSRADIDTAIDDVRQILRKGVSILTLGDGELYDKSALTDPVKLIKHIIIAERAHQESLVKQKRIAQVWNHKTQLARELKKPMGKQAPGWLELSEDGSHYIVDEDKASLVNIIYDKRLSGMSMFAICKWLNEQGYPTINQRKVRISKTKKPDGNWSALSVKHILTSRSVLGYLPAKISTEDRKTVLREEIEGFYPQIVTDSKFYAVQQLLEETGKGKTSSGDHWLYVNILKGLIRCKCGLVMTPTGIRKPVYQGTYRCNGNKESRCSYGTVSRKLLDTQLCSRLFSKLSQLHDEATDTAKLDELQRRLNTVDGELEKLTETLIQLPNITQIQEALRVKQEEKDELIVQLSREKARVKSVSSLDLSGLDMESVEGRTEAQIIIKRLVKEIVVSGNEKLVDIYLHNGNMIRGFPLDGKDDHTLTLEEATDEMQSLDDMLIFGEPVTRIYPAGDMEEVDA

SEQ ID NO: 6118 - protein, 590 aa, synthetic construct
MPKIWPYIRFSSEEQKKGDSLRRQQELIERFAARPEIVAEGAEIDTSLDLNDLGVSGYTGKNLLQGRFKDFLDAVDSGVVKPGDYLAVEALNRVTRLDPMESLPILLDLMKKGVKIAITANSQIYKQGGDITQLYIALGELQRGYAESEEKGRRVRQAWDKKKERAFQTGEIATSRLPLWLRAVKTNEKGLIVRTVEEIPERVAIVKEIYRLSDSNIGAIATARILTERGVPTFMRENGRKNPNYGDFWQPSYIKKILDSRAVLGHYQPMTWEKLPDNRRRRINHGPEIENYFPQIITPELFRRVQEKRRGRGKEGQGNKGKKFTNIFTKIAHCSKCGATASHVNKGSDPKKGGRYLVCYRARHGDCSYKAWRYDDIETTILKFLAEADIKSIISEENKADELINKKYEIDAEINDIQEMLDAYKADFKRLKGRVSDLDREIAIENEQTLKELKEKAKDLDQEIFKALEQKKADIEKDILDLRGLSNTEDANTVFEVRSKINERLKIIIEDIRIDFQDRTIEIDFKNGTKRSIHAKGVYGNIPPQATGEQREKDLQEIAAWFNLTDEEKAQKYKDANFDIVPLPVNCGID

SEQ ID NO: 6119 - protein, 547 aa, synthetic construct
MKLLVTYIRWSTKEQDSGDSLRRQTNLIDAFYAKHKDDYYLLPAHRYVDKGKSGFHQQHKNQGSDFRRMFENVMSGVIPEGSLIVVENFDRFSRADIDTAIDDVRQILRKGVSILTLGDGELYDKSALTDPVKLIKHIIIAERAHQESLVKQKRIAQVWNHKTQLARELKKPMGKQAPGWLELSDDGSHYIVDEDKASLVNIIYDKRLSGMSMFAICKWLNEQGYPTINQRKVRISKTKKPDGNWSALSVKHILTSRSVLGYLPAKISSEDRKTVLREEIEGFYPQIVTDSKFYAVQQLLEETGKGKTSSGDHWLYVNILKGLIRCKCGLVMTPTGIRKPVYQGTYRCNGNKESRCSYGTVSRKLLDTQLCSRLFSKLSQLHDEATDTAKLDELQRRLNTVDSELEKLTETLIQLPNITQIQEALRVKQGEKDELIVQLSREKARVKSVSSLDLSGLDMESVEGRTEAQIIIKRLVKEIVVSGNEKLVDIYLHNGNMIRGFPLDGKDDHTLTLEEATDEMQPLDDMLIFGEPVTRIYPAGDMEEVDA

SEQ ID NO: 6120 - protein, 507 aa, synthetic construct
MKRVISYIRFSSEKQAKGDSLRRQSKMVTDWLKAHPEYYLDQDLSFRDLGVSGFTGKHLKGGLGDFLTAIEKGLVKAGDTLLIESLDRLSRQAVDRASELLRNILRSGVDVVTLSDGEHYTSESLKDPLALIKSILIMQRAHEESLRKSERIQAAWNRKKELISEGIKISKRCPAWLKLNDDRKSFSVIPEKVETVKRCFQLRLEGKSIWEIVRTLNAEGHQTLNQYKAGKFGQTSVQDLLKNRSVIGYFTPKGCEEISSYYPSVIDETTFYKVQQLSHSRYGRKPVSDKPLSVNLFKGVIRCSECGHALIITGFSDTRNGIYRCPLRNENRCSAKGLSRKQTDGTLLTLLSRLDRFDSDMTNTIDMLRLHREHISSNIEKLVQLSLEIEDLNAITSKLKQLKGELSQVDADIEKETQRLKSIDVGCLSDCDLSTKAGRIEAQLIIKSAVKEVVLNTAKRRCKVTFHNGKVIDLPITENPSEDVTEAIQSLSEVTAKGLIDVDEVII

SEQ ID NO: 6121 - protein, 547 aa, synthetic construct
MKLLVTYIRWSTREQDSGDSLRRQTNLIDAFYSKHKEEYYLLPAHKYVDKGKSGFHQQHKNQGSDFRRMFDNVMSGAIPEGSLIVVENFDRFSRADIDTAIDDVRQILRKGVSILTLGDGELYDKSALTDPVKLIKHIIIAERAHQESLVKQKRIAQVWNHKTQLARELKKPMGKQAPGWLELSEDGSHYIVDEDKASLVNIIYDKRLSGMSMFAICKWLNEQGYPTINQRKVRISKTKKPDGNWSALSVKHILTSRSVLGYLPAKISTEDRKTVLREEIEGFYPQIVTDSKFYAVQQLLEETGKGKTSSGDHWLYVNILKGLIRCKCGLVMTPTGIRKPVYQGTYRCNGNKESRCSYGTVSRKLLDTQLCSRLFSKLSQLHDEATDTAKLDELQRRLNTVDSELEKLTETLIQLPNITQIQEALRVKQEEKDELIVQLSREKARVKSVSSLDLSGLDMESVEGRTEAQIIIKRLVKEIVVSGNEKLVDIYLHNGNMIRGFPLDGKDDHTLTLEEATDEMQSLDDMLIFGEPVTRIYPAGDMEEVDA

SEQ ID NO: 6122 - protein, 547 aa, synthetic construct
MKLLVPYIRWSTKEQDSGDSLRRQTNLIDAFYSKHKNDYYLLPAHRYVDKGKSGFHQQHKNQGSDFRRMFENVMSGVIPEGSLIVVENFDRFSRADIDTAIDDVRQILRKEVSILTLGDGELYDKSALTDPVKLIKHIIIAERAHQESLVKQKRIAQVWNHKTQLARELKKPMGKQAPGWLELSEDGSHYIVDEDKASLVNIIYDKRLSGMSMFAICKWLNEQGYPTINQRKVRISKTKKPDGNWSALSVKHILTSRSVLGYLPAKISSEDRKTVLREEIESFYPRIVTDSKFYAVQQLLEETGKGKTSSGEHWLYVNILKGLIRCKCGLVMTPTGIRKPVYQGTYRCNGNKESRCNYGTVSRKLLDTQLCSRLFSKLSQLHDEATDTAKLDELQRRLNTVDSELEKLTETLIQLPNITQIQEALRVKQEEKDELIVQLSREKARVKSVSSLDLSGLDMESVEGRTEAQIIIKRLVKEIVVSGNEKLVDIYLHNGNMIRGFPLDGKDDHTLTLEEATDEMQSLDDMLIFGEPVTRIYPAGDMEEVDA

SEQ ID NO: 6123 - protein, 547 aa, synthetic construct
MKLLVTYIRWSTKEQDSGDSLRRQTNLIDAFYSKHKNDYYLLPAHRYVDKGKSGFHQQHKNQGSDFRRMFENVMSGAIPEGSLIVVENFDRFSRADIDTAIDDVRQILRKGVSILTLGDGELYDKSALTDPVKLIKHIIIAERAHQESLVKQKRIAQVWNHKTQLARELKKPMGKQAPGWLELSEDGSHYIVDEDKASLVNIIYDKRLSGMSMFAICKWLNEQGYPTINQRKVRISKTKKPDGNWSALSVKHILTSRSVLGYLPAKISSEDRKTVLREEIEGFYPQIVTDSKFYAVQQLLEETGKGKTSSGEHWLYVNILKGLIRCKCGLVMTPTGIRKPVYQGTYRCNGNKESRCSYGTVSRKLLDTQLCSRLFSKLSQLHDEATDTAKLDELQRRLNTVDSELEKLTETLIQLPNITQIQEALRVKQGEKDELIVQLSREKARVKSVSSLNLSGLDMESVEGRTEAQIIIKRLVKEIVVSGNEKLVDIYLHNGNMIRGFPLDGKDDHTLTLEEATDEMQSLDDMLIFGEPVTRIYPAGDMEEVDA

SEQ ID NO: 6124 - protein, 506 aa, synthetic construct
MRSVITYLRFSSAIQGAEGADSTRRQNDLFKQWLKKNSDAQVVASFSDEGLSGYKGKHLTGQFGDMLARIESGEFPEGTLLLVEAIDRIGRLEHLETEALMNRIIAHGIEIHTLQDGLIYTRDALSDDLGISIIQRVKSYVAHQESKQKSFRVSQKWKQRAKLALAGEQRLTKMVPGWIDPDTFKCNEHAETVRLIFKLLLDGESLHNIARHLQSNDIKSFSRRKDANGFSVHSVRTVLRSESVIGTLPASQRNDRPAIPNYYEAAIDASTFNKAQEILDKNRKGRTPASDNPLTINIFKGLFRCQCGASVHPTGTKNKYAGVYRCNNNPDGRCDVPPLKRKPFDKWMIDNFLGMIDVGNDGESERKIAALQHEVEIVTARIKKATALLLEMDDITELKAQVKGLNQKRTEIQTTIDTLKRKTSLTDKELPQLKDIDLMTKAGRVECQLILSKHLKGLTLGKDSVIVTLQNDTEIIVPTDPLPLNDGTSIFEIAEKELLEIDAYQL

SEQ ID NO: 6125 - protein, 507 aa, synthetic construct
MKRVISYIRFSSEKQAKGDSLRRQSKMVTDWLKAHPEYYLDQDLSFRDLGVSGFTGKHLKGGLGDFLTAIEKGLVKAGDTLLIESLDRLSRQAVDRASELLRNILRSGVDVVTLSDGEHYTSESLKDPLALIKSILIMQRAHEESLRKAERIQAAWNRKKELISEGIKISKRCPAWLRLNDDRKSFSVIPDKVETVKRCFQLRLEGKSIWEIVRTLNAEGHQTLNQYKAGKFGQTSVQDLLKNRSVIGYFTPKGCEEISSYYPSVIDETTFYKVQQLSHSRYGRKPVSDKPLSVNLFKGVIRCSECGHALIITGFSDTRNGIYRCPLRNENRCSAKGLSRKQTDGTLLTLLSRLDRFDSDTTNVIDMLRLHREHISSNIEKLVQLSLEIEDLSAITIKLKQLKGELSQVDADIEKETQRLKSIDVGCLSDCDLTTKAGRIEAQLIIKSAVKEVVLNTAKRRCKVTFHNGKVIDLSITENPSEDVTEAIQSLSEVTERGLIDVDEVII

SEQ ID NO: 6126 - protein, 557 aa, synthetic construct
MTKLYSYIRFSSMRQSDGSSFERQIRMAKEIADKHGLELVNDYQDLGVSAFKGANSKTGALARFLDEIGRSVPVGSWLFIENLDRLSRQDIISAQELFLSIIRRGITIVTGMDNKIYSLDTVTANPMDLMFSILLFIRGNEESQTKRNRTNSSALLKIKAHQNNPQSPAVAIEEVGKNMWWTDTSSGYVLPHPIYFPIVQKIVQMKRDGHSTGDVLDYLNEHHEPPAPTSNKKHEHWSKAMVSRLFHTKALIGIKTVNVDGVEYELKDYYPRVMSDSDFYYLKQNVAKKAWSYGTTSEKVIPLLSGIGVLRCHHCGATMVKMSAANGKREQYRYCCDGRRSGRTDCINPNWGFRALYLEEAVLRLLADKIWITEDKTNPIPEIRVKIDEISRQIDNLINLSAMTGATKELAEQITSLNSQREALHEEIGRFETEMYSVDSQGWEKLAEFDLSDVQNMERLKVRMKIKGALREIECSKLDSKKNLFVLVYLDGLRQRIVIENARGAKSAKVYVDLKSINDRQILESNGMVLHPCIEMLTDPNWKPEEEQPGPLQEYGI

SEQ ID NO: 6127 - protein, 525 aa, synthetic construct
MGKVRIIPAHQPKGNSVHHQRSSQPFEKLRVAAYCRVSTDYDEQASSYETQVAHYKELIQKEPTWEFAGIYADDGISGTNTKKREQFNKMIAACKAGKIDLIVTKSISRLSRNTIDCLKYIRDLKAINVAIFFEKENINTMDAQGEVLITIMASLAQQESESLSQNVKMGIQYRYQQGKVFVNHNHFLGYTKDDQGNLVIEPEEAKVIKRIFYSYLNGMTMKQIADSLKADGILTGGKTKNWRSSGVAKILKNEKYMGDALLQKTYTVDFLNKKRVKNEGIMPQYYVENDHPAIIPKSVFMQVQQIIKQRRNGITTKNGKHRRLNGKYCFSQKIFCGKCGDILQRNMWYRPEKVAVWRCASRIRRSRTGRRCMIRNVKEPLLKEATVEAFNQLIEGHELASKQIKANIMKVIKSSKGPTLDQLDKQLEEVQMKLIQAANQHQDCDALTQQIMDLRKQKEKVQSRETDQQAKLHNLDEINKLVELHKYGLVDFDEQLVRRLVEKITIFQRYMEFTFKDGEVIRVNM

SEQ ID NO: 6128 - protein, 553 aa, synthetic construct
MSTITKIQSYHRDAKQLRVAAYCRVSTDHVEQLESLENQREHYQKYISNQPNWQLAKIYYDEGISGTKLTKRDALKELLADCHNHRIDLVITKSISHLSRNTTDCLQIVRELQQLNIPIIFEKEHINTGAMASELFLSILSSIAQDESHSTAGNLRWSIRQRFASGEFRVSSAPYGYSIEDGNLVIDSVEAGVVREIFQQFLSGMSASQIAKGLNHKHIPTKRSGQWRSNTIINILRNINYTGDMLCQKTYRDDQYHRHFNQGELPQYLIEEHHPSLVNHETFNRAQVLLKEAAQKRHIETGSHKYQHHYLFSGKIICGNCGTTFKRQTRPHKIYWACQKHLRSAKQCPTKAVSEAGLEAAFCNMMNKLVHSRKFLLQPLLEALKEEANANSDGQLISLNKQIKSNDHKAETLTQLMQTGLLDRAIYINQTTKLEQDTYQCQEKIKQLNGKNTDSANNFEDVRTLLNWCQQGKQLTEFDEGIFQEFVQQIVVNSSNKATFILKCGLALPEKLNKAATIDEHFFRSIIKQRYNDPIKQAEYLYSIIESEGDLIG

SEQ ID NO: 6129 - protein, 559 aa, synthetic construct
MKTKLYSYIRFSSMRQNDGSSYERQIRMAREIAAKYDLELVNDYQDLGVSAFKGANSKTGALSRFLDAIGRSVPVGSWLFIENLDRLSRADIVSAQELFLSIIRRGITIVTGMDNKIYSLDTVTANPMDLMFSILLFIRGNEESQTKRNRTNSSALIKIKAHQENPQNPAVAIEEVGKNMWWTDTTSGYVLPHPTYFPVVQEIVELRKNGRSTAEILDHLNETYAPPPAVSNKKHSKWSRAMVERLFHTRALIGIKEVSVDGVNYELKDCYPRVIDDATFYHLKKNIGARAWNFGDKEEVKPIPLLSGIGLLKCDHCGCAMVKVKGTNKRSDQYRYTCDATRSRRLDCEHPNWSFRGDQLEKAVLQLLADKIWIAEDKANPVPALKVQVDEISRKIDNLIALSAMTGATKELADQITTLNSERETLYNQIKMAEEEMYSVDSQGWEKLAEFDLEDVYNEERLKVRFKIKQALKRIGCSRIDRNKNLFVLEYIDGKTQRVVIENSRGTRKGRIFIDLKTINDRQILESNGLVLHPCLDMLTDKNWKPEEEIPGPLQEFGI

SEQ ID NO: 6130 - protein, 506 aa, synthetic construct
MRHVITYLRYSSAIQGAEGADSTRRQNDLFKQWLKKNSDAQVVASFNDEGLSGYKGKHLSGQFGDMLSRIESGEFPEGTILLVEAIDRIGRLEHLETEALMNRIIAHGIEIHTLQDGLIYTRDALSDDLGISIIQRVKSYIAHQESKQKSFRVSQKWEQRAKLALAGEQRLTKMVPGWIDPGTFKVNEHAETVRLIFKLLLDGESLHNIARHLQANNISSFSRRKDANGFSVHSVRTILRSETTIGTLPASQRNDRPAIPNYYEAAIDASTFNKAQEILDKNRKGRTPASDNPLTINIFKGLFRCQCGASVHPTGTKNKYQGVYRCNSHLDGRCDVQPLKRKPFDRWMIDNFLGMIDVGNDGESERKIAALQHEVEIVTARIKKATALLLEMDDIDELKIQLKELNQKRTELQTTIDNMRRKASLTDKELPQLKDINLTTKAGRVECQLILSKHLKGLTLGKDTVTVTLQNDTEITIPTDPLPLNDGTSIFEIAEKNLLNIDTFQL

SEQ ID NO: 6131 - protein, 507 aa, synthetic construct
MKRVISYIRFSSEKQAKGDSLRRQSKMVTDWLKAHPEYYLDESLTFRDLGVSGFTGKHLKGGLGDFLTAIEKGLVKAGDTLLIESLDRLSRQDIDIASELLRNILRSGVDVVTLSDGEHYTRESLRDPLALIKSILIMQRAHEESLRKSERIQAAWDAKKEAAKAGIKVSKRCPAWLKLNDDRKTFSVIPEKVETVKRCFQLRLEGKSIWEIVRTLNDEGHQSMSQYKPGSFGQSSVQDLLKNRSVIGYFTPKGCEEISGYYPAIIDETTFYKVQQLSHSRYGKRSVSDKPLSVNLFKGVIRCSECGHALIITGFSDTRSGIYRCPLRNENRCSAKGLSRKQTDGTLLTLLSRLDRFDSDTTNTIDTLKLHREHISSNIEKLVQLSLEIEDLSAITSKLKQLKNELSQVDADIEKETQRLKSIDVGCLSDCDLTTKAGRIEAQLIIKSAVKEVVLNTAKRRCKVTFHNGKSITLPITENPSEDVTEAIQSLSEVTERGLIDVDVVEI

SEQ ID NO: 6132 - protein, 507 aa, synthetic construct
MKRVISYIRFSSERQAKGDSLRRQSKMVNDWLKAHPEYYLDQDLSFRDLGVSGFTGKHLKGGLGDFLTAIEKGLVKAGDTLLIESLDRLSRQDVDQASELLRNILRSGVDVVTLSDGEHYTRESLKDPLALIKSILIMQRAHEESLRKAERIQAAWNRKKELISEGIKVSRRCPAWLRLNDDRKSFSVIPEKVETVKRCFQLRLEGKSIWEIVRTLNDEGHQTLNQYKAGKFGQTSVQDLLKNRSVIGYFTPKGCCEIAGYYPSIIPESDFYKVQQLSYARGGRKPASGKPLSVNLFKGVIRCSECGHALIITGFSDTRNGIYRCPLRNENRCNAKGLSRKQTDGTLLALLSRIDRFDSDMTNTIDTLKLHREHISSNIEKLVQLSLEIEDLSAITSKLKQLKGELSQVDADIEKETQRLKSIDVGCLSDCDLTTKAGRIEAQLIIKSAVKEVVLNTAKRRCKVTFHNGKVIDLPITEDPSEDVTEAIQSLSEVTERGLIDVDEVII

SEQ ID NO: 6133 - protein, 507 aa, synthetic construct
MKRAISYIRFSSEKQSRGDSLRRQSKMVNDWLKAHPEYYLDQDLSFRDLGVSGFTGKHLKGGLGDFLTAIEKGLVKAGDTLLIESLDRLSRQDVDQASELLRNILRSGVDVVTLSDGEHYTKESLRDPLSLIKSILIMQRAHEESLRKAERIQAAWDAKKEAAKAGIKISRRCPAWLKLNDDRKSFSVIPEKVETVKRCFQLRLEGKSIWEIVRTLNAEGHQTLNQYKAGKFGQTSVQDLLKNRSVIGYFTPKGCEEITGYYPAIIDETTFYKVQQLSYARYGRKPASDKPMAVNLFKGVIRCSECGHALIITGFSDTRNGIYRCPLRNENRCSAKGLSRKQADGTLLTLLSRLDRFDSDTTNTVDTLKLHREHISSNIEKLVQLSLEIEDLSAITIKLKQLKGELSQVDADIEKETQRLKSIDVGCLSDCDLTTKAGRIEAQLIIKSAVKEVVLNTAKRRCKVTFHNGKAITLPITENPSEDVTEAIQSLSEVTERGLIDVDEVII

SEQ ID NO: 6134 - protein, 499 aa, synthetic construct
MDRTCIYLRKSRADEEIEKTLGEGETLAKHRKALMKYAKEKQLSIVEIKEEIVSGDSLFHRPKMLELLKEVENNEYTGVLVMDIDRLGRGGMKDQGIILDAFKESNTKIITPTKTYDLNNDLDEEITEFKTFFSRRELKVINKRMQGGRIRSVEDGNYIATNPPLGYDIEYVNKNRILKINDSESKIIKIIFDRYINGDGAGTIASYLNSLGYKTKINKNFTASSVLFILKNPIYIGKITWKKKELKKSKSPNKVRDCKTRNKNEWIISEGKHDSIIDKNTFNRANELLQEKYHVPYRQNNPPVNPFAGILICGKCKHKMIMRKARGKKRIMCIHKCGNISMNFDKFEDLAFKSIKEFLKNYELKIETSITDNKKIDYSRELILLKKELTLLNSQKMNIFDSYERKIYSEEMFIERSNNISSRISSIQFEIDKLVDLIAEESLKEKSDNLLNFKNVILSYKNTEDIKLKNELLKSIIIKIELINTPDALVIDVYPRLLK

SEQ ID NO: 6135 - protein, 534 aa, synthetic construct
MKAAIYSRKSKFTGKGESIENQIEMCKKYASDNEYDEIFIYEDEGFSGGNINRPEFKQMMKDAKSHKFDVIICYRLDRISRNVSDFSTLIDKLKLLNIGFISIKEQFDTTSPMGTAMMFISSVFAQLERETIAERIKDNMYELAKTGRWLGGTPPFGFISEQNLYSDANGKQKKMFQLAPVESECELIKYMYEQYLALGSLGKLQKHLSIKEIKTRNNATWDIKALQLILRNPVYVKSDEVVLSYLESKGAKVFGEVNGNGILSYNKKDSKDKYKDISEWILSVAKHKGLIDSSLWLLVQKKLDKNKSLAPRLVSNDSSGLLSHVLYCKKCGGKMIQKKGHTSVKTKEPFRYYVCLNKMNFKSCDSKNIRADILEKHVAHKIIDETSDAGSLIKAIDDYKNKLQLDSSKSTNLNSIKKQIALKQTQINNLMENISKNPKLFDLFNSKIEELNSELKSLKFKKFEAESVKENTSNALKEIDASTQMLLNFKKLWIYADFSTKKLLIENIVDSIYYNANDKTADVKLICFKKKGAL

SEQ ID NO: 6136 - protein, 533 aa, synthetic construct
MIKIAIYSRKSVFTGKGESIENQIELCKNYCNTYVNSGNNLEYIIYEDEGFSGKNTNRPEFQHMIDDIKKKKIDTLICYRLDRISRNVADFSSTLELLQKYNVNFISIKERFDTSTPLGRAMIYIASVFAQLERETIAERVRDNMIQLAKSGRWLGGNIPYGFNIARKTYISDFKEKEFSILSPNKKELETVNFVYSYYIKTHSIRQVTRLLNVNSIIGKNGGSFDLAQIRRMLRNPLYVISDDKSHEYLIKKGLNVFGSPNGNGYITYNKSNQKNISADSNQWIVAVSNHKGIITSDNWLKVQHQLDNNKSKMPRIGTGKNHSLFSGILKCKKCGSNMIVKFSGKNKNNIPYEYYVCSGKQNKYLNKCTTKNIRVDKLDKILTRKLKIHDKTALMKTLRDSIDNICCDFKNNQISSIEYEIHENKVSMDNLIKQLTKSASSTVSDRLMNEINLLDKNIVRLKKHLETIELEQSHDKKTNIDIKNIINVLNSFSDTIEYIDDTAQKRFLIQTLIKSAVWDSDNNNVEIIFNTH

SEQ ID NO: 6137 - protein, 538 aa, synthetic construct
MIKVAIYSRKSRETETGDSIENQIILCKEYCNRNYLGEEIEYIIYEDEGFSGKNTDRPRFQQLMKDIKSKKINMLICYRLDRISRSVADFSSTLEFLQLNNCDFISIKEQFDTSTPMGRAMIYIASVFAQLERETIAERVRDNMLQMAKKGQWLGGNTPFGFESKRIKYLDESLKERTMCTISPVNSDLDIIKRIYNIYIETESTTKTAKRLHTEGVTKNNTIMQSITITRILRSAIYVKSSEKTHEYLRKKSDNIYGEANGNGYLTYAKTTNTLKRSRNNEDKWIYAVSKHKGVIDDDTWLKVQRILDRNKNKDFKRTGTGNNPALLSGIFKCKKCGSNMIVRRTGEYYYYICSSKVHKIGSSCNCKNVRVDQLDNNVISQLKNYSNSLLIEELSNSVAKFESIESNSSNSDNLKKELNSKVDMVNNLIKRISLAPSDDIAEMIMNQISDINKEIKSLKSKLDNIDNIKIKDNIDKQNVLLFIDSLKNFSKNIELFEDPIKRRSLIQTVVKKIIWNDDEYVAEIELLEEVSDEYKKK

SEQ ID NO: 6138 - protein, 506 aa, synthetic construct
MRHAITYLRFSSAIQGAEGADSTRRQNDLFKQWLKKNSDAQVVASFSDEGLSGYKGKHLTGQFGDMLARIEAGEFPEGTILLVESIDRIGRLEHLETEALMNRILGNGIEIHTLQDGLIYTKDALADDLGISIIQRVKAYIAHQESKQKSFRVSQKWEQRAKLALAGKQRLTKMVPGWIDPETFKLNEHAETVRLIFKLLLDGESLHNIARHLQSNGIKSFSRRKDANGFSVHSVRTILRSETTIGTLPASQRNDRPAIPNYYEAAIDAATFNKAQEILDKNRTGRTPASDNPLTINIFKGLFRCQCGASVHPTGTKNKYAGVYRCNNNPDGRCDVPPLKRKPFDKWMIDNFLGMIDVGNDGEAEGKIASLQHEVEIVTARIKKATALLLEMDDITELKTQVRELNQKRTDIQTTIDTLKRKTSLSDKGLPQLKDIDLMTKAGRVECQLILSKHLKGLTLGKDSVTVTLQNDTEITIPTNPLPLNDGSPIFEIADKELLDIDAYQL

SEQ ID NO: 6139 - protein, 506 aa, synthetic construct
MRSVITYLRFSSATQGAEGADSTRRQNELFKQWLRKNSDAQVVASFNDEGLSGYKGKHLSGQFGDMLSRIESGEFPEGTILLVEAIDRIGRLEHLETEALMNRIIAHGIEIHTLQDGLIYTRDALSDDLGISIIQRVKSYIAHQESKQKSFRVSQKWEQRAKLALAGEQRLTKMVPGWIDPDTFKLNEHAETVRLIFKLLLSGESLHNIARHLQSNGIKSFSRRKDANGFSVHSVRTVLRSESVIGTLPASQRNDRPAIPNYYEAAIDAATFNKAQEILDKNRKGRTPASDNPLTINIFKGLFRCQCGASVHPTGTKNKYAGVYRCNNHLDGRCDVPPLKRKPFDRWMIDNFLGMIDVGNDGESERKIAALQHEVEIVTARIKKATALLLEMDDIDELKIQLKELNQKRTELQTTIDNMRRKASLTDKELPQLKDIDLTTKAGRVECQLILSKHLKGLTLGKDSVTVTLQNDTEITIPTNPLPLNDGSPIFEIADKELLDIDAYQL

SEQ ID NO: 6140 - protein, 536 aa, synthetic construct
MLRQTNQQPITALYPRLSHEDELQGESNSISNQKRILETYAKQNGFSNLRWYTDDGYSGANFQRPGFQAMLADIEAGKVGTVIVKDMSRLGRNYLQVGMYTEMIFPQKGVRFIAINDGVDSAQGDNDFAPLRNIFNEWLVRDTSKKIKAVKRSKGMSGKPITSKPVYGYLMDEDENFIIDEEAAPVVKQIYNLCLAGNGPTKIARMLTEQQIPTPGTLEYRRTGSTRRYHPGYECKWATNTVAHLLENREYTGCLVNFKTEKLSYKVKHSVENPPEKQVIFENHHEPIIDTQTWERVQELRKQRKRPNRYDEVGLFSGILFCADCGSVMYQQRYQTDKRKQDCYICGSYKKRTHDCTAHFIRTDLLTAGVLSNLRKVTSYAAKHEARFMKLLIEQNEDGGKRRNAAKKKELEAAEKRIAELSAIFKRLYEDSVTGRISDERFTELSADYEAEQRELKERAAAIQAELSKAQEATVNAEKFMNVVRRHTSFEELTPTLLREFVEKIVVHECSYDENKTRRQDIEIYYSFVGKVDLPE

SEQ ID NO: 6141 - protein, 506 aa, synthetic construct
MRSVITYLRFSSAIQGAEGADSTRRQNDLFKQWLKKNSDAQVVASFSDEGLSGYKGKHLSGQFGDMLSRIESGEFSEGTILLVEAIDRIGRLEHLETEALMNRIIAHGIEIHTLQDGLIYTRDALSDDLGISIIQRVKSYIAHQESKQKSFRVSQKWGQRAKLALAGKQRLTKMVPGWIDPETFEVNEHAETVRLIFKLLLDGESLHNIARHLQANNISSFSRRKDANGFSVHSVRTILRSETTIGTLPASQRNDRPAIPNYYEAAIDAATFNKAQEILDKNRKGRTPASDNPLTINIFKGLFRCQCGASVHPTGTKNKYQGVYRCNNHLDGRCDVPPLKRKPFDRWMIDNFLGMIDVGNDGESERKIAALQHEVEIVTSRIKKATALLLEMDDITELKAQVKELNQKRTELQTTINTMKRKTSLSDKGLPQLKDIDLMTKAGRVECQLILSKHLKGLTLGKDSVTVTLQNDTEITIPTNPLPLNDGSPIFEIADKELLDVDAYQL

SEQ ID NO: 6142 - protein, 507 aa, synthetic construct
MKRVISYIRFSSEKQSRGDSLRRQSKMVTDWLKAHPEYHLDQDLSFRDLGVSGFTGKHLKGGLGDFLTAIKKGLVKAGDTLLIESLDRLSRQDIDIASELLRNILRSGVDVVTLSDGEHYTRESLKDPLALIKSILIMQRAHEESLRKAERIQAAWDAKKEAAKAGIKISRRCPAWLKLNDDRKSFSVIPEKVETVKRCFQLRLEGKSIWEIVRTLNAEGHQTLNQYKAGKFGQTSVQDLLKNRSVIGYFTPKGCEEISGYYPAIIDETTFYKVQQLSYARYGRKPASDKPLSVNLFKGVIRCSECGHALIITGFSDTRSGIYRCPLRNENRCSAKGLSRKQTDGTLLTLLSRLDRFDSDTTNIIDMLRLHREHISSNIEKLVQLSLEIEDLNAITSKLKQLKGELSQVDADIEKETQRLKSIDVGCLSDCDLTTKAGRIEAQLIIKSAVKEVVLNTAKRRCKVTFHNGRAITLPITENPSEDVTEAIQSLSEVTERGLIDVDEVII

SEQ ID NO: 6143 - protein, 506 aa, synthetic construct
MRTVITYLRFSSATQGAEGADSTRRQNDLFKQWLKKNSDAQVVASFSDEGLSGYKGKHLTGQFGDMLARIESGEFPEGTLLLVEAIDRIGRLEHLETESLMNRIIAHGIEIHTLQDGLIYTRDALSDDLGISIIQRVKSYIAHQESKQKSFRVSQKWEQRAKLALAGEQRLTKMVPGWIDPDTFKLNEHAETVRLIFKLLLDGESLHNIARHLQSNDIKSFSRRKDANGFSVHSVRTVLRSVSAIGTLPASQRNDRPAIPNYYEAAIDAATFNKAQEILDKNRTGRTPASDNPLTINIFKGLFRCQCGASVHPTGTKNKYAGVYRCNNNPDGRCDVPPLKRKPFDKWMIDNFLGMIDVGNDGEAEGKIASLQHEVEIVTARIKKATALLLEMDDITELKTQVRELNQKRTDIQTTIDTLKRKTSLSDKGLPQLKDIDLMTKAGRVECQLILSKHLKGLTLGKDSVTVTLQNDTEITIPTNPLPLNDGSPIFEIADKELLDIDAYQL

SEQ ID NO: 6144 - protein, 547 aa, synthetic construct
MKLLVTYIRWSTKEQDSGDSLRRQTNLIDAFYSKHKNDYYLLPAHRYVDKGKSGFHQQHKNQGSDFRRMFENVMSGAIPEGSLIVVENFDRFSRADIDTAIDDVRQILRKGVSILTLGDGELYDKSALTDPVKLIKHIIIAERAHQESLVKQKRIAQVWNHKTQLARELKKPMGKQAPGWLELSEDGSHYIVDEDKASLVNIIYDKRLSGMSMFAICKWLNEQGYPTINQRKVRISKTKKPDGNWSALSVKHILTSRSVLGYLPAKISTEDRKTVLREEIESFYPQIVTDSKFYAVQQLLEETGKGKTSSGEHWLYVNILKGLIRCKCGLVMTPTGIRKPVYQGTYRCNGNKESRCSYGTVSRKLLDTQLCSRLFSKLSQLHDEATDTAKLDELQRRLNTVDSELEKLTETLIQLPNITQIQEALRVKQEEKDELIAQLSREKARVKSVSSLDLSGLDMESVEGRTEAQIIIKRLVKEIVVSGNEKLVDIYLHNGNMIRGFPLDGKDDHTLTLEEATDEMQSLDDMLIFGEPVTRIYPAGDMEEVDA

SEQ ID NO: 6145 - protein, 507 aa, synthetic construct
MKRVISYIRFSSEKQAKGDSLRRQSKMVTDWLKAHPEYYLDQDLSFRDLGVSGFTGKHLKGGLGDFLTAIEKGLVKAGDTLLIESLDRLSRQDIDIASELLRNILRSGVDVVTLSDGEHYTRESLRDPLALIKSILIMQRAHEESLRKAERIQAAWDAKKEAAKAGIKVSKRCPAWLKLNDDRKSFSVIPEKVETVKRCFQLRLEGKSIWEIVRTLNDEGHQSMSQYKPGSFGQSSVQDLLKNRSVIGYFTPKGCEEIAGYYPAIIDETTFYKVQQLSHSRYGKRSVSDKPLSVNLFKGVIRCSECGHALIITGFSDTRNGIYRCPLRNENRCSAKGLSRKQTDGTLLALLSRLDRFDSDTTNTIDTLKLHREHISSNIEKLVQLSLEIEDLSAITSKLRQLKGELSQVDADIEKETQRLKSIDVGCLSDCDLTTKAGRIEAQLIIKSAVKEVVLNTAKRRCKVTFHNGKLIDLPITETPSDNVTEAIQSLSEVTERGLIDVDEVII

SEQ ID NO: 6146 - protein, 514 aa, synthetic construct
MKKVYSYIRFSSTKQAFGDSHRRQSKAIQDWLANHPDHILDESLSFEDLGRSAFHGDHLKEGGALRAFLEAVKQGLIPSDSVLLVESLDRVSRQSISHAQETIRGILEQGITVVTLSDGETYNRQSLDDSLALIRMIILQERSHNESVIKSDRIKKAWSHKRQQFEQDGTKITGNCPGWLKLNSDKKSFSLIPHHIETIHRIFDEKLSGKSLHAIARDLNLENIPTITNKRVDTGWTPTRVRDLLLKESLIGVAYGVSDYFPPAISKEKFHAVQMIRGQGKGKKPTSRQPSSIDILKGICKCAECGSTLRQRNTKKTPEGRYPRGYLECRNRQLRRCNSKAFNRSLIEDILIQKVFPTLQYLSLKSNGDNISVTTLKADITSLEKGINNLISLAEKGLGDLDTLAQRITNNRVELESKKKDLRQAEAILSLRSDNDIQDSDRKTVEGRIKLQLAIKSFVKEIIFDYDKQEITIRLLNGKSFSGISVAREDKDFDHSSMFEVLQKSLLDVDGVCL

SEQ ID NO: 6147 - protein, 506 aa, synthetic construct
MRSVITYLRYSSAIQGAEGADSTRRQNDLFRQWLKKNIDAQVVASFSDEGLSGYKGKHLSGQFGDMLSRIESGEFPEGTILLVESIDRIGRLEHLETEALMNRILGNGLEIHTLQDGLIYTKDALADDLGISIIQRVKAYIAHQESKQKSFRVSQKWGQRAKLALAGEQRLTKMVPGWIDPETFKLNEHAETVRLIFKLLLDGESLHNIARHLQSNGIKSFSRRKDANGFSVHSVRTILRSETTIGTLPASQRNDRPAIPNYYEAAIDASTFNKAQEILDKNRTGRTPASDNPLTINIFKGLFRCQCGASVHPTGTKNKYAGVYRCNNHLDGRCDVPPLKRKPFDRWMIDNFLGMIDVGNDGEAEGKIASLQHEVEIVTARIKKATALLLEMDDIDELKIQLKELNQRRTELQTTIDSMRRKTSLSDKGLPQLKDIDLMTKAGRVECQLILSKHLKGLTLGKDSVTVTLQNDTEITIPTNPLPLNDGSPIFEIADKELLDVDIYRL

SEQ ID NO: 6148 - protein, 506 aa, synthetic construct
MRTVITYLRFSSATQGAEGADSTRRQNELFKQWLRKNSDAQVVASFSDEGLSGYKGKHLTGQFGDMLARIEAGEFPAGAILLVESIDRIGRLEHLETEALMNRIIAHGIEIHTLQDGLIYTRDALSDDLGISIIQRVKSYLAHQESKQKSFRVSEKWKQRAKLALAGEQHLTRNVPGWIDPDTFKCNEHAETVRLIFKLLLDGESLHNIARHLQSNDIKSFSRRKDANGFSVHSVRTVLRSESVIGTLPASQRNDRPAIPNYYEAAIDASTFNKAQEILDKNRKGRTPASDNPLTINIFKGLFRCQCGASVHPTGTKNKYQGVYRCNSHLDGRCDVPPLKRKPFDRWMIDNFLGMIDVGNDGEAEKEIASLQHEVETVTARIKKATALLLEMDDIDELKIQIKELNQRRTELQTTIDSMRRKASLTDKELPQLKDIDLTTKAGRVECQLILSKHLKGLTLGKGSVTITLQNDTEITIPTNPLPLNDGSPIFEIADKELLDIDAYQL

SEQ ID NO: 6149 - protein, 547 aa, synthetic construct
MKLLVTYIRWSTKEQDSGDSLRRQTNLIDAFYSKHKNDYYLLPAHRYVDKGKSGFHQQHKNQGSDFRRMFENVMSGAIPEGSLIVVENFDRFSRADIDTAIDDVRQILRKGVSILTLGDGELYDKSALTDPVKLIKHIIIAERAHQESLVKQKRIAQVWNHKTQLARELKKPMGKQAPGWLELSDDGSHYIVDEDKASLVNIIYDKRLSGMSMFAICKWLNEQGYPTINQRKVRISKTKKPDGNWSALSVKHILTSRSVLGYLPAKISTEDRKTVLREEIEGFYPQIVTDSKFYAVQQLLEETGKGKTSSGEHWLYVNILKGLIRCKCGLVMTPTGIRKPVYQGTYRCNGNKESRCSYGTVSRKLLDTQLCSRLFSKLSQLHDEATDTAKLDELQRRLNTVDGELEKLTETLIQLPNITQIQEALRVKQEEKDELIVQLSREKARVKSVSSLDLSGLDMESVEGRTEAQIIIKRLVKEIVVSGNEKLVDIYLHNGNMIRGFPLDGKDDHTLTLEEATDEMQSLDDMLIFGEPVTRIYPAGDMEEVDA

SEQ ID NO: 6150 - protein, 507 aa, synthetic construct
MKRVISYIRFSSEKQAKGDSLRRQSKMVTDWLKAHPEYYLDQDLSFRDLGVSGFTGKHLKGGLGDFLTAIEKGLVKAGDTLLIESLDRLSRQNVDRASELLRNILRSGVDVVTLSDGEHYTRESLKDPLALIKSILIMQRSHEESLRKSERIQAAWNRKKELISEGIKISKRCPAWLRLNDDRKTFSVIPEKVETVKRCFQLRLEGKSIWEIVRTMNAEGHQTLNQYKAGSFGQTSVQDLLKNRSVIGYFTPKGREEISGYYPAIIDETTFYKVQQLSYARYGRKPASDKPLSVNLFKGVIRCSECGHALIITGFSDTRSGIYRCPLRNENRCSAKGLSRKQTDGTLLTLLSRLDRFDSDTTNIIDMLRLHREHISNNIEKLVQLSLEIEDLSAITIKLKQLKGELSQVDADIEKETQRLKSIDVGCLSDCDLTTKAGRIEAQLIIKSAVKEVVLNTAKRRCKVTFHNSKSITLPITENPSEDVTEAIQSLSEVTERGLIDVDEVII

SEQ ID NO: 6151 - protein, 547 aa, synthetic construct
MKLLVTYIRWSTREQDSGDSLRRQTNLIDAFYAKHKDDYYLLPAHRYVDKGKSGFHQQHKAQGSDFRRMFENVMSGAIPEGSLIVVENFDRFSRADIDTAIDDVRQILRKGVSILTLGDGELYDKSALTDPVKLIKHIIIAERAHQESLVKQKRIAQVWNHKTQLARELKKPMGKQAPGWLELSEDGSHYIVDEDKASLVNIIYDKRLSGMSMFAICKWLNEQGYPTINQRKVRISKTKKPDGNWSALSVKHILTSRSVLGYLPAKISTEDRKTVLREEIEGFYPQIVTDSKFYAVQQLLEETGKGKTSSGDHWLYVNILKGLIRCKCGLVMTPTGIRKPVYQGTYRCNGNKESRCSYGTVSRKLLDTQLCSRLFSKLSQLHDEATDTAKLDELQRRLNTVDSELEKLTETLIQLPNITQIQEALRVKQEEKDELIVQLSREKARVKSVSSLDLSGLDMESVEGRTEAQIIIKRLVKEIVVSGNERLVDIYLHNGNMIRGFPLDGKDDHTLTLEEATDEMQSLDDMLIFGEPVTRIYPAGDMEEVDA

SEQ ID NO: 6152 - protein, 547 aa, synthetic construct
MKLLATYIRWSTREQDSGDSLRRQTNLIDAFYSKHKNDYYLLPAHRYVDKGKSGFHQQHKAQGSDFRRMFENVMSGAIPEGSLIVVENFDRFSRADIDTAIDDVRQILRKGVSILTLGDGELYDKSALTDPVKLIKHIIIAERAHQESLVKQKRIAQVWNHKTQLARELKKPMGKQAPGWLELSEDGSHYIVDEDKASLVNIIYDKRLSGMSMFAICKWLNEQGYPTINQRKVRISKTKKPDGNWSALSVKHILTSRSVLGYLPAKISSEDRKTVLREEIEGFYPQIVTDSKFYAVQQLLEETGKGKTSSGEHWLYVNILKGLIRCKCGLVMTPTGIRKPVYQGTYRCNGNKESRCSYGTVSRKLLDTQLCSRLFSKLSQLHDEATDTAKLDELQRRLNTVDSELEKLTETLIQLPNITQIQEALRVKQEEKDELIVQLSREKARVKSVSSLDLSGLDMESVEGRTEAQIIIKRLVKEIVVSGNEKLVDIYLHNGNMIRGFPLDGKDDHTLTLEEATDEMQPLDDMLIFGEPVTRIYPAGDMEEVDA

SEQ ID NO: 6153 - protein, 507 aa, synthetic construct
MKRVISYIRFSSEKQSRGDSLRRQSKMVTDWLKAHPEYYLDQDLSFRDLGVSGFTGKHLKGGLGDFLTAIEKGLVKAGDTLLIESLDRLSRQAVDRASELLRNILRSGVDVVTLSDGEHYTSESLKDPLALIKSILIMQRAHEESLRKSERIQAAWNRKKELISEGIKISKRCPAWLKLNDDRKSFSVIPDKVETVKRCFQLRLEGKSIWEIVRTLNAEGHRSMNQYKPGKFGQTSVQDLLKNRSVIGYFTPKGCEEISGYYPAIIDETTFYKVQQLSYARYGRKPASDKPMAVNLFKGVIRCSECGHALIITGFSDTRNGIYRCPLRNENRCSAKGLSRKQTDGTLLALLSRLDRFDSDTTNTIDTLKLHREHISSNIEKLVQLSLEIEDLSAITSKLKQLKGELSQVDADIEKETQRLKSIDTGSLSDCDLSTKAGRIEAQLIIKSAVKEVVLNTAKRRCKVTFHNGRAITLPITENPSEDVTEAIQSLSEVTERGLIDVDEVII

SEQ ID NO: 6154 - protein, 559 aa, synthetic construct
MKTKLYSYIRFSSMRQSDGSSYERQIRMAREIAAKYDLELVNDYQDLGVSAFKGANSKTGALSRFLDAIGRSVPVGSWLFIENLDRLSRADIVSAQELFLSIIRRGITIVTGMDNKIYSLDTVTANPMDLMFSILLFIRGNEESQTKRNRTNSSALIKIKAHQENPQNPAVAIEEVGKNMWWTDTTSGYVLPHPVYFPVVQEIVELRKNGRSTAEILDHLNETYAPPPAVSNKKHSKWSRAMVERLFHTRALIGIKEISVDGVNYELKDYYPRVIDDPTFYHLKKNIGARAWNFGDKEEVKPIPLLSGIGLLKCDHCGCAMVKVKGTNKRSDQYRYTCDATRSRRLDCEHPNWSFRGDQLEKAVLQLLADKIWIAEDKANPVPALKVQVDEISRKIDNLIALSAMTGATKELADQITTLNSERETLYNQIKMAEEEMYSVDSQGWEKLAEFDLEDVYNEERLKVRFKIKQALKRIGCSRIDRNKNLFVLEYIDGKTQRVVIENSRGTRKGRIFIDLKTINDRQILESNGLVLHPCLDMLTDKNWKPEEEIPGPLQEFGI

SEQ ID NO: 6155 - protein, 507 aa, synthetic construct
MKRVISYIRFSSEKQAKGDSLRRQSKMVTDWLKAHPEYYLDQDLSFRDLGVSGFTGKHLKGGLGDFLTAIEKGLVKAGDTLLIESLDRLSRQDIDIASELLRNILRSGVDVVTLSDGEHYTRESLRDPLALIKSILIMQRSHEESLRKSERIQAAWDAKKEAAKAGIKVSKRCPAWLRLNDDRKSFSVIPDKVETVKRCFQLRLEGKSIWEIVRTLNAEGHRSMNQYKPGKFGQTSVQDLLKNRSVIGYFTPKGCEEIAGYYPSVIDETTFYKVQQLSHSRYGRKPVSAKPLSVNLFKGVIRCSECGHALIITGFSDTRNGIYRCPLRNENRCSAKGLSRKQTDGTLLTLLSRLDRFDSDMTNTIDTLKLHREHISSNIEKLVQLSLEIEDLSAITSKLKQLKGELSQVDADIEKETQRLKSIDVGCLSDCDLTTKAGRIEAQLIIKSAVKEVVLNTAKRRCKVTFHNGKVIGLSITENPSENVTEAIQSLSEVTERGLIDVDEVII

SEQ ID NO: 6156 - protein, 598 aa, synthetic construct
MNKIIPYGYLRVSSLEQVRTGGGLDTQDEEVRRYITQNSEKFDIDRMVVMSDAGMSAYTGSNIKEGELGRFLADVNAGLIPTGSALICYSVDRLSRQNPWVGTHLISTLIGAGIEIHSVAENQILRSDDPVGAIMSTIYLMRANNESVIKSERAKKGYEKRLNESITNKKVLTRQMPRWLFDCDGKYAIDPNMQNVINFTFDSYIAGQSTGFIAKELNNRGLMYGNTSWRGSYVAKLIRDERLIGKHIRYSKQIKGVKRVVIETIPNFYPVVVDVEKFFLANNMLTSVAKNIRGRTRVTYGDDSILRNLFNGVIKCGVCGGDTSVVQNTRKKIVNGEATYIPYKTFLRCRTRYELKNCVQSDIRYEVIERAILNHLMGLDISALLSVPVDNKIESYRTELELCKAEEVELHTLIEQREREGKRVRPRTIKAYEDVSDRIDELNKLIESYVEDTFVPDFNVDLNSIADVSNVSERSLIKKGIATIADSICYKSISDFILVEIKYRNLSVKHVLVIDNKQSKVVVNFSIEYHENSHDYTCNGLILKYVKSPEEFHLMGVNIEDYAHMMNFVDFISDNEAKKIKEYLVSNLSRVLISNVPE

SEQ ID NO: 6157 - protein, 506 aa, synthetic construct
MRNVITYLRYSSAIQGVEGADSTRRQNDLFEQWLKKNSDAQVVASFSDEGLSGYKGKHLSGQFGDMLSRIESGEFPEGTILLVESIDRIGRLEHLETEALMNRILGNGLEIHTLQDGLIYTKDALADDLGISIIQRVKAYIAHQESKQKSFRVSQKWSQRAKLALAGEQRLTKMVPGWIDPDTFKLNEHAETVRLIFKLLLSGESLHHIARHLQANNISSFSRRKDANGFSVHSVRTILRSETTIGTLPASQRNDRPAIPNYYEPAVDAATFNKAQEILDKNRKGRTPASDNPLTINIFKGLFRCQCGASVHPTGTKNKYAGVYRCNNHLDGRCGVPPLKRKPFDKWMLDNFLGMIDVGNDGESERKIAALQHEVEIVTARIKKATALLLEMDDITELKTQVRELNQKRTDIQTTIDTLKRKTSLSDKGLPQLKDIDLMTKAGRVECQLILSKHLQGLTLGKDSVTVTLQNDTEIIVPTDPLPLNDGSPIFEIAEKDLLEVDGFQL

SEQ ID NO: 6158 - protein, 547 aa, synthetic construct
MKLLVTYIRWSTKEQDSGDSLRRQTNLIDAFYAKHREEYYLLPAHRYVDKGKSGFHQQHKNQGSDFRRMFENVMSGTIPEGSLIVVENFDRFSRADIDTAIDDVRQILRKGVSILTLGDGELYDKSALTDPVKLIKHIIIAERAHQESLVKQKRIAQVWNHKTQLARELKKPMGKQAPGWLELSDDGSHYIVDEDKASLVNLIYDKRLSGMSMFAICKWLNEQGYPTINQRKVRISKTKKPDGNWSALSVKHILTSRSVLGYLPAKISTEDRKTVLREEIEGFYPQIVTDSKFYAVQQLLEETGKGKTSSGEHWLYVNILKGIIRCKCGLVMTPTGIRKPVYQGTYRCNGNKESRCNYGTVSRKLLDTQLCSRLFSKLSQLHDEATDTARLDELQRRLTTVDSELEKLTETLIQLPNITQIQEALRVKQEEKDELIAQLSREKARVKSVSSLDLSGLDMESVEGRTEAQIIIKRLVKEIVVSGNEKLVDIYLHNGNMIRGFPLDGKDDHTLTLEEATDEMQPLDDMLIFGEPVIRVYPAGDMEEVDA

SEQ ID NO: 6159 - protein, 559 aa, synthetic construct
MKTKLYSYIRFSSMKQADGSSYERQKRTAAEIAAKYDLELVTSYQDFGVSAFKGANSKTGALSRFLDEIGRSVPVGSWLVVENLDRISRQSIIEAQELFLSIIRRGITIVTGMDGRVYSRESVNANPIDLLLSVMLFARANEESQTKRNRTNSSALIKIKSHQENPQNPAVAIEEVGKNMWWTDTTSGYVLPHPTYFPVVQEIVELRKNGRSTAEILDHLNETYTPPPAVSNKKHSKWSRAMVERLFHTRALIGIKEVSVDGVNYELNNYYPRVIDDATFYHLKKNIGARAWNFGDKEEVKPIPLLSGIGLLKCDHCGCAMVKVKGTNKRSDQYRYTCDATRSRRLDCEHPNWSFRGDQLEKAVLQLLADKIWIAEDKANPVPALKVQIDEISRKIDNLITLSAMTGATKELADQITTLNSERETLYNQIKMAEEEMYSVDSQGWEKLAEFDLEDVYNEERLKVRFKIKQALRRIGCSRIDRNKNLFVLEYIDGKTQRVVIENSRGTRKGQIFVDLKTINDRQILESNGLVLHPCLDMLTDKNWKPEEEIPGPLQEFGI

SEQ ID NO: 6160 - protein, 547 aa, synthetic construct
MKLLVPYIRWSTKEQDSGDSLRRQTNLIDAFYSKHKNDYYLLPAHRYVDKGKSGFHQQHKNQGSDFRRMFENVMSGAIPEGSLIVVENFDRFSRADIDTAIDDVRQILRKGVSILTLGDGELYDKSALTDPVKLIKHIIIAERAHQESLVKQKRIAQVWNHKTQLARELKKPMGKQAPGWLELSEDGSHYIVDEDKASLVNIIYDKRLSGMSMFAICKWLNEQGYPTINQRKVRISKTKKPEGNWSALSVKHILTSRSVLGYLPAKISTEDRKTVLREEIEGFYPQIVTDSKFYAVQQLLEETGKGKTSSGEHWLYVNILKGLIRCKCGLVMTPTGIRKPVYQGTYRCNGNKESRCSYGTVSRKLLDTQLCSRLFSKLSQLHDEATDTAKLDEIQRRLNTVDSELEKLTETLIQLPNITQIQEALRVKQEEKDELIVQLSREKARVKSVSSLDLSGLDMESVEGRTEAQIIIKRLVKEIVVSGNKKLVDIYLHNGNMIRGFPLDGKDDHTLTLEEATDEMQSLDDMLIFGEPVTRIYPAGDMEEVDA

SEQ ID NO: 6161 - protein, 547 aa, synthetic construct
MKLLVPYIRWSTKEQDSGDSLRRQTNLIDAFYAKHKDDYYLLPAHRYVDKGKSGFHQQHKAQGSDFRRMFENVMSGAIPEGSLIVVENFDRFSRADIDTAIDDVRQILRKGVSILTLGDGELYDKSALTDPVKLIKHIIIAERAHQESLVKQKRIAQVWNHKTQLARELKKPMGKQAPGWLELSEDGSHYIVDEDKASLVNIIYDKRLSGMSMFAICKWLNEQGYPTINQRKVRISKTRKPDGNWSALSVKHILTSRSVLGYLPAKISSEDRKTVLREEIEGFYPQIVTDSKFYAVQQLLEETGKGKTSSGDHWLYVNILKGLIRCKCGLVMTPTGIRKPVYQGTYRCNGNKESRCSYGTVSRKLLDTQLCSRLFSKLSQLHDEATDTAKLDELQRRLNTVDSELEKLTETLIQLPNITQIQEALRVKQEEKDELIVQLSREKARVKSVSSLDLSGLDMESVEGRTEAQIIIKRLVKEIVVSGNEKLVDIYLHNGNMIRGFPLDGKDDHTLTLEEATDEMQPLDDMLIFGEPVTRIYPAGDMEEVDA

SEQ ID NO: 6162 - protein, 506 aa, synthetic construct
MRTVITYLRFSSATQGAEGADSTRRQNELFKQWLRKNSDAQVVASFNDEGLSGYKGKHLSGQFGDMLSRIESGEFPEGTILLVEAIDRIGRLEHLETEALMNRIIAHGIEIHTLQDGLIYTRDALSDDLGISIIQRVKSYLAHQESKQKSFRVSEKWKQRAKLALAGKQRLTKMVPGWIDPGTFTLNEHAETVRLIFKLLLSGESLHNIARHLQANSISSFSRRKDANGFSVHSVRTILRSETTIGTLPASQRNDRPAIPNYYEAAIDAATFNKAQEILDKNRKGRTPASDNPLTINIFKGLFRCQCGASVHPTGTKNKYAGVYRCNNNPDGRCDVPPLKRKPFDKWMIDNFLGMIDVGNDGEAEGKIASLQHEVEIVTTRIKKATALLLEMDDIDELKIQLKELNQKRTELQTTIDNMRRKASLTDKELPQLKDIDLTTKAGRVECQLILSKHLKGLTLGKDSVTVTLQNDTEITIPTNPLPLNDGSPIFEIADKELLDIDAYQL

SEQ ID NO: 6163 - protein, 506 aa, synthetic construct
MRTAITYLRFSSAIQGAEGADSTRRQNDLFKQWLKKNGDAQVVASFSDEGLSGYKGKHLTGQFGDMLARIEAGEFPEGTILLVESIDRIGRLEHLETEALMNRILGNGIEIHTLQDGLIYTKDALADDLGISIIQRVKAYIAHQESKQKSFRVSQKWGQRAKLALAGKQRLTKMVPGWIDPETFKLNEHAETVRLIFKLLLDGESLHNIARHLQSNGIKSFSRRKDANGFSVHSVRTILRSETTIGTLPASQRNDRPAIPNYYEGVVDAATFNKAQEILDKNRKGRTPASDNPLTINIFKGLFRCQCGASVHPTGTKNKYAGVYRCNNHLDGRCDVQPLKRKPFDRWIIDNFLGMIDVGNDGESERKVAALQHEVEIVTSRIKKATALLLEMDDIDELKIQLKELNQRRTELQTTIDSMRRKTSLSDKGLPQLKDIDLMTKAGRVECQLILSKHLKGLTLGKDSVTVTLQNDTEITIPTNPLPLNDGSPIFEIADKELLDVDTYRL

SEQ ID NO: 6164 - protein, 584 aa, synthetic construct
MKTNNVEIIKADSLVRRRGVNVERHLKRVAAYCRVSSDSEDQKNSYESQVKHYKDYISQRSDWELADIYADEGISGTQVGKRQDFQRLINDCVNGEIDYIVTKAIARFARNTLDTLKYVRMLKDMQIGVYFEEENIDTLTMDGELLLTILSSVAQQEVENTSAHVKKGLKMKMQRGELIGFQGCLGYDYDVETKQLSINKKEAKIVRYIFERYLEGIGGKVIARELDELGYKSPRGLDHWNDTTVLGIIKNEKYKGDILMGKTFTVDPISKRRLSNFGEEDKYYIKDNHEPIISKEDFEKAQEIRLRRAGNKKTVANVNGKRERYSKMYAFSSMLECGFCGSLLSRRSWHCRSDYRKVVWHCVTSIKKGKKYCKHSKGLEELAIEGAFMEAYRQLYHSNENIVSDLLETIESELNDNSLNKELKKITNKLRTLLKKEENLVNLKLEGKISDSIYNEKYNELSLEKEYLAEEKVNVETTLKSEIDVKKRLTEFKQLLSSQKMLTEFDRTVFESIVEKIIVGGVNSDGEIDPAMLTIIFKTGETQNKDGKQFKSKRKNAKLESDELCPQNCDEDKKLYSQGIDNTC

SEQ ID NO: 6165 - protein, 587 aa, synthetic construct
MRKFFSSAIKILKPLAYSYLRISTDLQQKGHGRKRQLEASRAYAEANGLEFAEGGELEDIGISAFKGANVREGALGGFLEAVRSRRVQPGSYLIVESLDRLSREQVLAAQSLFLGIIQAGINLVTLADNRVYRAGKTDLGDLIMSLVIMSRAHEESQTKSLRLSAAWKNKRAAAASLKPMTKWCPAWLQLADDRSGYECIPDRVQIVRQIFSDSADGIGVYKIAHRLNQSSTPTFNDSDGWHQSYVAKILANRAVIGEFQPAVRRDGKRTIEGEPIEDYFPAIIDKELFYRAHQAKAQRQRNGAGRKGKAFSNLFSGLATCAYCGASMTYDNKGSGPKGNQYLVCTNSKRRLGCQGKRWKYTDFEASFLAFITEIDFASIVDADERSTAQSQLSQKLASLEGELASVIALMDKAFALLETGAPPDFVSTKLQEMQLRKESLAASVAASRAALEEMQSSQHRAAESRDEIQSLVNRLRDANDPDLFDLRAKIASHLKAMIETLTVAPQGSRPRLMRIATETLTKFGGDAANVAHYIARRGQQPEQTHRYFAVGLRDSRVRIVFPDDEEPLKYRQQVIATDDGIERVTG

SEQ ID NO: 6166 - protein, 559 aa, synthetic construct
MKTKLYSYIRFSSMKQADGSSYERQKRTAAEIAAKYDLELVTSYQDFGVSAFKGANSKTGALSRFLDEIGRSVPVGSWLVVENLDRISRQSIIEAQELFLSIIRRGITIVTGMDGRVYSRESVNANPIDLLLSVMLFARANEESQTKRNRTNSSALIKIKSHQENPQNPAVAIEEVGKNMWWTDTTSGYVLPHPTYFPVVQEIVELRKNGRSTAEILDHLNETYAPPPAVSNKKHSKWSRAMVERLFHTRALIGIKEISVDGVNYELNNYYPRVIDDPTFYHLKKNIGARAWNFGDKEEVKPIPLLSGIGLLKCDHCGCAMVKVKGTNKRSDQYRYTCDATRSRRLDCEHPNWSFRGDQLEKAVLQLLADKIWIAEDKANPVPALKVQVDEISRKIDNLIALSAMTGATKELADQITALNSERETLYNQIKMAEEEMYSVDSQGWEKLAEFDLEDVYNEERLKVRFKIKQALKRIGCSRIDRNKNLFVLEYIDGKTQRVVIENSRGTRKGRIFIDLKTINDRQILESNGLVLHPCLDMLTDKNWKPEEEIPGPLQEFGI

SEQ ID NO: 6167 - protein, 506 aa, synthetic construct
MRSVITYLRFSSAIQGAEGADSTRRQNELFKQWLRKNSDAQVVASFNDEGLSGYKGKHLSGQFGDMLSRIESGEFPEGTILLVEAIDRIGRLEHLETEALMNRIIAHGIEIHTLQDGLIYTRDALSDDLGISIIQRVKSYIAHQESKQKSFRVSQKWKQRAKLALAGEQRLTRNVPGWIDPETFKLNEHAETVRLIFKLLLDGESLHNIARRLQNNGIKSFSRRKDANGFSVHSVRTILRSETTIGTLPASQRNDRPAIPNYYEAAIDASTFNKAQEILGKNRTGRTPASDNPLTINIFKGLFRCQCGASVHPTGTKNKYAGVYRCNNHLDGRCDVPPLKRKPFDKWMLENFLGMIDVGNDGESERKIAALQHEVEIVTSRIKKATALLLEMDDISELKAQVKELNQKRTELQTTIDTLKRKTSLSDKGLPQLKDIDLMTKAGRVECQLILSKHLKGLTLCEGSVVVTLQNDTEITVPTDPLPLNDGASIFEIAEKELLEIDAYQL

SEQ ID NO: 6168 - protein, 506 aa, synthetic construct
MRSVITYLRYSSAIQGAEGADSTRRQNDLFKQWLKKNSDAQVVASFSDEGLSGYKGKHLTGQFGDMLARIESGEFPEGTILLVESIDRIGRLEHLETEALMNRILGNGLEIHTLQDGLIYTKDALADDLGISIIQRVKAYIAHQESKQKSFRVSQKWEQRAKLALAGEQRLTKMVPGWIDPDTFKLNEHAETVRLIFKLLLSGESLHNIARHLQSNGIKSFSRRKDANGFSVHSVRTILRSETTIGTLPASQRNDRPAIPNYYEAAIDAATFNKAQEILDKNRKGRTPASDNPLTINIFKGLFRCQCGASVHPTGTKNKYAGVYRCNNHLDGRCDVPPLKRKPFDKWVLENFLGMIDVGNDGESERKIAALQHEVEIVTARIKKATALLLEMDDIDELKIQLKELNQKRTELQTTIDSMRRKASLTDKELPQLKDIDLTTKAGRVECQLILSKHLKGLTLGKDSVTVTLQNDTEITIPTNPLPLNDGSPIFEIADKELLDIDAYQL

SEQ ID NO: 6169 - protein, 450 aa, synthetic construct
MTKAAIYIRVSTQDQVENYSIEVQRERIRAYCKAKGWDIYDEYIDGGYSGSNLDRPDIKRLLNDLKKIDVVVVYKLDRLSRSQRDTLELIEEHFLKNNVDFVSITETLDTSTPFGKAMIGILSVFAQLERETIAERMRMGHIKRAENGLRGNGGDYDPSGYTRVDGHLILNPNEAKHIKRAFDLYEQYHSITRVQEVLKEEGYTIWRFRRYRDVLSNTLYIGQITFAGKTYKGQHEPIVSLEQFKRVQALLKRHKGHNAHKAKQSLLSGLIICSCCGEKFVAYSTGKSKDIESKRYYYYICRAKRFPSEYDEKCLNKTWSRKKLEEVIFDELKNLTVKKSASQKKEKKINYEKLIKDIDKKMERLLDLFTNTTNISRQLLETKMDKLNLEKEHLILKQQSYEQEFSISKDMITTINESLETMDFKDKQIMINTFIQEIHIDHDVVDIIWR

SEQ ID NO: 6170 - protein, 507 aa, synthetic construct
MKRVISYIRFSSEKQSRGDSLRRQSKMVTDWLKAHPEYYLDQDLSFRDLGVSGFTGKHLKGGLGDFLTAIEKGLVKAGDTLLIESLDRLSRQAVDRASELLRNILRSGVDVVTLSDGEHYTSESLKDPLALIKSILIMQRAHEESLRKAERIQAAWDAKKEAAKAGIKISKRCPAWLKLNDDRKSFSIIPEKVETVKRCFQLRLEGKSIWAIVKALNDEGHQTLNQYKAGKFGQTSVQDLLKNRSVIGYFTPKGCEEIAGYYPAIIDETTFYKVQQLSHSRYGKRSVSDKPLSVNLFKGVIRCSECGHALIITGFSDTRNGIYRCPLRNENRCSAKGLSRKQTDGTLLTLLSRLDRFDSDTTNTIDTLKLHREHISSNIEKLVQLSLEIEDLSAITSKLKQLKGELSQVDADIEKETQRLKSIDVGCLSDCDLTTKAGRIEAQLIIKSAVKEVVLNTAKRRCKVTFHNGKVIGLSITENPSEDVTEAIQSLSEVTERGLIDVDVVEI

SEQ ID NO: 6171 - protein, 506 aa, synthetic construct
MRHVITYLRYSSATQGAEGADSTRRQNELFKQWLRKNSDAQVVASFNDEGLSGYKGKHLSGQFGDMLSRIESGEFSKGTILLVEAIDRIGRLEHLETEALMNRIIAHGIEIHTLQDGLIYTRDALSDDLGISIIQRVKSYLAHQESKQKSFRVSEKWKQRAKLALAGEQRLTKMVPGWIDPETFKLNEHAETVRLIFKLLLDGESLHNIARHLQANNISSFSRRKDANGFSVHSVRTILRSETTIGTLPASQRNDRPAIPNYYEAAIDAATFNKAQEILGKNRIGRTPASDNPLTINIFKGLFRCQCGASVHPTGTKNKYAGVYRCNNHLDGRCDVPPLKRKPFDKWMIDNFLGMIDVGNDGEAEGKIASLQHEVEIVTTRIKKATALLLEMDDITELKTQVKELNQKRTELQTMIDNMRRKASLTDKELPQLKDIDLMTKAGRVECQLILSKHLKGLTLGKDSVTVTLQNDTEITIPTNPLPLNDGTSIFEIADKELLDIDAFRL

SEQ ID NO: 6172 - protein, 559 aa, synthetic construct
MKTKLYSYIRFSSMKQADGSSYERQKRTAAEIAAKYDLELVTSYQDFGVSAFKGANSRTGALSRFLDEIGRSVPVGSWLVVENLDRISRQSIIEAQELFLSIIRRGITIVTGMDGKVYSKESVNANPIDLLLSVMLFARANEESQTKRNRTNSSALIKIKAHQENPQNPAVAIEEIGKNMWWTDTTSGYVLPHPVFFPIVQEVVELRRNGRSTAEILDHLNATYTPPPAASHKRHSNWSRAMIERLFHTRALIGIKEISVDGVKYELKDYYPRVLDDAEFYHLKKSIGVRACNYGDKEEVKPIPLLSGVGLLKCEHCGSAMVKVKGTNKRPNQYRYSCDAMRSSRIACVHTNWSFRGDQLEKAVLQLLADKIWIAEDKANPVPALKVQVDEISRKIDNLIALSAMTGATKELADQITTLNSERETLYNQIKMAEEEMYSVDSQGWEKLAEFDLEDVYNEERLKVRFKIKQALKRIGCSRIDRNKNLFVLEYIDGKTQRVVIENSRGTRKGRIFIDLKTINDRQILESNGLVLHPCLDMLTDKNWKPEEEIPGPLQEFGI

SEQ ID NO: 6173 - protein, 506 aa, synthetic construct
MRSVITYLRFSSATQGAEGADSTRRQNELFKQWLRKNSDAQVVASFNDEGLSGYKGKHLSGQFGDMLSRIESGEFPEGTILLVEAIDRIGRLEHLETEALMNRIIAHGIEIHTLQDGLIYTRDALSDDLGISIIQRVKSYIAHQESKQKSFRVSQKWEQRAKLALAGEQRLTKMVPGWIDPETFKLNEHAETVRLIFKLLLDGESLHNIARHLQANNISSFSRRKDANGFSVHSVRTILRSETTIGTLPASQRNDRPAIPNYYEAAIDAATFNKAQEILDKNRKGRTPASDSPLTINIFKGLFRCQCGASVHPTGTKNKYAGVYRCNNHLDGRCDVQPLKRKPFDRWMIDNFLGMIDVGNDGESERKIAALQHEVEIVTARIKKATALLLEMDDITELKTQVKGLNQKRTELQTTIDNMRRKASLTDKELPQLKDIDLTTKAGRVECQLILSKHLKGLTLGKDSVIVTLQNDTEITIPTNPLPLNDGTSIFEIAEKELLEIDAYQL

SEQ ID NO: 6174 - protein, 608 aa, synthetic construct
MTPKYKCLLLVRISTTKQVQESDSPEHQIRRGLAFAEKRYGYTRDQVFILTEAWSGRREDRPCLDQALDMVEKHGLLHLFVYDIDRLTRAGAAHYELLKRKFKAAGCEIADVKGIIQPDSNTLEGTGGTFGDDFAYDWSVFAASEKAEVLEAQMAKDEARKILGRTVPVLIQNAQLGRTNRVAPYGFRNTKIIDDSGKPQPSKVPDEGEAFFVRRIFEGVAAGRDVRNLCDDLNGLGFQTRLVRRWTADHSKVIGKRGGKPLTPRMVRELVERTVYAGFICEKWTHGFPVQANHEGLVALDLWNHANRGKWRLIKDGDSPTGWSRIDVRLERQRRSYLRARADFPFKTLITCPSCGKPMKAGYSRSRNGERYGYYQCARGHKQVSQAKDALHSTIQRYLDTMQFTEQVGAKFDQYLREAWIKKVGGLNKHLAVANTEVAQLREEADSLFEKIKIAQNPLIIRRLEQEYEDLFQRIKLLEAKRDEKEFTEADMNRAISWAKYLVEHLDELITETDDESLRASFWSLVFERHPTLAELQNRTAPLSVLVRLKAECEKAKGDLVGNDVFRLNQIWDELCRWETELSAAMRCNPGKFDAWPFSNEDDLPTAA

SEQ ID NO: 6175 - protein, 584 aa, synthetic construct
MSDKPLAYSYLRISTDNQRHGSGIERQMKAGAAWAEANGYELAETISDIGLSAYTSTHAKKGGFGRFLAAIETGQVPAGSILIVESLDRLSRAKVTEAFTQLVGLLKHGIKIVTLVDNQVYTESSLNENFGQLFMSLGVLLRANDESETKSKRGKAAWNHRRQNAATKKITKNAPAWLELSEDRSEFVIKPDRAKTVQKIFELAAAGQGAYSITKYLNANLSQHPGFGHSGNWADSYINKILNSEAVIGELQSYSGTGKNRVKVGDPIPNYYPRVISDELYHLVQAGIKERKTGAAGRKGDYFSNLFSGLLECGNCGGTIFMRNKGKEPRGYRFLRCSNSLKGNACNCPAWRYDEFESQFINFVKDISFAEVFSGKTADTQMVELRGRKAVELDKIAQAEQKYSALVEQFTDANLPEMLKESLIKKSVELENEIVAAKEAVETIDAELTKLSTSNVEADQNEFLESYEQLLSGDKDKLREVRFAMHSILRRNIDKISVHNGTYFEPWEEMPASLRAELADKGIISQNDIEGYLSKPHGKRLRDKHDRHFVVHFKNGVRRRVGAEYSLLDVSKNDLALIEKFESK

SEQ ID NO: 6176 - protein, 557 aa, synthetic construct
MTKLYSYIRFSSMRQSDGSSYERQIRMAKEIADRHGLELVNDYQDLGVSAFKGANSKTGALSRFLEEIGKSIPVGSWLFIENLDRLSRQDIISAQELFLSIIRRGITIVTGMDNKIYSIDTVTANPMDLMFSILLFIRGNEESQTKRNRTNSSALIKIKAHQQNPQSPAVAIEEIGKNMWWTDTTSGYVLPHPVYFPILQKIVQMKQDGHSTGSVLDYLNENHEPPAPASNKTHRKWSIAMVSRLFQTKALIGVKTVKVDGVEYELKDYYPRVMSDSDFYFLKNNLVKKAWSFGHSEEKVIPLLTGVGLLKCSHCGSPMVKRKAANGKKEQYRYTCDGAGSKRVDCPYPNWGFRASSLEGAVLQLLADKVWIAEDKANPIPEIQVQIDEISRKIDNLISLSAMTGATKELADQITGLNSQREALHEEIKSWESQMYSVDSQGWEKLAQFDLNDVENEERLKIRVKIKGALKAIECGRINRNMNLFVLVYLDGLRQRVVIENNRGTRKGSVYVDLKTINDRQILESNGMVLHPCIEMLIDKDWKAEEEQAGPLQEFGI

SEQ ID NO: 6177 - protein, 450 aa, synthetic construct
MVKAALYIRVSTQEQIENYSIEVQRERLEAYCKAKNWEVQDFYIDGGFSGSTLERPDLQRMLKNLKEIDAVVVYKLDRLSRSQKDTLELIEEHFLKNDVDFVSITETLDTSSPFGKAMIGILSVFAQLERETIAERMRMGHIKRAENGLRVMGGDYDPAGYARVDGHLVLKEDESKHIKRAFDLYEAYHSITIVQKNLKEEGYPVWRFRRYRDILSNPLYIGQVKFAGELYQGQHDPIVTEEQFDRVQALLRRHKGNNAHKAKTSLLSGLLGCSCCGESFVAYSTGISKKNKKNYYYYICKARRFPSEYETKCVNKIWSKDKIESLVLEELKNMLLKKSTDQKKRPTVDYNKLLKDVDRKIERLIQLYTNEKIDNNLLEKQLSKLTEEKNRIINKQTIQEEDTFIISEDMLDNIKHNLDVLDFPDKRAIVQSCIRQIYIEHDHVKIDWRF

SEQ ID NO: 6178 - protein, 525 aa, synthetic construct
MRTAIYARFSSSNQSEMSITDQIRICQKKIVEQGWKEPAIFSDMAVSGSTPLLFRDGSLKLYSEAERKSFDVLLVESLDRLSRDQVEQELFVRKLEYKGIRIIGVCDGYDSEMPASKILRGVRGLINEMFLDDLRIKTHRGLSGQVLRGYAATGRSYGYNIVKTEKGSIYEINKTEAEWVRFIFREYANGSSVQRIADKLNKQGVHSARHNTWSVSAIYGTPTKWSGVLNNRLYIGLNVWNRSKWIKNPENGKRQRIERKESEWIITEVPELRIVNDDLWNKVRVRIDGKNPDGTRQKHQKPSRTLFGGLLRCPYCGGAVIAVNQRSYGCAQRKDRGTSVCTGVLLKKSAVEKRLISYIQDTLLSEASINEFEIKFRNLIDVQRSESTISSIKEKLKEIKSSMAKLVDILAEVGHSKPLIQKLNALEEEQSALQRDLDTALSQHNHDDIDIATIFKEAVSELGSFLSEDKQKAHSIMKGLFGVIQLEDKDGAIVAKIDRGKVLQLVLNSQKNNVSVSNFGCEGRI

SEQ ID NO: 6179 - protein, 474 aa, synthetic construct
MRCALYVRVSTDEQAKHGYSILAQIEKLEAYCISQGWEIAGEPYVDDGYSAKDLNRPHFQRMITEVKKGDIDVVLVYRLDRLTRSVSDLYDILQELDKYNCKFKSATEVYDTTNAMGRLFITLVAAIAQWERENTAERVRMGLEKKVKLGLWKGGTPPYGYKVVDGELVVYEEEEKIVREIFKLSRTIGFYILAKQLTDRGIPTRRGGEWHVDTVRDIANNPTYAGYLSFSENPKDIKKPPRERKLFEGNHERIIDRDEFWELQDILDKRRTFGGKRETSDYYFSSILKCARCGHSMSGHRVGKKKNYRCSGKKVGKSCTSHMILEDNLVKTIFSQWDELIGDFSSSSGETEFPTEHLNKVKSELSNVQKLMRKKKVMYENDVIDIDELIQETEKLREKEKELQREIKNIEQNDNQNNEELRAIILNMDQLWLKANAYERKELMNLIFEQLVIDTKDEYKSSKQAREIIIVSAR

SEQ ID NO: 6180 - protein, 509 aa, synthetic construct
MRRAISYIRFSSERQLKGDSVRRQSKLVTDWLDKNPEFYLDSSLSFKDLGKSAFSGKHLKGGLGDFLTAIEKGLVKAGDTLLIESLDRLSRQDIDIASELLRRILRAGVDVVTLSDGEHYTRESLKDPLALIKSILIMQRAHEESLRKSERVQAAWNRKKELISEGIKVSRRCPAWLKLNDDRRTFTIIPDKVEVVKRAFDLRLQGLSFWAITRTLNDEGHLSLNQYTPKQKGWSDTAVKKLLRNRAVIGCFTPAGREEVQGYYPAIISESLFYRVQQLNTGQYGRASVSSNPLSVNLFRGIIKCSECGATIVLGGYALKRFGMYRCPNRSANRCSAKAISRKQTDATILYMLALCDRFETENTDIIDSLKLQREDLQRKISKMAELAIELDDMTIITEKLRDMKNALSKLNHDIEEETKRIKAITTGSLKDIDRTTKEGMIETQLLIKGVLKEIVIDAAKRRCKVTFHNGRAIDLSISENPSEDVTEAIQSLSEVTERGLIDVDEVII

SEQ ID NO: 6181 - protein, 536 aa, synthetic construct
MSKIIRAASYLRYSSDNQREESIVAQERAIEEYCKRKGYVLVKKYADEARSATTDNRADFQRMIEESVLGAYEVLVVHKLDRFARNRYDSALYKRRLKLNGIKVESVLEQLDNSPESVILESVLEGMAEYYSKNLSREVRKGLNENAMKATHNGGRPAYGLKVNPETHMYEIDEKRYRAVQMYFEGLDADLTRAEIARRINSAGFRTYAGDEFKITSFDTWAANPKYKGDYVWNASSSKDESGKRNSHLKKPIEEQIIIEGAIPAIVSKDLWERVNAKLKKRESNSEKSRLRAKTVYLLSGKVFCSKCESQISGESYTSRGRNYAYYKCSSKCENKGIPKELLESVVIDKLVEICFSSEAVQQIVEKVKKLYKERQNNTANDTVPLKEEIASLESKIDKWIDAIGDGILDRNVLAKKINEANEKKEFLTSQLALVEVIQKTPEIEDAAIIKILDKRKDCLLSDDPIDQKAVIQEYIDNVKVFFTADKMLDIEITVRFDMLGVPMVEARGLAPLYRRTTTKASTRVSFNLNFASLDS

SEQ ID NO: 6182 - protein, 522 aa, synthetic construct
MKPCFGYIRVSTQKQGEGVSLEAQKDAIEAFASREDLTVIRWFEEKQTAAKGGRPIFNQMLRQLKRGAARGVIIHKIDRSARNLRDWAMFSELPDLGTDVFVATESLDFNSRGGRLTADIQAVIAADYIRNLREETKKGIDGRLKQGLYPFRAPIGYLDNGKGKPKTPDPEKAPLILEMFELYASGQHSLRSLRAEINRRGLRNHAGQPLSLCGIETILNNPFYTGLIVIQRTGRTYDGIHEPIVPATLFQQVQDMKTGRSGKKVTQHNHLYRGLFRCGLCDGPMSPELQKGRVYYRCQTRSCPTRTIREDRLEAIITDALRRLEITSKEAERLELSWEAEHGIEEQNSMRTALRLRIEKEEQRLARLTDLLLDGVIATSDYHKRKRDLEIAIAAGKEELTNLPDPAQIEAERMGFLELMKNLAGLHIRATDAEKREIVENAFSNRQVSENHVGLEPYDWLRIGETCSPVLSGAPCRDTSRTGPGLQSLLNLLKTGRGGPVASVQLGSGQSRLTDGKGLDLH

SEQ ID NO: 6183 - protein, 507 aa, synthetic construct
MKRVISYIRFSSEKQSRGDSLRRQSKMVTDWLKAHPEYHLDQDLSFRDLGVSGFTGKHLKGGLGDFLTAIEKGLVKAGDTLLIESLDRLSRQDIDIASELLRRILRAGVDVVTLSDGEHYTSESLKDPLALIKSILIMQRAHEESLRKSERIQAAWDAKKEAAKAGIKVSKRCPAWLKLNDDRKSFSVIPEKVETVKRCFQLRLEGKSIWEIVRTLNDEGHQSMSQYKPGKFGQTSVQDLLKNRSVIGYFTPKGCEEIAGYYPAIIDETTFYKVQQLSHSRYGRKPVSAKPLSVNLFKGVIRCSECGHALIITGFSDTRNGIYRCPLRNENRCNAKGLSRKQTDGTLLTLLSRIDRFDSDTTNIIDTLKLHREHISSNIEKLVQLSLEIEDLSAITSKLKQLKGELSQVDADIEKETQRLKSIDVGCLSDCDLTTKAGRIEAQLIIKSAVKEVVLNTAKRRCKVTFHNGKSITLPITENPSEDVTEAIQSLSEVTERGLIDVDEVII

SEQ ID NO: 6184 - protein, 507 aa, synthetic construct
MKRVISYIRFSSEKQAKGDSLRRQSKMVTDWLKAHPEYYLDQDLSFRDLGVSGFTGKHLKGGLGDFLTAIEKGLVKAGDTLLIESLDRLSRQDVDQASELLRNILRSGVDVVTLSDGEHYTRESLRDPLALIKSILIMQRAHEESLRKAERIQAAWDAKKEAAKAGIKVSKRCPAWLKLNDDRKSFSVIPEKVETVKRCFQLRLEGKSIWEIVRTLNDEGHQSMSQYKPGSFGQSSVQDLLKNRSVIGYFTPKGREEIAGYFPPIIPETDFYKVQQLSYSRYGRKPASDKPLSVNLFKGVIRCSECGHALIITGFSDTRNGIYRCPLRNENRCSAKGLSRKQTDGTLLALLSRLDRFDSDTTNIIDMLRLHREHVSSNIEKLVQLSLEIEDLNAITSKLKQLKGELSQVDADIEKETQRLKSIDVGCLSDCDLTTKAGRIEAQLIIKSAVKEVVLNTAKRRCKVTFHNGKVIDLPITENPSEDVTEAIQSLSEAIERGLIDVDVVEI

SEQ ID NO: 6185 - protein, 600 aa, synthetic construct
MNRSGKKCVLYPRVSTEMQVDGFSLDGQKNSLRRFADREEMEIVDIYEDAGKSGKSIEGRPAFKQMLCDIENGLDIDYILVYKLSRFGRNAADILNSLEHVQSFGVNLICIEEGIDSSQTSGKLLISVLSAVAEIERENIIEQTMNGRKEKARQGGWNGGFAPYGYYLKDKQLYIQEDEAEAVRIIFDKYVNGNMGFYKIANYLNLQGIQKIKRANGTLAQWSTHFVRMIIDNPVYSGKIAFGRRTREKVKGTKNEYRQVHQDEYIIADGQHDAIICEELWNQAHEKREITGVKSPSKIGRDRAHLLSGILKCPKCGGPMYTNKHAWTNKDGTYKEIYYYVCSKARTARGKSCNYKAMLKKTDIEPLVIEAIRELIKNQDFATEIKSRIGKEIDTSTLNRELSNYESKLREVELNKTRLENEIDSLPEDTRFRERKLHDMTLRLDGLYDIIVELEEKIEDVKLRRKAVEQDAITLENIYTLLANFDKVYDKISDEEKKSLISSLIKEIEIFPCDEAELPLKSILFNFPVYKDGGDVCGFLWDKSTHVSTWNGSIRLMSGMYFSVFQYKGTGRAWFLWVVSVRGNISTLLFCFNPFSETSH

SEQ ID NO: 6186 - protein, 573 aa, synthetic construct
MNRSGKKCVLYPRVSTEMQVDGFSLDGQKTSLKRFADREEMEIVDIYEDAGKSGKSIEGRPAFKQMLCDIENGLDIDYILVYKLSRFGRNAADILNSLEHVQSFGVNLICIEEGIDSSQTSGKLLISVLSAVAEIERENIIEQTMNGRKEKARQGGWNGGFAPYGYYLKDKQLYIQEDEAEAVRVIFDKYVNGNMGFYKIANYLNLQGIPKIKRANGTLAQWSTHFVRMIIDNPVYSGKIAFGRRTREKVKGTKNEYRQVHQDEYIIADGQHDAIICEELWNQAHEKREITGIKSPSKIGRDRAHLLSGILKCPKCGGPMYTNKHAWTNKDGTYKEIYYYVCSKARTARGKSCDYKAMLKKTDIEPLVIEAIRELIKNQDFATEIKSRIGKEIDTSTLNRELSNYESKLREVELNKTRLENEIDSLPEDTRFRERKLHDMTLRLDGLYDIIAELEEKIEDVKLRRKAVEQDAITLENIYTLLANFDKVYDKISDEEKKSLISSLIKEIEIFPCDEAELPLKSILFNFPVYKDGGDVCGFLWDKSTHVSTWHDSIRLMSGTFDTNFPYKGTGRA

SEQ ID NO: 6187 - protein, 483 aa, synthetic construct
MNSGLRAAIYARYSTNKQDEISIEAQVRACREYAAGHGHVVVKVYSDEAISGKGSKTTSRKQYQALIKDCANHMYDIVLVHKYDRIARNVGEHVNLELKLAEGGASLIAVAQDFGQSKEAKIMKTMMWALSEYYIDNLSEEVTKGHKEIAFQGLHNGGVAPFGYDIVDQKYIINQAEAVYVRKMFRCAINREGFVELVREMDDNGIIGKRGKPMKYTQIYEILRNEKYAGVYAYSPKEEKDRSLRRTKPNAIRLENAIPPIVDKATFDEVQRIMDERKQTGKKSDYLCRGLVYCGNCGAKMYGSKTQRKGHEYLIYYCSGKCGMGIVRMEDIDRSVKQYLHSILSDKNQKLINEALQNYAKGEKDRIEKYNADVRQQIEEKQTQIDNYMRALGSSVLPTDIIADIGNKITVLKNSIKELSEAPLPKDYTIAQVSDWLQSLKISVDERKTVELLVSRIEATKTEINVFSTLNSVLGETGCGGGT

SEQ ID NO: 6188 - protein, 527 aa, synthetic construct
MTRSSMPPAVIYCRVSSVRQLKEGDGLASQETRCREYARHKGYDIVQVFRDEGVSGGMIDRPGMQAMLAFLRQHKNAGGLSVIIDDISRLARGLQAHIELRSAIGQAGGKLESPSIEFGEDSDSVLVENLLASVSQHQRQKNAEQVKNRMRARFMNGYWVFSCPVGYRYERVAGHGKMLVPDEPTASIVREALEGFASGRFSSQTEVKRFMDQHGAFAKARSRSSCLQKVREVLERPLYAGVMDMPSWGLTGIQGKHQPLITFETHRRVLERLHGPRYGIARKDMRDDFPLRGIVLCACCERPMTAAWSKGRNGRYPYYSCHTKGCEQGRKSIRKEKLEGEFTDLLESLRPSQEIYAALREMLTAAWELRRRACGDRTSLLKSELSQIERKTAQLMDRLVEADNATLIAAYEEQVRKLHSQRIAVQEKLAGPAPAAGDFEESYRTALEFIENPAKQWASDDLAKRRLVPKLMFGDRMLYRKNDGYRTAGITHPFRVLKAIQDGKSGMVEPRGIEPLTSWVRSRRSPI

SEQ ID NO: 6189 - protein, 624 aa, synthetic construct
MIKTFIYSRVSSQEQLSGGGLDRQETDVREYVTRNGLDQYEIVAMVDRGISGYDGSNMRDGELGKWYKDAITGMYWGSHLVLEAIDRFSRRDPMLAMEDFTVLVNKGGIKVHIVKFNTFINGDNLPMLSMMMNLAHSESKQKSDRISKGWQRRRRMALDNGTAITARTPYWIDVRDNEYRLNNSSIAVVEAFAMYKQGLSCGLIAKKLNELKHYFPYMWTKTAVQHIVDGLNTSGIIDAPRAIKTIKAFYKSGFSVEDIAKKMNAEFQFMKEWNAPAVHKLLQNKSVTGLVEIQKRKLIQEFDSDGKPLELRTKSEGEKYFESIYPQIISIDDFELIQKLLESNRKVDTKTGKGQTTGGTVTQNEDGELVKQFILSSLCRCYKCGGAMFNNIVRSKRKNGKVDTYSYLRCLNERDAHCDVKALNYPVIERAIIEHVKGLNFDTMFKGTNNSELELLKTREVELLRDIATYEDAIAARKAAGKNTSPVLVTSLVDAQDDLEALQKKIRAISGVTVNAEELTSLNESVFDVAEYELRNMVELELQKIIKRITFNCTEKNIYFITIQYNTGTVLQHGLRVDKKKGVIETYELHEGNKGYVSNGEVITPALIEAAESKNIGIFEGKVM

SEQ ID NO: 6190 - protein, 460 aa, synthetic construct
MRVAGYARISFDDDGTAAGVTRQTEDIAALVKRKGWALADMYVDNNVSAYKNVVRPEFERLLADLETGVVDGVAVWDCDRLARKPKDLERLIDLYDQRPLAFATCQADIDLSTPDGRFLARLMVSFASKSSSDTARRVARAQLQRAQSGGLSGGGAKPYGYQSDHRSIDPAQAAVLREAAQRIMDGDTLIGICRDFDSRGIPTPGKSLKWNRTVLRSMLLSPRNAGLRAYKGALLMGDDGEPVKASWEPVLDMETWEAVTAVLTDTSRQANGGRVDRKYLLSGFLACPCSARMTGAFSKGAPEYRCPTDRGCGRTRRKANPIDAHVEKAVLQYLERQELTDHSEDVLDMGVDNSIQEAEKSLSNLIDEWTAGRISDSVFFTAQARKEAVLNELKAQRSQEKRRQTMKAPVGAGVRDAWAMTTLPQKRAILREVIQAVKVFPKPVTAAKRFDPKYYEILWN

SEQ ID NO: 6191 - protein, 514 aa, synthetic construct
MTRLYGLDLDLYIRKSRKDIEEEKKAEGQGQTYDTLERHRKRLLEVAKRENHNILEIHEEVVSGEFITERPKIQKLLRRVEASEIDAVLVIDLDRLGRGDMLDQGLLDRAFRYSGTKIITPNEIYDPEDESWELVFGVKSLVARQELKSITKRLQNGRRDSVKEGKSISRKPPYGYLRDEKLKLYPDPETSWIVKKIFEMMSGTYGRRTVAEELNKLSISPPTGVTWEPTTIAEMIQNEVYLGSIIWGKFKSVKRNGKYIRKKQPKESWLIKSNAHEPIVSEELFKAANMAYKQRWKPHTIKGKKLSNPLAGILKCEICGKAMANYPRKDRPNDQIRCSNIACKGIQRGASLNIIEEKVLQSLAEIVESFELPLKEHNKEIDSDTPLKRKALEKKEKEIEEIIGQKNNLHDLLERGVYTVDVFIERQKILTDRIKELNESIKLLSNEIELEAQIEKTQNEFVPKIKTVLESYHLTDDIEMKNMLLKSVITKATFLRKNDWKKRDQFIIQLYPHI

SEQ ID NO: 6192 - protein, 560 aa, synthetic construct
MHNHAMDKSNLDMIQSEPQKKAAVYARVSTMEQAEEGYSIDEQTRVLREWCEREGYIVYKEYVDRGKSGKNIKGRPALQQLLSDAQQKTFDVVLVWKMNRFSRKSLDLLSIVDKLKGKNIGFRSYTEKYETESPSGVLQFQMMAAIAEFERANTAENVKMGMLARAKEGSWNGGQVLGYDVVSTPSDNSKRKLSKLVVNEVEAQTVRKVFQLYTEGHGYKYITGYLNQGGYRTKRNNEFSITAIKTIVTNPVYKGVIRYNVRRDWNEKRRNNINPHPIMEKGQHEAIISEEEWEKAQAIMKTRGGKPNRVHSGEFPLTGILRCPMCGAGMVLSRTTNRKKDGTKRVIEYYACGAWKNKGTTVCRSNGVRTDYADEYVLKKIANVANNEILIQQIVDKINGKNQDGDAPIRKEYESIKKSLDAIQSKKDKVLGLYEEGLIIKADLVTRLSSLNEEKERLTERITPIEKQMGQGPVREINFKIVAQVMKNFIASYKEAMTREQRKQLLHLLIRQITISESREIESIQIQLNKEVVRHFTIQGGEKSSISDDFSPPFSIYFNI

SEQ ID NO: 6193 - protein, 689 aa, synthetic construct
MTMSPKIADQHLSRPACIYIRQSTMGQVRFNQESTERQYNLMSKAESLGWKPEQIRILDRDLGQSGAATTNREDFKALVGEVAMGRVGAIFSLEASRLARSNQDWHRLLELCAITSTLVIDEDGCYNPAEFNDGLVLGMKGTFAQAELHIIRARLHGGKLNKASKGELRFPLPVGFVFEDDKIVLDPDQEVQGAVRTVFDLFARESTAFGVVQRFNELDLRFPRRAYGGAWDGKLLWGRLTHSRVLGILANPSYAGTYVFGRYQSSKEVASSGEIRTRSRLMPQDAWRIVIPDHHEGYISADQFIINRQRLTANRTNAEGLAGPVREGLCLLQGLLLCGVCGRRLGVRYTGNGGIYPIYQCVWKHREALASRACLTVSSTALDQAITERLVSAITPVTIELALAALSSLEERDRDIGAQWRMQIERARYDAGLAERRYEAVDPSNRLIAATLETRWNDALQRLHGLEAELAAFERKTMRAVTAEQKQQILRLAKDFPRLWAAATTTPRDRKRILRLPVRDITVVKGPEPKTVRLHIRWQGGEIETLCLQLPRNRAEAIRYPMAFVARIRELAADHHDDEIVTMLRDEGQKSTATGKLITLGTIKWLRYKYRIPAPPPPEGTLNVRQVRDNYGVSLWVVHYWIARGIVPAVNRKWNAPYAITIDKELDRRLREWVVNSAHLHPSSPTQAA

SEQ ID NO: 6194 - protein, 536 aa, synthetic construct
MLRQTNQQPITALYPRLSHEDELQGESNSISNQKRILETYAKQNGFSNLRWYTDDGYSGANFQRPGFQAMLADIEAGKVGTVIVKDMSRLGRNYLQVGMYTEMIFPQKGIRFIAINDGVDSAQGDNDFAPLRNIFNEWLVRDTSKKIKAVKRSKGMSGKPITSKPVYGYLMDEDENFIIDEEAAPVVKQIYNLCLAGNGPTKIARMLTEQQIPTPGTLEYRRTGSTRRYHPGYECKWATNTVVHILENREYTGCLVNFKTEKLSYKVKHSVENPPEKQVIFENHHEPIVDTQTWERVQELRKQRKRPNRYDEVGLFSGILFCADCGSVMYQQRYQTDKRKQDCYICGNYKKRTHDCTAHFIRTDLLTAGVLSNLRKVTSYAAKHEARFMKLLIEQNEDGGKRKNAAKKKELEAAEKRIAELSAIFKRLYEDSVTGRISDERFTELSADYEAEQRELKERAAAIQAELSKAQEATVNAEKFMNVVRRHTSFEELTPTLLREFVEKIVVHECSYDENKTRRQDIEIYYSFVGKVDLPE

SEQ ID NO: 6195 - protein, 678 aa, synthetic construct
MKKAVIYARYSSDLQRGESIDAQVRACKYFAQRYGYEVEKVYADRAESGRTTANRAQWMSMMEDASRREFEVILVHKLNRFSRSGLDTLNYKGQLAQYGVELVSVTERLDDSPEGRLMLYVIAGMNEFYSANLATEVMKGLKENAYKGRSTGGRPPLGYDLDPETKKLVINEFEAQAVRIIFDMYAGGFGYGAIIDRLNREGYRTKRGGQFGKNSLYDILKNEKYIGVYTFDKSTPKGKGPRSDRHKYKTEYIRAEGQCPAIVDRDVFEFVQKAMEANRHMTAKGKATTNYLLTGKLICGECGHKMVGEKRGYDGRTYFYYVCNAAKRKGTCTKAAVRKELVEEMVLDALNQMAFSQQSVDAMAEAAFSTYSDDQQGATARALDQQLVETEKNISNLVRAIMKGIDDPAVQDELQKQRLRKDTLQVQRAALEDIPDQRMDLEQLKDYFKNFLDIKNLSEEAQKSVIQRYVDRVYLYDLPHTPDDPKGKQYEIKLVLNPNQEDLTGLIDFKDMRGSSLSPPRKTRLNNVFRRVLFLFTITRIITHYDGIFYPNYTGKTTEKRAVEPSFQGTAVACAVLALSTAYLGYSLSTCQEDLEAEKELADALHKSSISHASKEAKLRKTVRLYQNHLVFYSLQESPCYHAPICDRLEGFRTVSTCSLDEAKRLGLSPCLFCIETE

SEQ ID NO: 6196 - protein, 548 aa, synthetic construct
MKKELIKVACYCRVSTKADEQEQSFEAQQKYFKEKLSKKKGFDLVEVYADKGLSGTDFSKRDQFNKMLDDCGIIKKEVKARKTEIRKKYISIDYVADANVKPKFTLIYVKDSSRFARNTEVNRIISRLRDKGVYVYFEDLNKSTENPSEKMLIDFMFSMNEQESISRSIKVRFGNMQSAKDGIVRSIKLYGYHYNKEENSLRIIDDEVNIVKLIFKLSLEGNGGRAIATILNSKGIKNRKGNEWRPNTINGMLQNPTYCGKVVRNRWYSSRMYGKDIVKLNDTKEWIVEDSNKVDKIIDEETFTIIQDMIEKNRNKVGRPTGKYHGRSEFAGKIKCEKCGKYYVRNTDRGRVFYNCSTKKQHGLKKCDSRNIQEYEIESLINPYLEKSGYKNLTKKYIDILIEKEEEKKASLYRDACTDEINNIKEEVFKHKGKLSKLTDILLADDSESVRDVFNIKKKEINNKLKELESELDKLTTTDKQKAEKLNNMNMCIKTLQERYNDIPNEITREYFINNCLDEIRVSEKGELKLLTYTHYAFEKIMNLMDEY

SEQ ID NO: 6197 - protein, 550 aa, synthetic construct
MSTTEQLKGFSLERQRKLIADFASRNGLSLDESHSIEDIGRSSFSDDAEQRQLARFFTDLEAGKFSPGDVFALENIDRLTRRGPFDALMKVNTILSKGLKLAIISDKEQKTIDDINDVYTIINLSIDAKRSHGESKNKSNKGLSNWEEKRQLAARHGVAMTAQAPAWLDTETFYIMDESKGIQVKRRRYVLNPEKSETVRLIFELFQNGNGSLKIKNILNERNIPTFKGAEYWEPSIISKILRNPATHGFYQPQKQGTGKRDLIPAGEPIHDYFPAIVSLETFEQCQRITAANSTRKGRKGKLFTNLFTGLLKCVDCGGPVHLLNPGIDKRAKVPKSVNYIVCKKGKFTRECILKRLRYDDFEAVMLNAIQEINLADVLNENNPLEQLIKQIRAIETKIEKNQKLLENFQKSFVETGDLPAFMIEAAKNAETANKALEIERIELQAQISQLNVYNANIENAIDELKNNGTYETRAKINLLLHDIIKTINIDFELLDYAIIFKNGVKRFINDGIVQNVFTTKTGSDQYYSEIEEILNHPTTQQTKQHAKKI

SEQ ID NO: 6198 - protein, 507 aa, synthetic construct
MKRVISYIRFSSERQAKGDSLRRQSKMVNDWLKAHPEYYLDQDLSFRDLGVSGFTGKHLKGGLGDFLTAIEKGLVKAGDTLLIESLDRLSRQDIDIASELLRRILRAGVDIVTLSDGEHYTRESLKDPLALIKSILIMQRAHEESLRKAERIQAAWDAKKEAAKAGIKISKRCPAWLKLNDDRKTFSVIPEKVETVRRCFQLRLEGKSIWEIVRTLNDEGHQTLNQYKAGKFGQTSVQDLLKNRSVIGYFTPKGCEEIAGYFPPIIPETDFYKVQQLSYSRYGRKPASDKPLSVNLFKGVIRCSECGHALIITGFSDTRNGIYRCPLRNENRCSAKGLSRKQTDGTLLALLSRIDRFDSDMTNTIDTLKLHREHISSNIEKLVQLSLEIEDLSAITSKLKQLKGELSQVNADIEKETQRLKSIDVGCLSDCDLTTKAGRIEAQLIIKSAVKEVIINTAKRRCKVTFHNGKVIDLPITEDPSENVTEAIQSLSEVTERGLIDVDEVII

SEQ ID NO: 6199 - protein, 689 aa, synthetic construct
MAETEIIRARSWTDVHPQTLLRVAAYCRVSTDSDDQVASYKSQVDHYREKIRGTRGWLLVDVYADEGITGTSFEKRKEFKRMIDDCMAGKIDMVITKSLSRFSRNTEDTIKYVRLLRDRAIPIVFEEEHINTCSMDGELMLTVLGAIYQQEVQNTSNHVRQGLKMKMKRGEAVGRVKVYGYDYDKSTKTLTINPEEAEVVRFIFQRYVEGLGAHKICLELEEKGIKAPKIDYWTNAAIIRIIKNVKYRGDLLQGKIYVNDPIRRQAVINFGERDRYYVKNHHEAIIDEELFDKAQEILRNRREKYNLSQVTGKHREKKQSEVFCKKIYCAECGKAFVKRRRQRRSGGKPDLIKWQCGGRANHGSKCSNKREWHNSWIESAFVESFNLLCRTGYSSMDAFLDVMKTVIRKKERERKELGRYVKADVDKLQQQMDMLLNQNLAGDIEKALFNARYNALRKELIKAKSEAEKIASRLKNSNGLVDVIRKLQIELRQKGPLEQFDAKVFEEVVDRVVIGREENKEYITFIYRDGEENSFNIESFQKAVGLKRQLNMVSAHHKNKKDNMHLSKHKQNVGLLPRLDSRGGADCSHHTVKKTTEVELTTKAEQGNFDKNEGKVAAVDIENCSMHSVKGSLHNTLSTKNAMSEPLDITGQNDHVIEGAEDCSMRSVNRSAHRAMFDWNYGQHGGAPL

SEQ ID NO: 6200 - protein, 617 aa, synthetic construct
MEVQVIKSTKKEQAPSTAANSKIYHVAAYCRVSTDELEQKSSYESQISYYKQKIAEHNDWKLVGIYSDEAISGTQTNKRTGFQDMINDCRSGIIDLIITKSISRFARNTQDVLKYVRELQDRHIAVIFEEENINTLRMDGELLLSILSAVYQQEVENTSAHVKKGLRMKMQRGELVGYAACLGFDYDVQTKKLSINPEEAKIVRYIFKRYLEGAGALKITKELEAMGVKTKRGSSNWAPTTVIGIIKNEKYVGNVVQGKTYTVNPITKKRRKNNGELDSFRRIDNHPAIISKEDFALAQEIRMGRGAAQSSTEVGKITRFGRRYAFSHMIECGFCGEKYVRRSWHAGTSYAKSVWQCGKSTKEGRKKCPHSRIVSEAELEKAFVDSYNAVNTADNAETMVIFEDLMKEVITKQAKGESKGQLESKIAVVHKKIDMLLDMHLNQEIEDDDYGKKYKMLREELAELDKRMKSMEAVKLAALTPEQRLMKFRKVITENPDLPEFNRDLFEAVIKKVTIGGISPDGESNPCLVRFEYVHGIIDEKEVKGTSKGAKTQEEELSVTEVHEEHSDYGKAAQLTDLQKKSLDSMLGNGVISKTLYAKTADRLINANKVTGGLPGR

SEQ ID NO: 6201 - protein, 481 aa, synthetic construct
MKAALYIRVSTDRQNEEGFSMEAQHDVLMELLEKKGMELYRVYSDPGISGRTIKKRPGIQRLIADMKAGKFDAVLVHKLDRLSRNLGDLYEFIALINKLNKRFVVASLGSEEIDTQSPMGKAFLYFNGIFAEIYSDNLREETLKGLTKKMENGGLHMSKAPLGYDIEVIDGERKLIINEYEAKLIKEVCRLYLAGKGVVSIAKHMNGHSRGKEGGVWDSKYVRIVLQNHTYTGHNHFKPVLWEESKRIIKPGEHEAIISMEDFLKVRKMMARRGEGHMARHSYEYPYGGIVKCGLCGATYIGNASKQKLADGTERVYRSYRCRNQYSNKTCDAPGISELHLQQLIFEKLQITNKKLQDKKTSAQAKSDQRLLQKEIEVSNRRRKNWMLALGDGKLSPDDYANLIDEEEDRMKTITAQYEEKEDYYINELSTEEIKDMMANLKDNWVLIEAETQKLLVQSMFRQVVIKKESDKWGILQMRTV

SEQ ID NO: 6202 - protein, 548 aa, synthetic construct
MRNRAAVYARFSTDLQNEKSIEDQIALCRDFARREGFEVIAVYQDQARSGASLHGRDGILEMLADAKAGRFDAVIVEQMDRLSRDMEDMAGMHKRLSFMNIKIVEVHGGEANTLSVGMRSIFSQLFREDNMHKVRRGMTGLIKQGLTAGGKAYGYQPDPANPGRPTIMEDEAEVVERIFKDYEAGISPRQICYRLNGEHVKPPRGKRWEPSALYGNKDRGAGILRNPIYTGRLIWNKVHMVKDPDTGKRLSRPNPPSDWQRADVPELRIVSDELFDAVQVQLAARSHTQRKDNVGAQRRPVRLLSGLLKCAACGSGMAVAGPDKSGKVRLRCSAHKNSRSCPDPKTFYLIDVEELFLDSLTRELATPDQIHRYAKAYMEKLHANAEHEDRRRRQIDKRLGEIEKDNERLTDMLMRGLGDTRVIDKRIKEQAEERADLERELRSLPEASNIVVLPSAIKNFADKLRQSRAKTEVVLQTLDDMGELPRLVRELVHSITLRKTETGKVEMEVVSSLEPFLHDDENPVKANRGWGVISMVAEEGFEPPTQGL

SEQ ID NO: 6203 - protein, 532 aa, synthetic construct
MTDTKLKNAVFYGRVSDVKQATVRGDALHSQERTCREYAERKGYVIREVFTDTLTGAHTNRPGLQAMLAYIRQHRGTIIIVDHSNRLGRDMLSYLMVRQEIKDAGGILESPVMGFEETSSDQLVEHVIASVNQYQRQHNAEQTKSRMRARVSGGYWALAAPVGYRYERVTGRGKIMVRDEPVASVVQEALEGFASGRFEKQADVQRFLQNNPLFPKDKRGIVRHQRVSVLLKQCLYAGYLEMPRWDISLRPAQHEPLITFKTFKIIQDRLEGGIYAPRKKNVNEDFPLRGYVMCDDCGTPLTSCWSKGSHNKYPYYLCPKRGCASYGKSIRRADIEGQFETLLQSLTPSDSLFRAAKRMFKDLWDHRISQGQARANALAAQLPKIEKQLDQLLDRITDVSVPSVIAALEKRIGKLEQEKIVVQEKMAQAPFAKTSFDRTLRTALAFLANPWILWRSDRLEDRRTVLKLAFAGPLRYQRENGFRTVDLSLPFSMLAGISGDKEGMARPKGFEPLTPRFVVWCSIQLSYGRVIA

SEQ ID NO: 6204 - protein, 453 aa, synthetic construct
MEEAIAYVRQSTLKQQSLATQKSLIMDTAKQYGWSNVTFYDDKKTGRHTKRSGYQRMVEAICSGKCKVLCCYRLNRLHRNLKNAIQLFEICKTHHITIISVNDGYFNLAKEFDCFRLNILMSLAEMESNNISEQTKNGIREKAKQGKLITTHAPFGYRYRQSHFIVHEEEAYTVKAVYRWYLQGLGYKKISQHLDNNPKLIPRKPYQVRNILLNPNYCGRVINKYGTFNNIVPPIIDVDTFEEAQERRIHKQHNRSNSRNKLKRRIKCPYCQSTLTNLTIKKENYSLRYYVCPKNMNDAYRTCPFKSINAPELESEVLDTCKKYFEEQWFHNRLNDTILKVLKQQQLKHKETHLTQEQLIEKLAQNRIDVKTFKRLSASCKSEENYPTYSTYQIDDKLKYVIKNKITLQDIAPLIDEITITQTKQLQGIYFKNSPLNIVEQSHLIISERNEVV

SEQ ID NO: 6205 - protein, 501 aa, synthetic construct
MGNSLDIYIYLRKSRADNASDPIDVTLRRHRKTLEQYAEEQGYNVLGVYEEVVSGDTLYARPEMLHLLDQVEAGACDAVLVMDLDRLSRGSMRDQGTILDAFRLSGTLIITPEKTYDLSDETDEELTEFKAFFARREYKIITKRMQRGVRRTIQDGGYIANAPFGYKKVRKGKLPTLEVDETEAPYVRMIFDLYTQGIGTTTIADTLNSLGIKPHRAEQFGRTSVMHILKNPVFTGKIVWDRKKHVRKGAQGNAVHVTIYQPEDRWTVTEGKHEAIISEEQFQLAQQIMKNRYIPSKRKTGVIKNPLVGLVYCSGCGKLMQRMGEANGVPYLLCNTKGCVAGAQFRFVEESVLQFLRQTLSDLQARIASKKKPDIKPLESVIQMAQKTEEELIKQKNSLHDLLEQGVYDVSTFKERTALLNQRMAENANRQAEAQKRIQQLTKQYDKELAKRIKNVLDAYQPSDPAKRNQLLKSVIDRIDYYKKKKTSPTDFTLSITLKMA

SEQ ID NO: 6206 - protein, 416 aa, synthetic construct
MAQVSVVTPVRPPTPKLVNVAAYTRVSTNAVEQLASLSAQVSYYSRLIQSTPGWAYAGVFTDEGITGTSMKSRQGLADLMNAARAGKIDLVLCKSISRLARNTVDLLATVRELKDLGVAVRFERERIDTLSADGELLLTLLASFAQEESRSLSQNVKWAIRNRYKNGGTNSFVVYGYSWADGEFTIIDDEAKIVRLLFANYLDGISPEKTAAILNGQGVRSRGGGRFYGSVFRRMLENERYKGCQMLQKMYRPAIQAPTRALNDGELPRYWGEQALPPIIDKSVFDAVQAEIAYRREIGPAATPSKNTGVFTGRICCGACGKNYQRKTRTYKSGTSYKFWRCWSACTGNGNPCRGHNLRETLLEHACADVLGTQSFDPVSVVEQIVMIEAFEHQLTFHLADGTMTPVGLTSEGRLV

SEQ ID NO: 6207 - protein, 525 aa, synthetic construct
MSRTVTAIPATKKPGTVTTLSGVPARRRVAAYARVSTEMEEQTSSYEAQIDYYTTYIRSRNDWQFAGMYCDEGISGTSMKRREGFQTMIDDALAGKIDLILTKSVSRFARNTVDSLTTVRKLKEVGVEVYFEKENIYTFDAKGELLITIMSSLAQEESRSISENVTWGHRKRFADGKVMVPYKSLLGYKKGADGSLVIDETQAPTVRLIYQFFLDGMAISEIKTELAARKILTPRGKEVWSTSTVRSILSNEKYKGDALLQKTFTTDFLTKKMKVNEGEVPQYYVTGNHEPIIAPRIWDQVQYELTTRHGNISSAKVGLFSTRLKCAQCGAWYGRKTWASNTKYKYTVWQCNHKYAGEHPCSSATVKDEHIKNAFVQALNQLIARQPRQSHLLQIFDSMFDTSRMEEQAAACQTKIVELTEQIEALIAENQQRALDQDAYQNKYTELDTAYRKTLARKTSLEADIAANTAKHAAVTTALDDLAGEPVSEFRPAQWSALIDHAIVDEDTIRFVFRTGEQVSMTLQG

SEQ ID NO: 6208 - protein, 416 aa, synthetic construct
MAKIKQITRLSVSRPKLVKVAAYARVSTSTRRQLSSISAQVSYYSRLIQSTPGWDYAGVFIDEGTTGTKMRGRQGLADLMALAHGGGVDIVLCKSISRLARNTVDLLQIVRDLKNLNVSIRFERENIDTSTNDGELLLTLLASFAQEESASLSANVKWAIRNRYKDGGTNSFFIYGYVWTQVKFVINHDEAQIVQRLFSNYLAGISPEKTANQLNNEGLRSRGGGVFHGSVLRRMLENERYKGCQLLQKTFNKTIRSTSRTPNDGVLTKYWVEKALPVIIEPALFDKVQQEIARRRQIGPAATPSLNTGVFTGRIRCGTCRRNYQRKTRRYASGNYYHYWRCWSACKGQGNPCGGHNLRETMLQSICATTLNLEEFDEHAVENHIVTIEAFPDHLMIHLRGARSIKIALDKQGRLT

SEQ ID NO: 6209 - protein, 525 aa, synthetic construct
MNTLARSVTAIPATKKPGHNLTACNPLFKRKVAAYARVSTDLEEQATSYQTQINYYTTHIQSRSDWEFAGIYTDEGISATSTKHRQGFQNMITDALNGKIDLILTKSVSRFARNTVDSLTTVRQLKDAGVEVYFEKENIWTLDSKGELLITIMSSLAQEESRSISENVTWGHRKRFQNGKVMVPYSSLLGYKKGADGNLVIDETQAPTVRLIYRLFLSGLSITEIRKELQHRGILTPRGKTKWSTSTVRSILSNEKYKGDALLQKTFTADFLTKRIEENQGQLPQYYVTSNHEPIIDPKVWDQVQYELATRHAANTAKIGLFASRLKCADCGSWYGRKTWASNTKYKHTIWRCNHKYDHPRPCQTATLRDQQIQTAFLSALDQLAKNYRGKDHLPQAITEMFNTDQLEAESSHLDDKIRALANQIEELIAENQRLAQDQEQYLAKYTQLDAKYQKTLAEKHAVNAQITAKNAKATAIKTAYSQLADKPIEHFTACQWNALIDHAIIGANQIRFIFRTGKEIMVNL

SEQ ID NO: 6210 - protein, 413 aa, synthetic construct
MAKIEQVTPAKPVRVKLVNVAAYARVSTARERQLSSIAAQVSYYSRLIQSTPGWVYAGVFTDEGITGTKTSGRQGLADLMELARNGGVDIVLCKSISRLARNTLDLLRIVRELKNLGVSIRFEREHIDTATADGELLLTLLASFAQEESASLSANVKWAIRQGFKQGKTNSFVLYGYRWDGERFHIETREAEAIRRIYTSFLAGISPEKTVAQLNAEGYRSLTGKPLDPNLARRILENERYTGNQMLQKTFIPAIGAKREVKNNGELERYWVEDSHPAIIDTETFQQVQTELARRRRLGLAATPSLATGCFTSRIKCASCGRNYQRKTRYRKAGAYKIWRCWGACLGQGNTCGPDLKETRLKQTVIKILTLAKWNEEEIMSRLSCITVMKDKLIFTHDDQRQTIIALAQLEGE

SEQ ID NO: 6211 - protein, 531 aa, synthetic construct
MATITAIPATKTRIHDSALSGFSSKRRVAAYARVSTDMEEQATSYQTQIDYYTAHIQSRADWVFAGMYADEGISGTSTKHREGFQAMIADALAGEIDLILTKSVSRFARNTVDSLTTVRQLKEAGVEVYFEKENIWTLDSKGELLITIMSSLAQEESRSISENVTWGHRRRFADGKVMVPYSSLLGYKKGADGNLAIDETQAPTVRLIYQLFLDGSSITEIRAELQRRGILTPRGKTNWSTSTVRSILTNEKYKGDALLQKTFTADFLTKRIEVNEGEVPQYYVTGNHEPIIDAPVWDQVQYELATRHATNTAKIGLFASRLKCADCGAWYGRKTWASNTKYKHTIWRCNQKYDHPRPCQTATLRDEQIQTAFLAALGQLAEQYRGESHLPQVIDAMFNTDQLEAESKRLDEKIRALASEIEALVAENQRVAQDQNQYLAKYTQLEAKYQKTLGREQAIKAEITAKSAKATAIKTAYTQLADKPIQHFQPSQWTALIDHAVIGANEIRFVFRIGTEFTVPIASRLPVSSTS

SEQ ID NO: 6212 - protein, 553 aa, synthetic construct
MALFQTPGYGPAVETKRAAIYCRISRDKEGRELGVARQRQDCEALAQRLGWDVLEVFVDNDISASTRSTKPRPGFEDMIRRVEAGEFNAILSYSTSRLTRRPMEHERLIPLFQERKIPISTVKAGDIDYTTARGRSRARDDARRDAEEAEEISERVSRAAQQRAENGEWHGGTPPFGFLAVKEVVRGRERVVDLRPHPEHAAWVTDAIDRLLAGESLYGICTDWNSQGRRTGWKRYARTESGGFLRDDNGRRLNADDNSGWHPRTLKRVVTSPTIAGYRELDGQRYEATWDAIVDRDDWERVRTLLAAPERKLRGFNNGNARKYALSGLVFCAGAMKDKSTCGRVMVSMSSTRVVKGKRMRRLSFVCNQLATGGCGSMRIEMAHLERYIFEQVFQAADSPELRAAMSDQADDIDEAEESLRKSIADGERRLVRVEDEYDAEEITKAEYRRRRAKIMKQVEADRAALAKATRSRVHTRLPSGAELRAVWADKDDTWKRTILASVIERIEVSRHPAGVASNLTPRRGEDPEAFSQRLDLHRARVLRQRVSVQWWA

SEQ ID NO: 6213 - protein, 452 aa, synthetic construct
MKNRRTALYIRVSTDAQFEEGYSVDAQKEKLAQYCKLKDIENYEFYIDGGWSGSNIDRPEIKRLITDIKSGKIDAVVVYKLDRLSRSQKDTVFLLEDVFIPNGCAFISLNENFDTSTPYGKAMIGILSVFAQLERENIRERTRMGMYERVKSGLWMGGGRVPFGYDYDREKNTLVPNEKAEQVRQIFQLYLQGYSTTQLAGMFDVSGNQHISAILDRETYLGRIRFRGEVVESCHEAIIDEETWRRVREERRRRSRGQAGNTSYLLTGLLVCGKCGAKMRYQKWGRGLKIYCYSQQKSKPTLIKDPDCVNMRYDADEVENAVIADVFEKTRSITANGGGRREISAEEVLKRKYDTAAGKLKRLYELYARDGEEVLFETINEYKAQLADISAAIENEKQTKAVEEELAYKRGVLENLAGLWDEMTVAEKRRALRTCIDRIVLNDEDIDIVYLV

SEQ ID NO: 6214 - protein, 521 aa, synthetic construct
MSNENIAAIYVRVSTLKASQKDSPEHQKAVCLEKARMEELDPQFFYEDKSSGTSIVVRDEIKELLEDAKKGYFQTIIFASLSRFSRDALDAVTLKRKLVNALGIRLISIDDTYDSQEKDDEMIFTIISAVNQKLSEQISLSSRRGIRESARSGNFTGSFAPFGYKKVKTGNLKTLEISEDHALIVKQIFEWYCYQNMGEKSIIEELNKRGIPSPKGGLWGITTVQRMLQNEAYTGRNVFNKYTVEKHYDDVDDMQNRRNKFVQKEKEKWLRNEEQNWEPIIDDETFQKAQEMRLLRGGGKRGGVRGIAVNAFAGIAKCAHCDSNFVSMKTSKKGKKEYRYLICSRRRRIGTVGCENGLWIPYESFRDELLNELTLFLQDAIKVDEITERVKIPTYNHVETKEKDKDKYERMIQENRKLLFELRKDRKLGEIDEDQYQFEKNEYEKEIENLQDKLRGIKVDKKRPIVSDNEIKEQIRTGLTKLQNLDYKDVKELQMILQQLLHKVEIDKDGNIDVFTPLGKL

SEQ ID NO: 6215 - protein, 536 aa, synthetic construct
MPQTAIIYSRFSSAEQSKGYSLERQQTLGGQFASENGWTVEATISDEGRSAFHGSNRLEGSALHQFELEARNQLHRGKVLVVENIDRLSRQGAKAAAQLIWALNEAGVDVATFHDAHIYRAGNEGEMIDLFKVIILAQQAHDESEKKSRRTSASWQKRFERMADGTQTAPIPHRPHWVDMLDGKMVLNAKRTALLNEIYNLYINGVGIHRIVTLLNARDEPRWTPEKSERAKNGWFYSYIYRLLTKRTVLGEYVTMDGKTVSADFYPQAISASKFNQAQAALAMRKGNQKTEKENFNRNLLQGMVFCEQCGGGAHFRHQIDKGQTYTRKNGVVVTYKRNDNRRMRCDRARRKHHCDNGTILSYDVIEATVLNEMLPQLVDRQLEDKHHAAARERVAEAERQKDVTQARLNNLIEALEEGGSKTVMARIATLEAEVEQQTALVEEAQRAIAIQQSLPSYYDDATLIELVKDELNSEWDEVRSYARGKANMALRRLIKRILITNTGCFRIEPDDHSWWLFDATGKMLEGQTTYQQATE

SEQ ID NO: 6216 - protein, 527 aa, synthetic construct
MRTLIYARYSSALQNTWSIEDQVAACRERGEREGWTIAGVYEDRAISGAAGMGEAQRPGLAALLAHLGRGGIEQVVVDSTSRLARDQGDAHQLRKLINFRGARLFSLADGEIDAFKGAFKALLDEQQRVDLAHNIRRAHRGRVAEGRSANTVAYGYRRVSKLDDRGELIRGLREVDPEQAEIVRRIYREYVAGRSAQAIAFQLNAECVPPPKRGIWRASAIAAHRGEGFGILCNPIYVGRMVYGRTKAVVDPTTRERRFVKGDGHLTETAVPHLRIIDDALYAEVQDQLARRATPRPETQRRPKHILSGLGICGVCDSPWIIVSHGNWGCSKHDGGKACTNNRRIATRKLERTVLADLKGQMLAPDVVSAYLREYHREHARQTATLGRDHDRVERRLGEATRKVDRLVAAVAEGGSEFAEIRSSLASARDDRDALARELASMDALPVLTLHPGLADQYRREIEDLDRSLAGEETRLEAVPRLRKLIARIVATPHPSGRGVAIQVVRQIDQVLAFASTQIVSVRATSR

SEQ ID NO: 6217 - protein, 544 aa, synthetic construct
MNHVGTKAATQTKALIYCRVSDKKQKTQGHGLESQEHRCRKYAEDRGYEVEMVFPDDITGGVDFMKRPGMRAMLAYLDAKNEDNYVVIFDDPKRFARHTEFHLKLRREFAQRGARVECLNFTFEDTPEGLFVETVIAAQGQLEREQNRRQVIQKMTARVEKGYYVFHPPIGYKYERVAAHGKILVPNEPIASIIREALEGFADGRFTSQVEVKRFLEGKPDFPKSGKSGYVHPTKVRDMLERSVYAGCVEAPNWGVTLRKGHHEALISFSTYERIQARLKGTLNAPARKDINQDFPLRGFVLCDDCGEPMTSCWSKGRNQLYPYYLCDTPSCDSKRKSIRRADIEEGAEALLRSLQPAAQLFKLAKAIFTDIWEMRRADALGARKALEAQVIDTSKQIDNLLDRIMNSSSPSVIGAYEKRIEELEREKIRLAERAESAVPSEARLSEFIEPAMEFLASPWNIYKNGNFALKRTVLKLAFAEPLRYSRNEGYRTAETTFPFKVLADFSSLKCGMVGDPGIEPGVRLREGAKRVLPAVRGAGSIRW

SEQ ID NO: 6218 - protein, 575 aa, synthetic construct
MTQNQTVKVAYSYTRISTREQAKGEGILRQLATARSWAESHGYRLDESLSDIGVSSFRGANRKRGALAGFLEGVQSGEIEPGPLLVENVDRLSREPVMTAFGTFQSLIHAGVTVVLLDLGPGWELTAQVLNAESWRLQAVISMMQRAHDESRTKSHRSLSKAESKRRMAVTGIPFSKHGPAWLVWSSTGWLEHDERVQVIKKIFTLALDGLGSYRIALALNRDAVPTFGGAATWQSSYVSKILRNEAVLGVWKPHRLVDGKEQPTGERIEGHFPSIIEKADWLKVQREILPRNSPGQKGKHRSNLFSGKCFCTLCGWPMALNAVHKGGKKAGYLVCTQKSRLKACKAKRNFRCDVVEDAVLSEIHIDLGRMGRDEAAAAKTQEIERRVGGAEYDRGEAKRQLDTFTLALAQAKPAAMQHLMNEINARATQIEALDEEIATLGAELARLRATPKDLVRGLTTLKRKLAKANDEERYALRSKLALVLGKAITRIDCDPDGFEVRVAVRDVIYIFSGEGAVLAVQMLRFGEPDEELLEWAAFNDCGISIVGDRVVLPSVAHAVHYRLRFGGVLRMQAE

SEQ ID NO: 6219 - protein, 487 aa, synthetic construct
MNMHSPTVTARAALYLRVSTARQAEHDISIPDQKRQGEAYCEQRGYQLVETYVEPGATATNDKRPEFQRMIEAGTSKPAPFDIVVVHSFSRFFRDHFEMEFYVRKLAKNGVKLVSITQEMGDDPMHQMMRQIMALFDEYQSKENAKHVLRAMNENARQGFWNGARPPIGYRIVAAEQRGSKTKKKLEIDPLHADTVRLIYRLFLEGDGTRGAMGVKAIATYLNERRFFTRDGGRWGLAQIHAILTRTTYIGEHRFNTRSHKDREKKPESEVAIMAVPPLIERELYDAVQARLKSRNPMVTPARVSSGPTLLTGICFCAKCGGAMTLRTGQGSTGATYRYYTCSTKARQGKTGCKGRTIPMDKLDHLVADHSGDRLLQPKRLETVLASVIDRRQERAERRREHLAELHRRITEAEQRLGRLFDAIEAGMVDKDDAMAKERMASLKALRDQAAADAERTQLARQFRQSGRHSQYAQEVCPQSPRTDTTR

SEQ ID NO: 6220 - protein, 536 aa, synthetic construct
MIAAIYSRKSIATGKGESIENQIDSCKDYIKRFYPSVTEFKIYEDEGFSGSNTNRPRFQQLLKDAKNKEFNILICYRLDRISRSVADFATTYSLLEENSISFISINEQFDTATPMGRAMMNISATFAQLERETIAERVRDNMIYLARTGRWLGGQEPYGYKAEKTVYLDQNFEEKTLMKLSPIEEELKIIKLIYEKYIEFNSITQVSNFLVDCGVKGKNGGDWSTIQVSRILYNPLYVKSDINTHNHLREQGINVYGDPNGSGYLTYNKTKKKRTSRDISEWISAVSKHDGIIDSKTWLMVQTLLNNNKNKKVKRLGTSDNSSLLTGILKCSFCNSNMIIKQGKMSVKEGKRIDYYVCSKKDSTKGKACNNKNIRIDRLDKIVIDQLKNYNKNSLISALESALSTTDDSDDNTKLQTLTTLIEENEKKINNLVKQLSLSTNETVSEIIMKEINNISKENSIIKDKLSTNTNKIEKTRMEINNINIALDMLKRFDTTFDVITDIKQKRLMLNTIINKVLWDGLEYKAKIVILDDKKK

SEQ ID NO: 6221 - protein, 484 aa, synthetic construct
MKAGLYIRVSTDEQAKHGFSIRAQKDKLTKFATSQDWDIEDYYIEEGVSAKDMLRPELSRMFEDIKTGKIDVVLVYKLDRITRSVRDLYNILDLLEQHNCKFKSATEVYDTTSAIGRMFITLVASFAQFERENLGERVRMGMERMMEEGKFTGGISPFGYHYNKEAKTLVIDDDEAQVLRLIFDSYMRGLGEERTAKKVNQMGHTTRNGTTWTGKTIRDILTNPVAAGHLRWGGEVYRNFVDPIISEDQFQQCLKLRESRREMSPRAAGPSHYPFSGILKCGRCGAALKGQYRVGRVKEDGSRSKFKHYVCTKARGGSCDFKQISDTVVNDVFLKRLNQDLKDYQTALDKEKDAQQEVSNIEKETRYLEAQINKIQSRKRKWQLAYADEAITLEELKERTAEDREAHEILTKQLDELKQEQPDADPVYMVDALTDFIENWHELDDQEKKITLQLFVERVVIDAEDRRGTKTQLRQAWITDIVYK

SEQ ID NO: 6222 - protein, 627 aa, synthetic construct
MITITKENLYIADIKVAVYGRVSTDKEEQQISFAYQADDLKKIVDEHDNWKFYKGYFDEGVTGTLAIKRDAFQTMIADAKKDKFDMIVMRDVSRFARYTKEFLEYLEEIHKNGVVVYFTSYHFLSNDPMAKMTLPILAVVAEQESENKSIYTNKAHKQRQEKQFPFGSDNHFGYDLIKTEKGYPNKYRRNEEEAKIVEEIYDMSLNKDLGCRLIAKELMRLGYRTKTGNLNWYTSTVYGLLINKSFCGYLAYNKSHKDGIHSERCKNKNKNEHLYVKSENMDTIIDEDTFNKVQQKLHSKAKISSHPQLDKNGNPLKDKNGNKIMKSLGYKPIIDVYAKKLQCQCGSSFKKNYIRRPDAKGNRAIGYTCNNYDSSLVRLTDDGEIKEKCNLTTFDKVKLDMSALKIFDIIWIDRRKSVQLAYNMIIDCYRTEMTKKVHKNPENLEKDIINLNIKKENTLDMFFSGKLTDENFQNILVRIDKKIMALKEELTNIQDDFEELSSFDEKDEKKKIIDFLNMTIEASINVYGYKEIDQGFVDSFVSKIVAYEDGSFDWYINLKGQCNKQSEYKNKFAKNYKNRYLIDDEAIPIADFTINYEDACKFVNTYGRKSFQKPAWKDIKVKILATY

SEQ ID NO: 6223 - protein, 691 aa, synthetic construct
MNAFSPLPPALLKRKAVVYVRQSSQSQVMQNLESQRRQYDLVDAARQHGFRRVEVIDDDLGLSASGAVARPGFERLVAWLCAGDVGAVLCFDASRLARNGRDWHHLLELCGLVDARVIDQDGVYNPCSPNDRLLLGMKGTISEFELGIIRARMLDAARAKARRGELRISVPIGYIWYRDAGLGFDPDLRVQEAVRLIFSRFRELRSGRQVLLSLTEDKLCFPRPTDGRNTTTFDWTPIRYRNVISVLKNPFYAGVYAYGKSEKRTEIIDGRARKTYGHGKPKEEWEVFLKDHHDGYIEWDEYERNQALLAANAYGQKGGAKSGRGGRALLSGLLSCGRCGRRLCVAYTGKTPRPVYRCERPNLMLGLNRCLGFGGPRIDKAVAAELLRVVQPMAIEAAMQAEHMQSEARAERRRAAELDLQKAQYEAALAERRYAACDPDNCLIAATLEKNWEVALKRLEACKTRLDAEQLPDTPAKLPDLDGLAEDLQAAWNAPGVSTRARQRLARALIKDIIADVDEEARDVVLTIHWQGGQHSQLRVRKPKTGEHGCNTSEDALEVMRSMAGRWSDSDIAATLNRMGIRTGFGHTWTAHRVSSIRRVNDIHAYFSAEKSGKWLTMTEAATKLGVTNHVIRNLIKAKILPAEQVVPRAPYQIKAVDIEREDIIEAINNRRRKRPYRDPRQIALPINSIT

SEQ ID NO: 6224 - protein, 696 aa, synthetic construct
MTTKITSDHLGRAAVVYVRQSTMAQVTGNLESQRRQYDLAGAAATTGFASVTVIDDDLGRSGSGSVERPGFERLVALVCSGNVGAVYCIEASRLARNGRDWHHLIDLCALTGTLVIDPDGAFDPRLVNDRLLLGLKGTMSEYELSLIRQRGIAARDSKAGRGEFRFMLPPGFCWSEAGKIEIDPDEHVAETIKLVFAKFRELGSGRQVFLWLRSADIKMPVVLRNVEVRKLVWKAPAYHSVMQTLHNPLYAGAYAFGRRAQRTLIIDGRARKANGLRKPRDDWSVLLRDNHEGYITWREYEENQKLLTENAHMKRNCDRKSARGGRALLTGLMRCGRCGRMMRVFYGSAKGNAHRYQCRGDDARVGLGLCIGIGGVRVDRAVATQILEAVSDRAVEAAIFASDQVERSARDVIAAIERDLEGARYEASLAGRRYELVDPAKRHVARELEARWNDALERVSVLERKIEELSALSAARPAIDRGRLLQLAHDLPTVWNAPSTDTRTKQRLIHILVQEIICDLDDTTNEAVLLIHWTGGRHTEVRVARVKTGRYPSDMAPPAVEALRKLGGHWPDRELAVSLNRMLCKTGDGEGWTAVRVRDMRERLGIPEYDPTKAGSPVISLMKAAEKLGICIGSAKSLVQKGILPATQILPGSPWMVPIEALTSEAVLIGVQGVVGRRPKIYEDYQYDKVVRLPGL

SEQ ID NO: 6225 - protein, 577 aa, synthetic construct
MPKVFSYIRFSSPEQAKGDSLRRQTEKAAEWCERRGLVLDTSLRDLGISAFRGANRDMGALRSFLQLVEKGEIEKGSILIVESLDRISREAVLDAAARLFDLIREGITVVTLSDGQEYSAERLRDDWTPLIVSIAIMARAHEESKMKGERVGAAWAKKKETARVEKRPLTSRCPEWLRVEDGRFVQRADRVETIQRIFAETIAGHGRRTIVKGLNRDNVPTFRGKLGWQESSVAKVVTNRMVLGEYQPHSGTHKARNRKPEGEPIKDYYPPVIDEETYWRAQQALQGRLVGGGRKGASGSHILRGIAKCAECGSPMHIINKGLPPKGGIYYLCSSARRATACENEKLYRVDRAEDSLLKILTRFFPQLLNLDAGEVKKKSAVEPLLAKLNDRQQARDRLQRLAEAVDFDDSTLSRYREIISEINELQKRIRELEIEERKAQSTPDIKSRLAQIELLNSKLKQADPSERTAFKTRLNEALRGIITQIKFSRELGAVMEMPRLVLLDINKTDGYVILNSPESTQAMLDNDPSHAMVETFVGRKLKHHNRKFGLYYTKYGTNDLEDQAAFEAAQADKRKV

SEQ ID NO: 6226 - protein, 453 aa, synthetic construct
MRKITKLETKNIELPKLKRVAAYARVSVERGRTLHSYSAQVSYYNELIQKNPEWEFAGVYSDLGISGTGIEKRNDFKRLLQDCEEGKIDIILTKSISRFARNTVDLLNVVRHLKELGIEVRFEKEGISSLTGDGELMLSILASFAQEEVISTSNNIKWAIKKKFESGKPQCRYKIYGYRWDGDNLVIEPEEAKIVKLIFQMYLNKVSAERMEIELKEMGVIATNGGYFNIGTIRDMLLNITYTGNLLLQKSYTPNPLVRRKVKNNGELPKYYVENNHEAIIPMEMFIQVQEERKRRKAEGQRANFGKNITCFSCRVKCPICGKNYMRNSRSKNSDGIKAHIWTCGTRLTGGSKACPGKTINEIALKRVSAKVLGLDEFDSNAFDEQIKKVIVIGDDLLEFHFNDGKIISEKWEYNARKEYWTEEKRRERGEKLKKSWRMKNDKKSNNDTSITK

SEQ ID NO: 6227 - protein, 591 aa, synthetic construct
MKDVEIIKARNVLSSRARTNLTKRLRVAAYCRVSTDSEDQLNSYKSQVQHYTDLIKSKSEWDLAGIYADEAITGTQVTKREDFQRLINDCMNGDVDMIITKSISRFARNTLDTLKYVRMLKEKGIAVFFEEENINTLTMDGELLLVILSSVAQQEVENISANVKKGLKMKMQRGELVGFQGCLGYDYHPEDKSITINEEEAEIVRYIFRRYIEGAGGSVIAHELENLGYRTKRGSTRWAETTVIGIIKNEKYKGDILMGKTFTLDPISKRRLDNFGEEDQFYIRDHHEAIISEEMFEKAQEILKRRAKPRRLGTDGKREKFSRKYAFSCMLECGFCGGTLTRRSWHSGSQYNKTIWQCVTATKKGKKFCPDSKGIAEETIEQAFIESYRLLCQNNKDVLDEFIARTEETLSDSNASKQLAKVEKDIAALDAKRAKLVDMRLEEIIDKETYEQKYFDLSSQIDQLQKQREDLQQSAETESTMKRRISEFRKTLEQNEVLNTFDRYVFESIVEKVIVGGYDENGNKDPSMLTFIYKTGFENSVDGANFKPPRKNSKAAKQCADLCSDTTDEVNAICSYHSNDTCREYREISEK

SEQ ID NO: 6228 - protein, 479 aa, synthetic construct
MKFAIYVRVSTLEQAEEGYSIEEQIDKLSKYCEVKNWDIFKIYKDGGFSGSTTDRPGLSSLITDSKRKKFQGVLVYKLDRLSRSQKDTLYLIEDVFTANDISFVSLNENFDTSSAFGKAMIGILAVFAQLEREQIKERMVMGKVGRAKSGKAMSWSKVPFGYIYKNDTYVAHPIQAPIVKQIFDDYMSGISITKLKDKLNDEGHIGKEINWSYRTIRQTLANPIYAGINRYNGELFEGNHEGIITKAFFEKVQNELKVRQVAAYEKNNNPRPFQSKYMLSGIIRCGLCGASLSVGMRAKRKDGSRHRYYRCYSKSKKKNLTMTKDPNGCTSPNYSMDELEKHILSQIEQIRLNTELINSLSANDSVVDFSSYNKRIDELDLSLEKIVNLFIDDAIPKDILEARMEKIKQEKDSLEKKIDSLKIKRPILEPMDAKEILSKLTDNIWNLSYMDQKSIVMELISKILVYPDKLEIHWKFAIN

SEQ ID NO: 6229 - protein, 472 aa, synthetic construct
MQTKRKVAIYSRVSTLHQAEEGYSIGQQIEALTKYCQAMGWAIYDNYSDGGFSGGKLERPAMQKMIQDAESGKFDTVVVYKLDRLSRNVRDTLYLVKDVFNANNVDFVSLQENIDTKSAMGNLFITLLSAIAEFEREQIKERMQLGVKGRAKSGKTTSWTTPPFGYEYNTNTQLMTINHYQAEIVRDMFDKIISGWSIMGITTHLRKTNSKKWTHVRVKRILENVAYIGKVKYRDEIFDGEHAPILTEEVFYKAQKALEERTNKKDNTRPFQGLYMLSNIAKCGYCGTPLKIDSYKPRKDGTRKRTYTCINRNPKRIKTAIYNDGKQCKESGRYDVKDVEKYVLTEISKLQLNPKSIESLYRDKPEENITAHQERLKKLETKLSKLNDLYINELISMEVLKQKSAELLKEKSSLETFINNNKRKTNNKPAFEKVAKMDDIFKMSYDDQKRIVKTLIKRVEVKRDEINVIFKL

SEQ ID NO: 6230 - protein, 465 aa, synthetic construct
MARSITVIPASQPYRVGGRTQQKTRNLRVAAYCRVSTDQEEQLNSFENQVEYYTKYIQDNPLYQMAGIYADEGISGTNTKKREEFKRMIRDCEEGKIDLVITKSISRFARNTQDCLEYSRRLKNLGIGIFFEKEHINTLDASGELLFTILSSLAQDESRNISENCKWGIRSKFKKGIPQVDCTKFLGYDKGDDGKLIVNQEQAKIVKRIYREFLNGYNPATIAKMLMEDHIKTGTGRAEWRSASVRAILKNEKYMGDALLQKTYTADFLTKKVKKNHGEVEQFYVKESHEAIISKEQWEAAQLELERRDSYMQELGLTFYGYGSEVNPFSCRVVCGKCGAVCGKKSWKSRGVEFWQCNNRSKNHGVKGCASENLPHEKLLKGFVAAWNQIVAEREQYLPKWEKKKKEGNPLERLRAEQMIELTLQPPLTKMLPELGQMVLERVIVQGKEIMVIRFLDGTEIKVKI

SEQ ID NO: 6231 - protein, 556 aa, synthetic construct
MAMMNEMEYRTIGSALAGGYRAAVYCRLSKDDDLQGESASIANQRDMLEKYCEKQGWEVVAVYQDDGFTGLNMERPDLQRMLRAIERRQINLVITKDLSRLGRNYLQTGHLIEDFFPRNGVRYIAMNDGIDTLRDNNDIAPFKNILNEMYSKDISKKVHSSYLLKAQKGQFTGCLAPFGYRKDPEDKNHLLIDEETAPIVRLIFGYALNGHGPNYIRRRLEKEKIPCPTWWNRERGLRNTRTKWEKKDPENGRYMWDFSVIKDLLMNPVYTGAIASQKKDYRFKIGTIGEKKPEDWIVVEGQHEPLIDRMSFDIVQNKLKSRQRPGQTNEISLFAGLIKCGECGKSLTVRYTNAKHPQRIYSCKTYNAFGKNHCTQHRIDYCTLYSHVLRKIRECARAALMDGEAVADRLTNTCEAEQREQREAMERSLTRDEERIEVLDKMVMRLYEDMIAGRISEQNFNTMLEKTQTEQTELKTKVSEGRKRLSDEVQLANDAKQWVEAIQEYANITELDAATLNRLIKEIVVHERIDEDKTRHISIEIHFNLKPIPEVEQVTA

SEQ ID NO: 6232 - protein, 491 aa, synthetic construct
MILFEYLRKSRSDDPSEPVEVTLARHRRTLEEYAAKRGDVISRVFEEVVSGESIIARPQMMAMLEAVEGGECDGVLCMDIDRLGRGGMKDQGLILETFKYSSTLIVTPEKIYNLSDENDEQMTEFKTFMSRQEYKLIKKRLYRGLMTTVHEGGYVSNPPFGYRKVYVNRTPTLEIDENQAQYVRMIFDMYVNQGAGSHIIAEHLNSLGITGRRCGYFSRSTVRGILKNPTYTGKVVWNRVIRKKSPSGVVTAHHQPEENWIISQGLHPPIIDEETFRRAQEIRTRHHLPAYNTGTIKSPLAGLVICANCGSHMVMHTCRSRWNYIRCTKKGCCGSASFRELENSVLEHLAKRLEEITSKQSGPVDTTILDIQINGLQRDIAEISPQKSRIMSLLEQGVYSVEEYQERVGSLMQRLSKLQAALDDLSQQKAVIVGANRRALAERLRSVLMQYGAGDPATQNRLLKTVVDRIEYSRPAGRNQPFSISVIFRDF

SEQ ID NO: 6233 - protein, 547 aa, synthetic construct
MKLLVPYIRWSTKEQDSGDSLRRQTNLIDAFYSKHKNDYYLLPAHRYVDKGKSGFHQQHKNQGSDFRRMFENVMSGVIPEGSLIVVENFDRFSRADIDTAIDDVRQILRKGVSILTLGDGELYDKSALTDPVKLIKHIIIAERAHQESLVKQKRIAQVWNHKTQLARELKKPMGKQAPGWLELSEDGSHYIVDEDKASLVNIIYDKRLSGMSMFAICKWLNEQGYPTINQRKVRISKTKKPDGNWSALSVKHILTSRSVLGYLPAKISTEDRKTVLREEIESFYPQIVTDSKFYAVQQLLEETGKGKTSSGDHWLYVNILKGLIRCKCGLVMTPTGIRKPVYQGTYRCNGNKESRCSYGTVSRKLLDTQLCSRLFSKLSQLHDEATDTAKLDELQRRLNTVDGELEKLTETLIQLPNITQIQEALRVKQEEKDELIAQLSREKARVKSVSSLDLSGLDMESVEGRTEAQIIIKRLVKEIVVSGNEKLVDIYLHNGNMIRGFQIDGKDDHTLTLEEATDEMQSLDDMLIFGEPVTRIYPAGDMEEVDA

SEQ ID NO: 6234 - protein, 506 aa, synthetic construct
MRSVITYLRYSSAIQGAEGADSTRRQNDLFKQWLKKNSDAQVVASFSDEGLSGYKGKHLTGQFGDMLARIESGEFPEGTILLVESIDRIGRLEHLETEALMNRILGNGLEIHTLQDGLIYTKDALADDLGISIIQRVKAYIAHQESKQKSFRVSQKWEQRAKLALAGEQRLTKMVPGWIDPDTFKLNEHAETVRLIFKLLLSGESLHNIARHLQSNGIKSFSRRKDANGFSVHSVRTILRSETTIGTLPASQRNDRPAIPNYYEAAIDASTFNKAQEILGKNRIGRTPASDNPLTINIFKGLFRCQCGASVHPTGTKNKYQGVYRCNNHLDGRCDVPPLKRKPFDKWMIDNFLGMIDVGKDGEAEEKIASLQHEVEIVTTRIKKATALLLEMDDIDELKIQLKELNQKRTELQTTIDNMRRKASLTDKELPQLKDIDLTTKAGRVECQLILSKHLKGLTLGKDSVTVTLQNDTEITIPTNPLPLNDGSPIFEIADKELLDIDAYQL

SEQ ID NO: 6235 - protein, 508 aa, synthetic construct
MSYNVLGNNGLGVPSNGGKEVKVATYVRVSTVFEEQDSSIINQAEGLIDYIRKNDGWVLYEPYSERESSFKKRAEFKRLVNDAMAKKFDVILVKSLSRFGRSVGELNTIIPKLVEKGIRFIATSEGIDTENFDWQSKIAMYSMVYQMSSQTTSEWVRLAERTRARRGEFTGSFTPYGYQKVDKKLVLADDNTPGIVQRIFDQYQEGILGMQAIANLLNDENIPTPGQTQGRKNASEYWCQSTIEYILRNPVYIGDLVAQKEQAATLGSTRRKKKDKEDQVINENNHSLLISREQFRIVQDLLYRRGRKKTCGMPNLFTHLLYCADCGSGMHCVKRSYGKTHYMCGNYKLRGKNYCSRHSVYESHLEELILSDIRILMGEHIDTKTFTKKLQKESDRGKRSNVKEILNLNKSIEQIVKRKNNAEDKWLDGEMTKEKYHEFLERYDGEIFECRQKIADLSKEEEVSKPKLPDIAKLTSFENLDRELLLMLVKRIEIKEDGDVKIIYNFTV

SEQ ID NO: 6236 - protein, 478 aa, synthetic construct
MNKVAIYVRVSTTNQAEEGYSIEEQIDKLKAYCMIKDWSVYDIYVDAGFSGSNIKRPAIQKLIKDTKRKVFDTVLVYKLDRLSRSQKDTLYLIEDVFLENKIDFVSLLENFDTSTAFGKAMVGILSVFAQLDREQIKERMQLGKLGRAKSGKPMMWAKVAYGYTYHIGTGKMTVNQSEAIIVKEVFSSYLNGRSITKLRDDLNEKYPKTPAWSYRTIRQMLDNPVYCGYNKYKGQVYPGNHAPIISKEIYNQVQDELKIRQQKAYEHNNNYRPFQSKYMLSGIAQCGYCKAPLKITLGTIRKDGTRFKRYQCVQRTPRKTKGATVYNNNEKCNSGFYEKDDIEAYVLESISKLQTDSNCIDELFNDEPEKLDRDALNKEIETLSNKISRLNDLYINNLITLDDLKTKTDTLQSKIDILKEKLEKDPALERQKNKQKMLKKLDTKDIFKMDYEEQKMLVRALINKVQVTADSIKILWKI

SEQ ID NO: 6237 - protein, 565 aa, synthetic construct
MRRPKAYSYVRFSTPKQAQGDSYRRQLQQARDYCMTHNLVLDDKAIEDFGVSAFRGSNRIDGALGRFIDAVKSGQIERGSYLLVESVDRLSRQAIEEALTQFLEIVREGIVIVTLSDNQVFRSGEVDFTKLIVSIVYMARANDESEMKSRRSRAAWSNGRQQARDNNKVIANSRLPSWLTLEGDKIVPIPERVAIVNEMFQMARTGQGYQQIAKVFRDNDYKTFGQGKVWRPAGIQSVIKSRAVIGEFQPHIIYDGKRIPDGEPIFDYYPVIVSPAIFAEVQHIVDKRSNHSGSYRRGLYNNLFSGVIRCQCGELLRFHNKGSKGQVRNYLVCPMEGVTGCQLPYLPYNRLEPQLLQAVSRLSKVMHQRQPSTEKISTLKDELAVLQGQLDIAIKKRKKAAQSMLDFDDDATFRSLFEESKATCQALEGKILQLEDDIMRLELSNRTIYHLLRPEDLDSAEQRQQFNSQLKSSIKIEFIHENTELVAVYRDLDDNLMLEQAFGPKLMSSTVHDYEGHVCVKTIADAPYVDPNWLSEERDDYAKNNPDSGSGIDDEFGIWRAEDEE

SEQ ID NO: 6238 - protein, 550 aa, synthetic construct
MKVADLYIRVSTDEQADKGYSQRDQEDRLKRYCSSNNISIGQIIYEDHSAKSFNRPGWIRLLTTLKKKSCKTNLILFTKWDRFSRNAGDAYQMISILSKLGIEIQAVEQPLDLSIPENKMMLAIYLAAPEVENDRRALNVFYGMRRARKEGRVMGKAPFGYANKSFENGQKYIALQEPEASAMKWAFNEIAKGILACNQIREELNKSTSKKISRTSFHIAIRNPVYYGKVFLGKHKDEDACLVEGQHEPLISEELFHRVQDVLDGKKRKERPNTKILSDENFPLRGFLTCPKCGNNITGSASKGRKNRYYYYHCNATCGFRHRAEIVNRIFEDGLKQLEMKEPAKRILKKMFLDNYEKYIKTPKNERKSILNEIDKLNARLSVARNKLLSEIIDDEEYLEIRKECREKIEKLEAQFKEEPEAKVNIPKLIEQALEILTNIWKLYSEGGIAVKRAIIGSIFPEKLEFDGKEYRTTRMNSIAHYIFQIKSGLPQNENRRNDKTNHFSCYVDPQGFEPQLMVPKTRVLPLHHGSVLFWWCKFTIFFFTGKNLP

SEQ ID NO: 6239 - protein, 506 aa, synthetic construct
MRSVITYLRYSSAIQGAEGADSTRRQNDLFRQWLKKNSDAQVVASFSDEGLSGYKGKHLSGQFGDMLSRIESGEFPEGTILLVESIDRIGRLEHLETEALMNRILGNGLEIHTLQDGLIYTKDALADDLGISIIQRVKAYIAHQESKQKSFRVSQKWEQRAKLALAGEQRLTRNVPGWIDPDTFKLNEHAETVRLIFKLLLDGESLHNIARHLQSNGIKSFSRRKDANGFSVHSVRTILRSETTIGTLPASQRNDRPAIPNYYEAAIDASTFNKAQEILGKNRTGRTPASDNPLTINIFKGLFRCQCGASVHPTGTKNKYAGVYRCNNHLDGRCDVPPLKRKPFDKWMLENFLGMIDVGNDGESERKIAALQHEVEIVTSRIKKATALLLEMDDITELKAQVKELNQKRTELQTTINTMKRKTSLSDKGLPQLKDIDLMTKAGRVECQLILSKHLKGLTLGKDSVTVTLQNDTEIIVPTDPLPLNDGTSIFEIAEKELLEIDAYQL

SEQ ID NO: 6240 - protein, 507 aa, synthetic construct
MKRVISYIRFSSERQAKGDSLRRQSKMVTDWLKAHPEYYLDQDLSFRDLGVSGFTGKHLKGGLGDFLTAIEKGLVKAGDTLLIESLDRLSRQDVDQASELLRNILRSGVDVVTLSDGEHYTRESLRDSLALIKSILIMQRAHEESLRKSERIQAAWDAKKEAAKAGIKISRRCPAWLKLNDDRKSFSVIPEKVETVKRCFQLRLEGKSIWEIVRTLNAEGHQTLNQYKAGKFGQTSVQDLLKNRSVIGYFTPKGCEEISGYYPAIIDETTFYKVQQLSYARYGRKPASDKPLSVNLFKGVIRCSECGHALIITGFSDTRNGIYRCPLRNENRCSAKGLSRKQTDGTLLALLSRLDRFDSDTTNTIDTLKLHREHISSNIEKLVQLSLEIEDLSAITSKLRQLKNELSQVDADIEKETQRLKSIDVGCLSDCDLTTKAGRIEAQLIIKSAVKEVVLNTAKRRCKVTFHNGKVIDLPITENPSDNVTEAIQSLSEVTERGLIDVDEVII

SEQ ID NO: 6241 - protein, 506 aa, synthetic construct
MRSVITYLRFSSATQGAEGADSTRRQNELFKQWLRKNSDAQVVASFSDEGLSGYKGKHLTGQFGDMLARIEAGEFPAGAILLVESIDRIGRLEHLETEALMNRIIAHGIEIHTLQDGLIYTRDALSDDLGISIIQRVKSYLAHQESKQKSFRVSEKWKQRAKLALAGEQRLTKMVPGWIDPDTFKCNEHAETVRLIFKLLLSGESLHNIARHLQANNISSFSRRKDANGFSVHSVRTILRSETTIGTLPASQRNDRPAIPNYYEAAIDVSTFNKAQEILDKNRKGRTPASDNPLTINIFKGLFRCQCGASVHPTGTKNKYAGVYRCNNHLDGRCDVQPLKRKPFDRWMIDNFLGMIDVGNDGESERKIAALQHEVEIVTARIKKATALLLEMDDIDELKIQLKELNQKRTELQTTIDNMRRKASLTDKELPQLKDIDLTTKAGRVECQLILSKHLKGLTLGKDSVTVTLQNDTEITIPTDPLPLNDGTSIFEIAEKELLDIDAYQL

SEQ ID NO: 6242 - protein, 550 aa, synthetic construct
MKTMKFPIDLSMLTEEEIDQFRQDPSTLFEGDIDVSLYLRFSSERQREQSIEGQLRDCRTFCKLNSYRITAIYVDRATTARKDVEKRVHFQEMIRDSEKKPWEYVVVWKLDRFARNRTDSALFKFRLRKNGVKVISATENISEKPEGIILEAVLEGMAEFYSADLSQKITRGMRESALKCHSIGGHVPLGYKIEDHKLVINPATAHIVREAFELYANGETVADICRMFNTKGYRTAKGVEFNRNSFKSMFRNKRYIGVYTYKDIEMEGGVPAIIDKELFETVSRRLSKNAEAPARGKAKVDYLLAGKLFCGHCGGSMNGESGTSRTGVVHNYYTCYTRKRKHACEKKPLKKEWIEYIVAQDAMELLTDDTIQELADMAISQTEKDLRENTRIPELTERMKETESGITNITNAIEKGIASDALMNRLVELEKEKKNLLRLLAEEEKYVCKIERNQIVYWLTEFKGGRIEDERYRRIIIDLMVNSVTVWDEPDGFRITTAYNLTSCKSKTFRIDPSSEKGFGFEGSKSTKNVSPVGGAFFRIWDLQMVILNE

SEQ ID NO: 6243 - protein, 547 aa, synthetic construct
MKLLVTYIRWSTKEQDSGDSLRRQTNLIDAFYSKHKNDYYLLPAHRYVDKGKSGFHQQHKNQGSDFRRMFENVMSGAIPEGSLIVVENFDRFSRADIDTAIDDVRQILRKGVSILTLGDGELYDKSALTDPVKLIKHIIIAERAHQESLVKQKRIAQVWNHKTQLARELKKPMGKQAPGWLELSEDGSHYIVDEDKASLVNIIYDKRLSGMSMFAICKWLNEQGYPTINQRKVRISKTKKPDGNWSALSVKHILTSRSVLGYLPAKISTEDRKTVLREEIESFYPQIVTDSKFYAVQQLLEETGKGKTSSGEHWLYVNILKGLIRCKCGLVMTPTGIRKPVYQGTYRCNGNKESRCSYGTVSRKLLDTQLCSRLFSKLSQLHDEATDTAKLDELQRRLNTVDGELEKLTETLIQLPNITQIQEALRVKQEEKDELIVQLSREKARVKSVSSLDLSGLDMESVEGRTEAQIIIKRLVKEIVVSGNEKLVDIYLHNGNMIRGFPLDGKDDHTLTLEEATDEMQSLDDMLIFGEPVTRIYPAGDMEEVDA

SEQ ID NO: 6244 - protein, 508 aa, synthetic construct
MIAKWLLDHQDYELSKLNYSDLGKSGFHGEHVKEGGNFGKLLKAVMDGYIKRDDVVLVEAIDRTGRLPALQMLSDVIAPILRAGVSIITLDDNTTYTEASVGGPHLFMLVAKIQAAHEYSRTLSRRVEDSYKKRRKDAKEKGVAPKRMTPVWLNSDGTVREDVAPWIKTAFELYVSGVGKSTIAKRLRESGVERLAKASGPGVEGWLRNKAVIGKWETLIGTPEHHVIDDVYPLIIEPSLFYKAQVHAEKMKTQRPIKTAKHFLVGLVHCGECGKNYIMQNLHGKPHSMRCRTRQSQNNCSNSYVVPKAVLDAIYRYTSVTAALEAVQLQQLGVNEKEIVTREAELLTITKRVEGFVQAVNEAGPMPELLVALKQARIERESAENALVILRATVVTPPANQWREMGKVWSLEAEDAQRLAAMLRQVGYHITVGKGAIIKSSHSDVVYQYLGVDRVKDMYRVLANGEMKLIHKSQVDDYPYYEPFQGVVGEATMDEADKENLLLQYQSS

SEQ ID NO: 6245 - protein, 506 aa, synthetic construct
MRTAITYLRYSSAIQGVEGADSTRRQNDLFKQWLKKNSDAQIVASFSDEGLSGYKGKHLTGQFGDMLARIEAGEFPEGTILLVESIDRIGRLEHLETEALMNRILGNGLEIHTLQDGLIYTKDALADDLGISIIQRVKAYIAHQESKQKSFRVSQKWEQRAKLALAGKQRLTKMVPGWIDPETFKLNEHAETVRLIFKLLLDGESLHNIARHLQSNGIKSFSRRKDANGFSVHSVRTILRSETTIGTLPASQRNDRPAIPNYYEATIDAATFNKAQEILDKNRTGRTPASDNPLTINIFKGLFRCQCGASVHPTGTKNKYAGVYRCNNHLDGRCDVQPLKRKPFDKWVLENFLGMIDVGNDGESERKIAALQHEVEIVTARIKKATALLLEMDDITELKTQVKGLNQKRTEIQTTIDTLKRKTSLSDKGLPQLKDIDLMTKAGRVECQLILSKHLKGLTLGKDSVTVTLQNDTEITIPTNPLPLNDGSPIFEIADKELLDIDAYQL

SEQ ID NO: 6246 - protein, 506 aa, synthetic construct
MRTVITYLRFSSATQGAEGADSTRRQNELFKQWLRKNSDAQVVASFNDEGLSGYKGKHLSGQFGDMLSRIESGEFPEGTILLVEAIDRIGRLEHLETEALMNRIIAHGIEIHTLQDGLIYTRDALSDDLGISIIQRVKSYLAHQESKQKSFRVSQKWEQRAKLALAGEQRLTKMVPGWIDPETFKLNEHAETVRLIFKLLLDGESLHNIARHLQANNISSFSRRKDANGFSVHSVRTILRSETTIGTLPASQRNDRPAIPNYYEAAIDAATFNKAQEILDKNRKGRTPASDNPLTINIFKGLFRCQCGASVHPTGTKNKYAGVYRCNNHLDGRCDVPPLKRKPFDKWMIDNFLGMIDVGNDGKAEGKIASLQHEVEIVTARIKKATALLLEMDDIDELKIQIKELNQRRTELQTTIDSMRRKASLTDKELPQLKDIDLTTKAGRVECQLILSKHLKGLTLGKGSVTITLQNDTEITIPTNPLPLNDGSPIFEIADKELLDIDAYQL

SEQ ID NO: 6247 - protein, 476 aa, synthetic construct
MNKTAIYVRVSTQEQVMEGYSIGAQTEKLKSYCSIKDWTIYDIYTDGGFSGSNMERPGLTKLIHDVRQNKINNVLVYKLDRLSRSQKDTLYLIEDVFLKHHVNFVSINENFDTSSPFGRAMIGILSVFAQLEREQIKERSHMGRVERAKEGYFHGGGFIPIGYDYVGGVLIINEYEAMQVRKVFKLFLNDTPIDRIQKTMNSKYTYKSGNWGSHSVVRNVITNNLYIGKVSFGGKSYDGKHQPIIDEEVFNEANKRYAARSNIKGKSNPFKSKHLLTGLLYCGNCGARYFAKGNYSGRGENKRYYPYYTCYSRAKTNKKLVVDPTCKNTSFPVVKLEPIIIEEIKKLAFDPSRINEIKGQVPKKENDQPVIESRIAELDKQISRMLDLYQNNNMPFEQITARIEQLNDEKESLTDELNNLDINQPTITIDQAAELLSRASDILDNGSVDERRKLIHSLIDRITIYDTDFEIQWSFT

SEQ ID NO: 6248 - protein, 472 aa, synthetic construct
MTAALYVRVSTEEQAKTGFSVDNQQERLIAFCKSQGWDDYKLYVDDGYSGTDTNRPALKRMINHVEEQKIDSVIVYKLDRLSRSQQDVIRLLEDVFETNNCAFKSATEPFDTDSPFGKAMIGILAVFAQLERDTMIERLTTGQRNRASKGYWHGGPIPFGYNWNKEEQQLEVNEEQADIVRTMFDMYLKGASRLEVSEWAQNRTAERNLSNHHSVAHILTRVLYTGKVKHNDQVIEGRHKAIVDDETYNAVQRELEKRKTTKYHKGKYLLTGLLKCGLCGCGITHVRRKGSKDVYYFYVCKDQHVRRKERKVAKCKLGYYRRYDIEDKVLQKIRSVSFDRKVIEKELNELETNLEDNEMLQRELQDKLSQIESKLDNLYEAIETGEIKASFVSDRINKLESERERVEVHLDDLKINKPKKNSSEKTIQLMENINETWDYLDFDEKREMLRKVIKTVIILPGGDVQVQWNLEE

SEQ ID NO: 6249 - protein, 526 aa, synthetic construct
MQNVCMYLRKSRADLEAEARGDGETLAKHKNALFKIAKKLNLNVTKIRQEIVSGESLVHRPEMLELLKEVENHEFDAVLVMDIDRLGRGNMQEQGLILDTFRTAKTKIITTRKTYDLSDEWDEEYTEFETFMSRKELKIINRRLQGGRLRSIEDGNYIATKPPYGYEIYKDGKHRTLVPHSEQAPIVRKIFAWYTEDNSNQRLGSAEIANRLNEMSAPSYTGKPWEPSAVLNIIKNAVYAGRLQWKRKDIKKSTTPGKTKDTRTRPRNEWVDVEGKHEPLVSMDLYEKAQDILKTRYHVPYQLGGHVTNPLAGIVKCGYCEKTMVRRPYTDGKVFVMCNNAKNCGCRSSKIEFVEQKVLNGLQDWLDRYKADWDHGNEDNTANEDANEVEILQNSIQSMEKELKELNKQKLKLHDFLERGVYDEETFLERSQNISDRMNDINTNIANAQSEMELLQEREAAQENIIPHVENVLDLYKKTDDIKKKNALLKSVIEKAVYTKNKQQRLDDFELVIYPRLPHTFAPNYV

SEQ ID NO: 6250 - protein, 563 aa, synthetic construct
MKKEKIKVYIYMRVSTTMQIDGYSLDAQKARMKAFAEYNDYEIVGEYEDAGKSGKSIEGRIEFNHMLEDIKSGKDGVSFVLVFKLSRFGRNAADVLSTLQVMQDFGVNLICVEDGIDSSKDAGKLMISVLSAVAEIERENIRVQTMEGRIQKAREGKWNGGFAPYGYTLEKGNLIISEEEAEAIRIIFDQYVHTDMGANGLAKYLANHGIGKIQRQNGKNPLFDAALIRRILKNPVYCGKIAYGRRRTEKVHGTRNDYRLVEQDNYLLVDGQHEAIVSEELWHDAQVKLLAQAKKYEKVNHGRDNKIHLLTGLLKCPICGAGMYGNKSVKHKADGSKYKDFFYYGCKHRNMTRGHKCDYKKQIHEELLDSAVAEVITKLVSNPKFAALMQQKISMKVDTTTIEQEIANYEKQLRQSYSVKSRLIDEIDSLDPDDKHYIKRKTDLDDRLYKMYDKIEDTESLLIEARAKKTAIEAEKLTADNIYKVLIYFEKLYAVMDEQERRQIMESLISEVHIYEERQPNGQWLKSIKFKLPIIEEDMQISLDNNTQIEVVIMMRNCGSDKE

SEQ ID NO: 6251 - protein, 524 aa, synthetic construct
MTKRAAIYARFSSDLQKATSIEDQVAMCRKHAERQGWQVVEVFTDSQKTGRNTRRPGFQKMKEAIYADRIDVVLVEALDRLNRKVSDALTQFELMAFRDVKLHSVTEGEQNFFTTMLIGFAAQQQSEANGEHTRRGMKSAVGRRRLHTSTYGYRKVSVEEGLNREIVPEEAEIVRRIFTEYAEGRSALQIAKGLNADRIPAPRGGSWDGSTIRGNPARQEGILHNRVYIGIASICKHRRRYNPETGQRKIISSPEDYTETEIPELRIVPQNLWERVQAQRAGRKPVQNAVETRRTRYLLSGLLVCGCCGTRYVKHNRTSYRCREALKGGVCTNTRTISRKRIEARVFARLKQVMLSDELARQFGEALEAERRNLAKANPEADVKRLSAALKEAETKRERIFQAIEDGAPFATFKARASEVEAEIADLAARIEGAKRLITLQHADQPDARLLYERAVAQMELLLGDEDLVEQAHAFLGELIRKIALRPDEAAPHGVSAVIEARFGALLGVEEAVTDAAGFTMVPC

SEQ ID NO: 6252 - protein, 547 aa, synthetic construct
MKLLVTYIRWSTKEQDSGDSLRRQTNLIDAFYSKHKNDYYLLPAHRYVDKGKSGFHQQHKAQGSDFRRMFENVMSGAIPEGSLIVVENFDRFSRADIDTAIDDVRQILRKGVSILTLGDGELYDKSALTDPVKLIKHIIIAERAHQESLVKQKRIAQVWNHKTQLARELKKPMGKQAPGWLELSDDGSHYIVDEDKASLVNIIYDKRLSGMSMFAICKWLNEQGYPTINQRKVRISKTKKPDGNWSALSVKHILTSRSVLGYLPAKISTEDRKTVLREEIEGFYPQIVTDSKFYAVQQLLEETGKGKTSSGEHWLYVNILKGLIRCKCGLVMTPTGIRKPVYQGTYRCNGNKESRCSYGTVSRKLLDTQLCSRLFSKLSQLHDEATDTAKLDELQRRLNTVDSELEKLTETLIQLPNITQIQEALRVKQEEKDELIVQLSREKARVKSVSSLDLSGLDMESVEGRTEAQIIIKRLVKEIVVSGNEKLVDIYLHNGNMIRGFPLDGKDDHTLTLEEATDEMQPLDDMLIFGEPVTRIYPAGDMEEVDA

SEQ ID NO: 6253 - protein, 696 aa, synthetic construct
MEYFSNVKRKKAKSGNASNRTPKAVIYVRVSDVKQVDGVSLDNQEKEIRSFLQSCTDDKGKNVSYEVVQVFREEGKSGKDQYRDQFQKMIEYVRDHRDEIDGVCFYAISRLGRNVRMVLETIDYFNKLDIAVLSKSDNLNSKTANGRFTLTILSALAQLESEQIAERVMPNMKYSVEELGRWQGARYVPYGYDHVKDPGDPKGVRKHLVVNLEEAKQVKQIFEWFCYGIGNDTNVGEYLITKHLNKIGWKYRKGKEWESRQITSIFQNGHLYAGWLVWNRHGTENKTVEAIDERGFVKDVEVMNYKNGFPKPVKVKYRKEEHEIVKSRGIHEAIITEALWQKCRERLMERYQKSKEQHRDTTRQAKHLFTHVLRCPDCGGSMGASRLGGVEYYKCQKSARGGNCRANLIQEEYLREDVLDVVLSHFEYYTYKRFDELVTKELNAEQYQNEAEAKLSDLEVRLKRADERISEIWDEFQSDRPDKLIKTREQASTLIRRIDSERDDIENEMETIRAELHEKVRDIHQVNEVVEKLNKFSDPRAYFDSLTPEGRLGFIDRYIHRIEFSKEHGKKGAHAYKITKIVLAPIFTDIFRRFRREDDPRNQSFKRAAYHARKEIGGAVDPEQSNLGNIMKIFDQRNRLPIYYTLSDGKERQFTEIKESRLHSFYNTINDEAKRQLRQFIRSDEKVFNIEINPSE

SEQ ID NO: 6254 - protein, 452 aa, synthetic construct
MKAAIYIRVSTQEQIENYSIQAQTEKLTALCRSKDWDVYDIFIDGGYSGSNMNRPALNEMLSKLHEIDAVVVYRLDRLSRSQRDTITLIEEYFLKNNVEFVSLSETLDTSSPFGRAMIGILSVFAQLERETIRDRMVMGQIKRVESGLPLTTAKGRTFGYNVVDAKLYINEEEAKHLQLIYDIFEEEKSITFLQKKLKELGFKVKSYSSYNKWLMNDLYIGYVSYADKVHVKGIHESIISEDQFYRVQEIFSRMGKNPNMNKESSSLLNNLIVCEKCGLGYVHRAKDTVSRGKKYHYRYYSCKTYKHTHELEKCGNKIWRADKLEEIIIDRVKNYSFATRNVDKEDELDSINAKLKVEHLKKKRLFDLYINGSYEVAELDKMMADIDAQINYYNSQIEANKELKRNKKVQESLAELATVDFDSLEFREKQIYLKSIINKIYIDGEQVTIEWI

SEQ ID NO: 6255 - protein, 547 aa, synthetic construct
MKLLVTYIRWSTKEQDSGDSLRRQTNLIDAFYAKHKEEYYLLPAHRYVDKGKSGFHQQHKAQGSDFRRMFENVMSGAIPEGSLIVVENFDRFSRADIDTAIDDVRQILRKGVSILTLGDGELYDKSALTDPVKLIKHIIIAERAHQESLVKQKRIAQVWNHKTQLARELKKPMGKQAPGWLELSEDGSHYIVDEDKASLVNIIYDKRLSGMSMFAICKWLNEQGYPTINQRKVRISKTKKPDGNWSALSVKHILTSRSVLGYLPAKISTEDRKTVLREEIESFYPQIVTDSKFYAVQQLLEETGKGKTSSGEHWLYVNILKGLIRCKCGLVMTPTGIRKPVYQGTYRCNGNKESRCSYGTVSRKLLDTQLCSRLFSKLSQLHDEATDTAKLDELQRRLNTVDGELEKLTETLIQLPNITQIQEALRVKQEEKDELIAQLSREKARVKSVSSLDLSGLDMESVEGRTEAQIIIKRLVKEIVVSGNEKLVDIYLHNGNMIRGFQIDGKDDHTLTLEEATDEMQSLDDMLIFGEPVTRIYPAGDMEEVDA

SEQ ID NO: 6256 - protein, 521 aa, synthetic construct
MTKTTALNASPAQAVIYCRVSSQRQMKEGDGLASQETRCREYARHRGYEVVQVFRDEGVSGGMIDRPAVQLLLGFLRKHRTHARHIVIIDDISRLARDVVAHRQLRDSIDDAGGKLESPSIEFGEDSDSILVENLLASVSQHQRQKNAEQVVNRMRARVMSGYWVFANPVGYRYERKPGHGKILVPDEPTASIVREVLEGFATGRFASQMEIKRFLEGKPGFTSRHGKTVHLQKIREMLERPTYAGYIDAPQWGIAPLLGKHEPLITYETHLRVLERLKGRPVGALRKDTREDFPLRGIVACACCGHTMSAGWSKGRNGQYPYYFCQAKGCEESRKSIRKERIEGDFETLLDAIRPDAPLIDAFHELVSEVWAAGRKGQAEQHQTLKAELTEIERKSSQLMERLIAADNGVLIAAYEAEVRKLQERRIVLQERLASRGEEVIDFNLGYRTALSFIANPRKMWASDHLPSRRLVPKLLFGRGLHYNRKEGYRTGEIAYPFKALQAIRTGKYGLVEGAGFEPA

SEQ ID NO: 6257 - protein, 507 aa, synthetic construct
MKRVISYIRFSSERQAKGDSLRRQSKMVNDWLKAHPEYYLDQDLSFRDLGVSGFTGKHLKGGLGDFLTAIEKGLVKAGDTLLIESLDRLSRQDVDQASELLRNILRSGVDVVTLSDGEHYTKESLRDPLSLIKSILIMQRAHEESLRKAERIQAAWDAKKEAAKAGIKISRRCPAWLKLNDDRKSFSVIPEKVETVKRCFQLRLEGKSIWEIVRTLNAEGHQTLNQYKAGKFGQTSVQDLLKNRSVIGYFTPKGCEEISGYYPAIIDETTFYKVQQLSHSRYGRKPASAKPLSVNLFKGVIRCSECGHALIITGFSDTRNGIYRCPLRNENRCSAKGLSRKQADGTLLTLLSRLDRFDSDTTNTVDTLKLHREHISSNIEKLVQLSLEIEDLSAITIKLKQLKGELSQVDADIEKETQRLKSIDVGCLSDCDLTTKAGRIEAQLIIKSAVKEVVLNTAKRRCKVTFHNGKAITLPITENPSDNVTEAIQSLSEVTERGLIDVDEVII

SEQ ID NO: 6258 - protein, 586 aa, synthetic construct
MITQRKAFLYPRVSTDEQADGYSLSHQEDVLMRYCEKENIQVIGVYREDHSAKTFDRPEFQKMLNVVSKNKGIVDLILFSKWDRFSRNVAAAYEMIGRLRKYAVEPQSIEQPLDMEIPESKIMLAIYLTTPEVENDRRALNTLHGMRKAKKEGRYLGIAPLGYKNGRDAHNKPLLIPNERADIVKWAFEELSRGIWDIDTLRRMVNQKGIKIGRSQFWSLVRNPVYCGKVFLAAYKNEAAHCVKGIHQPIVSEQLYDDVQDVLKGKKRKVRVNAFTEIDIHLPLRGFLICQRCGKPLSGSGSRGNGGVYYYYHCQSVKLCKERFRAETANEIFIKQLSKISVNAPIIDYYCQIIRTALQTDNKKQELELRTIQTDIDKYYQRIQNARSMRLDDEFTAEEFKDIKTDLIRKIEELERRKTKLLSTKDNYLEYLSHGGEIIKNIAARYVTASPIGKKQIIGSIFPEKLIFSENQLRTAEPHVLLELITRSRADLDPLKQEKVGDNSDLSAFVPRTGIEPALRCRNKILSLARLPIPPSGQSQLSFSCGLQMYVIFSNSKQILFSLQLICISEISDTFAKVNDPNDEHK

SEQ ID NO: 6259 - protein, 522 aa, synthetic construct
MTTAYSYIRFSSAVQAKGDSLRRQTQLAHDYCIKHSLTLSDQSFTDLGVSAFRSANTNEDNGLGQFLKALEQSVVPRGSFLLVESLDRLSRASVMTAMRQLFNIIEYGITVVTLIDNRTYNSESETTDLIISLTVMERAHNESKTKSERLKAVWANKRANPHTTTRHSNTPFWLSLNEDKRTYTIIESKADIVRRIFQMSIDGHGAVSTCRILNQEEIKAPKGGTWALTSIKKILGSKAALGHHTHIIDNKVQSSTVPDFYPPIINEETYYLSQAKVKERHKPNSAGRKSTFPNVLSQVAVCGSCGSHMLYDPKSPQWVYLTCREFKKNACTNKPLRIELINRFIIEQYLHPQHFEKHVDLVKKGSTNTDQINVIESKVESEKEALKQLIELTSNFSNSVIQDGIKTRSESIQSLEQQLEEAKALSVESVTSIHMDYREACQLVADALQVQVFDKKPTTLSREELFKVRVKLNRSLKQTFSEVKVSHDPETKKASITANDFTYEAHKLAMTTGFNNHTWWAV

SEQ ID NO: 6260 - protein, 532 aa, synthetic construct
MIEQNEAQVYLYIRFSRKTQEDGDSERRQLECAHRAAEKYNLTINEDFIMTDRGFSAFKAAHIRKGALGGFLEAVKSGDVAKGSILIVESLDRLSREAPFFAQMQFSSLISDGISIITANDSNIYNTREMNRRPEVFYGIYAVMQRAHEESKRKQALSAGSIKGKILKHKRGEHTTNFTSVPSWITNKKDGYELNEKAKAVELIVNMYLNHEGLNTISRELAEREIKSPTGRKRWGITTIRKVLDNPALYGLNKFKLSYDSDGVTVTEKFEFENFYPALISREEFLVIQERKKKKANSRESYGKVTYLLSSYGKDRCVCSRCGYTTGSQMQKQVNRKGEYTQSVMRLHCRKHKETLDCCSSFKCERLEHAFINAIHKELNPDFLKSHKTTKGNEESIRAQISDIDNEFKMLMKKQEKMKSMDLKLEIMKRIDELDSKRYELTEILNKKLTQVNGEADYEKLKSLANKCLNMKNSNERKLFKQILIQSVKQIVIDFKTESLACYFNNGNHLSLNYITENDSYQTTIFYKRKPR

SEQ ID NO: 6261 - protein, 516 aa, synthetic construct
MKAYLYIRFSSKQQEQGDSVRRQEEAAQKWCNSNDVELSDLTFEDLGVSAFKEGGKRPALADLIEAIELGKIARDSYVLVENDDRLSRQGWYATQQMIRHMVLDLGVKLVVLSSNTVYDHTNIEDIVQNILLMFNAERAYKESLRKSEMIRAARQTRRDSETLTGKLPFWLNRVDNQIVLDTDKADTVRLIIELKKSGKSNQATARFLNDKNIASATGGKWNASAIRMVCANHAIYGAKAYYITDSKRKMTLDKVVENKLPAIVTKADFDAVQTTQKQRGRRSTKTPFSLLLKCGKCGGGMVQRTSTYKDRKMIYRRCIGSLEGRCDQNRLIREPDLILSNALKDMQYIDSVEQYVSKANGIQTQIDTLKQTQDKLIELGQVDALANLYTRLAELEQKLVQAKVEDEANEQKPTDFNYKSVFELEDTGEQNAMLKRVIDRIEVHYLGIVDKKSSSKWRIRVQQRNNHHQSFLLNQYHGFGNWKIVQETNTEKFKKELEQMTAGAEDIDWLESNEPT

SEQ ID NO: 6262 - protein, 559 aa, synthetic construct
MKNKKAYVYTRVSTSMQIDGYSLDAQEERIKQYAKAYGIEIIETYKDAGKSGTSISGRNEFIAMLNDIEAEKDKVDYVMVFKLSRFGRNAADVLQSLQVMENHNVNLICVDDSLDSSKDSGKLVITILSAVAEMERENILSQTMEGRKQKAREGKWNGGFAPIGYSLDNGELVVNEDEAKAVRMIFDLYANSDMGANGVSKYLVSLGINKPIRQNGKNPYFSASLIRQILDNPVYNGKIAYGRRKTIKDKTTGKIKLEKSDHYIIAQGNHEALIDDELWNTVQEKRKSQAKKYEKINRGKDERVHILSNLIKCPYCGAGLYGNKSRKRNKNKEGEHYKDYYYYGCKHRQMMNGHKCTFNKQIRAELIEKEVETIITQVVSNPTFAKKIEEKINIQIDTKEIDEVINKHLAKIRQLTGTKASLINQIDSLNFEDKHYDRKYTDLNLRLDAIYDQLEYAEMQLNDSRKRKEAILEEKITSDNIYKILVNFNSLYTVLSDIDKKRLLNEMIEEIQIYDEKTEKDTWIKSVVFKLPLIDNEIDFGLDNKDNVETVVLISRKKR

SEQ ID NO: 6263 - protein, 521 aa, synthetic construct
MMNSKVIVIPAKKKKGNSIKESEKKKLRVAAYARVSTDSDEQATSYDTQVDHYTNYIKKNPDWEFAGVFSDEGISGTYTKKRAGFNKMIEEAMKGNIDYIITKSISRFARNTLDCLKYIRKLKENNIPVYFEKENINTMDAKGEVLLTIMASLAQQESQSLSQNVKLGFQYRFQQGQVQVNHNRFLGYTKDEDGKLVIVPEEAKIIKRIYREYLEGASLRDIKVGLEKDKIVNGAGNKKWHVSNLNQILTNEKYMGDALLQKTYTVDFLNKKRVKNDGIAPQYYVENSHEAIIPKEIFMRVGEEMYRRSNMVSGKGKRRIYSSKYALSSIVYCSKCGDIYRRIAWNNRGKKYTVWRCCTRVTHGPEACEARTIKETDLQEAVVEAINQLISESSELEEIIKENIEKAITGNGSSRIKEIDQEMLKVQEELLKVANAKKDFTDLAKRVEELRNEKEKILLSIAEEKNEQSRLKELEEFLDNQELEIESYDEDLVRKLVDKVVVYDEELKIVLKSGVEVNVCV

SEQ ID NO: 6264 - protein, 520 aa, synthetic construct
MKKITKIEANQKEGSILRVAAYARVSTDEEAQLVSLKTQKAHYEKIISENKSYAFAGLYFDEGITGTKKECRDGLLKMLNDCEDGKIDFILTKSISRLARNTTDCLEIVRRLLDLNIGIYFEKENIDTRTMESELMLSILSSLAESESRSISENNKWSIKKRFQNGTFIISSPPYGYENIDGKMVVNEEEGKIIKEIFEKYLSGKGTHKIAEDLNKRKIKGQKGSNWHGSTINGILKNEKYIGDVIYQKTYTDDTYKRHKNKGEEDQYKIIDNHEAIVSREDFEKVQDLIKIRAIAKGNGKDTKRYQNRYSLSGKIKCGECGSSFKRRHHYNGKDKYIAWTCSEHLKDINKCSMKFIKDKDIRLAFVTLVNKLIFRKDSILTPLLESLKRVDSKEEVEKINKIEESLEQLKERKEVLNKLITSGVLDASIYTKESSEISSEERNLLMEKERSKKAILGNDEEIRELEKLIGILDKSEMIDHFEDDLFEEIIAHIQVVNRETLDFHLKCGLVLREEVKEDV

SEQ ID NO: 6265 - protein, 541 aa, synthetic construct
MPKAISYIRFSTKIQSVGDSTKRQSKYINDWLKRNPDYYLDESLRFQDLGISGFSGANAKSGAFGEFLAAVESGYIESGSVLLVESLDRVSRQDIDTAGEQLRKILRSGVEVVTLVDNEWYTKESLKDSLSMIKAMLVMERAHEESAMKSTRLRSVWAAKRERAAKGEIMSKRCAAWLKVSEDRSHFEFIPENVKAVQRVFQLRLEGLSHVKIAKQMNDEGFSTLNQFKSVTGGWSQSSVTELLSNRSVIGFKVPSKSMAVKGVAEIPNYYPSIITDEQFYAVQQLKQGSGRKPSSDLPLLTNLFKGVLRCSECGFIVVVAGVSAKRSGIYKCSMKSEGRCNSVGFSRLQTDRALVQGLLYNTNRLSLNRDNGSAIGTLQSDLEQLHKQRERLIKLAMLADDTESMAKDLKALNSQIKDAEKAVSEVHQREQSSQLETISHLDLTVKKDRIEAQIIIKRIVKEIRLNTAQKKCDVFLHNGLKLLNFPLDRVVDGAQWLEVLPLIDGDEFDFVEFTTKPRHIALEEAPDWVKEMDEQSNQLL

SEQ ID NO: 6266 - protein, 509 aa, synthetic construct
MRRAISYIRFSSERQLKGDSVRRQSKLVTDWLDKNPEFYLDSSLSFKDLGKSAFSGKHLKGGLGDFLTAIEKGLVKAGDTLLIESLDRLSRQDIDIASELLRRILRAGVDIVTLSDGEHYTRESLKDPLSLIKSILIMQRAHEESLRKSERVQAAWNRKKELISEGIKVSRRCPAWLRLNDDRRTFTIIPDKVEVVKRAFDLRLQGLSFWAITRTLNDEGHLSLNQYTPKQKGWSDTAVKKLLRNRAVIGCFTPAGREEVQGYYPAIISESLFYRVQQLNTGQYGRASVSSNPLSVNLFRGIIKCSECGATIVLGGYALKRFGMYRCPNRSANRCSAKAISRKQTDATILYMLALCDRFETENTDIIDSLKLQREDLQRKISKMAELAIELDDMTIITEKLRDMKNALSKLNHDIEEETKRIKAITTGSLKDIDRTTKEGMIETQLLIKGVLKEIVIDAAKRRCKVTFHNGKLIDLPITETPSEDVTEAIQSLSEVTERGLIDVDEVII

SEQ ID NO: 6267 - protein, 546 aa, synthetic construct
MKQADGSSYERQKRTAAEIAAKYDLELVTSYQDFGVSAFKGANSKTGALSRFLDEIGRSVPVGSWLVVENLDRISRQSIIEAQELFLSIIRRGITIVTGMDGRVYSRESVNANPIDLLLSVMLFARANEESQTKRNRTNSSALIKIKSHQENPQNPAVAIEEVGKNMWWTDTTSGYVLPHPTYFPVVQEIVELRKNGRSTAEILDHLNETYAPPPAVSNKKHSKWSRAMVERLFHTRALIGIKEISVDGVNYELKDYYPRVIDDATFYHLKKNIGARAWNFGDKEEVKPIPLLSGIGLLKCDHCGCAMVKVKGTNKRSDQYRYTCDATRSRRLDCEHPNWSFRGDQLEKAVLQLLADKIWIAEDKANPVPALKVQVDEISRKIDNLIALSAMTGATKELADQITTLNSERETLYNQIKMAEEEMYSVDSQGWEKLAEFDLEDVYNEERLKVRFKIKQALKRIGCSRIDRNKNLFVLEYIDGKTQRVVIENSRGTRKGRIFIDLKTINDRQILESNGLVLHPCLDMLTDKNWKPEEEIPGPLQEFGI

SEQ ID NO: 6268 - protein, 506 aa, synthetic construct
MRHVITYLRYSSAIQGAEGADSTRRQNDLFKQWLKKNSDAQVVASFNDEGLSGYKGKHLSGQFGDMLSRIESGEFSEGTILLVEAIDRIGRLEHLETEALMNRILGNGIEIHTLQDGLIYTKDALADDLGISIIQRVKAYIAHQESKQKSFRVSEKWKQRAKLALAGEQRLTKMVPGWIDPETFKLNEHAETVRLIFKLLLDGESLHNIARHLQANNISSFSRRKDANGFSVHSVRTILRSETTIGTLPASQRNDRPAIPNYYEAAIDAATFNKAQEILGKNRIGRTPASDNPLTINIFKGLFRCQCGASVHPTGTKNKYQGVYRCNNHLDGRCDVPPLKRKPFDKWMIDNFLGMIDVGNDGEAEGKIASLQHEVEIVTTRIKKATALLLEMDDIDELKIQIKELNQRRTELQTTIDSMRRKASLTDKELPQLKDIDLTTKAGRVECQLILSKHLKGLTLGKDSVTVTLQNDTEITIPTNPLPLNDGTSIFEIAEKNLLNIDTFQL

SEQ ID NO: 6269 - protein, 547 aa, synthetic construct
MKLLVPYIRWSTKEQDSGDSLRRQTNLIDAFYAKHKDDYYLLPAHRYVDKGKSGFHQQHKNQGSDFRRMFENVMSGAIPEGSLIVVENFDRFSRADIDTAIDDVRQILRKGVSILTLGDGELYDKSALTDPVKLIKHIIIAERAHQESLVKQKRIAQVWNHKTQLARELKKPMGKQAPGWLELSDDGSHYIVDEDKASLVNIIYDKRLSGMSMFAICKWLNEQGYPTINQRKVRISKTKKPDGNWSALSVKHILTSRSVLGYLPAKISTEDRKTVLREEIEGFYPQIVTDSKFYAVQQLLEETGKGKTSSGEHWLYVNILKGIIRCKCGLVMTPTGIRKPVYQGTYRCNGNKESRCSYGTVSRKLLDTQLCSRLFSKLSQLHDEATDTAKLDELQRRLNTVDSELEKLTETLIQLPNITQIQEALRVKQEEKDELIVQLSREKARVKSVSSLNLSGLDMESVEGRTEAQIIIKRLVKEIVVSGNEKLVDIYLHNGNMIRGFPLDGKDDHTLTLEEATDEMQSLDDMLIFGEPVTRIYPAGDMEEVDA

SEQ ID NO: 6270 - protein, 506 aa, synthetic construct
MRSVITYLRYSSAIQGAEGADSTRRQNDLFKQWLKKNGDAQIVASFSDEGLSGYKGKHLTGQFGDMLARIEAGEFPEGTILLVESIDRIGRLEHLETEALMNRILGNGIEIHTLQDGLIYTKDALADDLGISIIQRVKAYIAHQESKQKSFRVSQKWGQRAKLALAGEQRLTKMVPGWIDPETLKLNEHAETVRLIFKLLLDGESLHNIARHLQSNGIKSFSRRKDANGFSVHSVRTILRSETTIGTLPASQRNDRPAIPNYYEGVVDIPTFNKAQEILDKNRKGRTPASDNPLTINIFKGLFRCQCGASVHPTGTKNKYAGVYRCNNHLDGRCDVQPLKRKPFDKWVLENFLGMIDVGNDGESERKIAALQHEVEIVTARIKKATALLLEMDDITELKTQVKGLNQKRTEIQTTIDTLKRKTSLSDKGLPQLKDIDLMTKAGRVECQLILSKHLKGLTLGKDSVTVTLQNDTEITIPTNPLPLNDGSPIFEIADKELLDIDAYQL

SEQ ID NO: 6271 - protein, 561 aa, synthetic construct
MKNKKIKCDIYTRVSTTMQVDGYSLDAQKEKLKRYAEFQNMEIVNEYSDEGKSGKSVEGRPEFQRMLDNIENGTDEVQFVLVFKLSRFGRNAADVLNSLQRMQDFGVNLICVEDGIDSSKDSGKLMISVLSAVAEIERENILVQTMEGRKQKAREGKWNGGFAPYGYELVNGELQIAEDEAEIIRLIYDKFIHTNMGISAIAAWLNQHGYKKKKRQNNTLDAFASSFIKGVLDNPVYCGKLAYGRRKNEKVSGTRNEYRIVKQENYMLHDGIHEGIISETDWELAHQKREKTGVKYEKTHSLDHEHILSGILSCPLCGSGMYGNVNRKKKKDGTLYKDYFYYACKHRRLVDGHKCGYRKQWSEEKINNAVEEVIRKLVKNPKFEEAILNKIGSRIDTEEIEKEIDGLEKQHRQLTGAKARLGQQMDSLDIMDKFYEKKYQDMETRLYRLYDEIEGVENSIDEVKNRLLNIQQQKISEENVYQFLLYFDKLYDKFTDLEKKEFLNSFVEQVDIYEQEQPDGRFLKHIKFRFPVYFGDRETQELCWDNESTVETVVLLQRKNM

SEQ ID NO: 6272 - protein, 640 aa, synthetic construct
MRRKKDRSNGITALYERLSRDDDNAGESNSIVHQKQMLEDYAIKHGFTNLVHFTDDGWSGATFDRPSWNRLVEGVKNGEITACICKDMSRIGRDHLQVGFFTDILFREKEVRFIAINNGIDSDRQETSEFAPFLNIMNEWFVRDTSKKIKAVLKSRGSSGNAHTSNIPPYGYLKDPENPDHWIIDEEAAEVVRRIYRMTIEGKGPYQIARELSEEKIERPSYYLGKKGLGNHASNYDKENPYMWRGNQVTTLIARPEYIGKTVNFRTFKNSYKDKKTKRADKEDWVVFDDTQEPIVDEETWLLAQKLRQNVRKADPMGEPNVLTGKIYCADCGAPMYNHRQRKGRERIYYTAKGEKRTSYSNPADCYECSTYNLAYQKYDRHCTCHHISTKALKSIILKTIQETCHYVSLNEQEFVYSLQEESAMKDIAVSETVKKRIERNQKRVHELDMLIRKIYEDNVIGRLPDRLFQSMLTDYENEQNELNKIIETDTADMQRIIGGQNNVERFLKLVKKYENITELTPAMINEFIDKILVHEPQGKGADRTTEVEIYLNYVGQFQVPVEQHEPTEEERIAAEKEAERLRRKRESNRKYMKKIREKSKEFAEHERIAEEKSSDSNVCVEQNVTSKSNRQKVKGEKIA

SEQ ID NO: 6273 - protein, 638 aa, synthetic construct
MKQKKCYIYTRVSTAAQTEGYSLDAQQKRLKDFAEYKGLEIAGEYCDAGKSGHSIKGRPAFMEMMDDITSGKDDISFVLVFKFSRFGRNAADVLKSMQTLMDYDIDLICVEDSIDSSTQGGRLTLAILSAVAEIERENIRIQFMSGKMQKVLQGGWAGGPIPYGYRSREGELVIEPSEAEVIRLIYEKYLEPPMKLNGVVRWLNSHGYQRISQETIRPFNSDFVSRILNNPFYCGKIVYYRRANKGSSDPKQEIVVQGKHEAIVTEKIWEQAQEKRGQLARVKGKRDEEDRISLLSGLVKCPVCGGGLISKKNKSLNHNYGGYYKTVYSYGCRNYRTSEGRVCSFCHTYNQERLDAAVMEVIQKVTGTEEFRTAFARTVGNQMSEEAVETQLKMLRKEMHHQEHVKYKLGMELDHLDVLAESYDQQYEKLQAEVDAAYDRIGRIEDKIEKLKHKLLRMKQGIHSSDNICLILNHFDRLYEKMNYEERRTLCRQFIQRIEVFPEKGDDKRILKSITFRFPVYFDLGGNQEEDDEDTPDEMVVFTLDCSRLPVTAAESKATYAEIKAHVLRIHGLKVSSLYIAQVKRKYGIEMGTAYNKPEKNKNHIPRCPKEKELAILDALKTYRMIPESTEYFEEAAE

SEQ ID NO: 6274 - protein, 563 aa, synthetic construct
MRKQKCYIYMRVSTAMQVEGYSLEAQKDRLTKFAQFQDMEIVREYCDAGKSGKNITGRPEFSRMLQDVAEEKDGVSYILVFKLSRFGRNAADVLNSLQYIQDYGVNLICVEDGIDSSKDSGKLTITVLSAVAEIERENILVQTMEGRKQKARDGKWNGGQAPFGYELDSKNSTLIVNPEEAEIVRIIFDQFTRTEAGADSICKYLNQHGYTKKRLRDQEVSYFSRSTILKILDNPVYVGKIAYGKNKTEKVKGTRDQYCRVKQDEYLLADGLHDAIIDEETWEAAKEKRKRTGVRWVKTHSLDHEHILSGLIKCPLCGGGMSGTVQRRKNKKTGEYKDTFYYRCHHRKRVDGHICDYKPMLNQKVFNAEIEEFIRYMAGGEKFKEFLMEKLEEKVDVSSLEEEKKQLAGQLQQAQGSRKKLVQMLERLDPGDKHYDRKYQDMQERMDNLYDRIAELEEAITDVETKIGASYGKQVTGKKIYQFLLDFDILYGKMTDLEKKEFMRTFIESIELDPDEKDMGRIIKHIDLTFPVYYDGQEGDRIRMPKENTVETIALITRIEEAG

SEQ ID NO: 6275 - protein, 562 aa, synthetic construct
MAMLRAALYCRLSKDDMLQGDSESIKTQKAMLTQYAKEHGFLVVEIYVDDGYSGLNFDRPSFNRMLDDIEAGKIDVVITKDLSRLGRDHLKVGHFTEIYFPMKNVRYIAVNDGVDTANKNNDIAALKNVMNEFYSRDNSRKIRSSIRARAKAGLYRSSFNPIGYRKSPDNHNKLIVDEETAWIVKRIFELANAGMGAHKIATVFREEQVPCPSWWLHSRGEKDYSKRFENPENKYEWSHTVIRNIISNPLYLGHCVMCKTESIFKVNASKKVPQEDWITVENTHEPLVTQEVFDGANEKILSRRRDTTDNFVSPFAGLVKCGTCGKALGLRYWTGKRHRIYVCTTYAHDTKACTDHRIFYEDLYKAVLADIQYHARLAYEDREKAVALAVKMNARADGSKGKNNADRLKAAKKRYEEVTRLFDRLYEDSVSGRISHDNFNRLMDKYQTEQEQLLGQIQALETAMQEVKDNQQNAVRWAELMAQYVGIQELTAENLNLLVERIEVYDRTETNAGAEQMIKICYRFGGYIGERVFSAKVLKHPCRKKACPLKERKGYGKISLVS

SEQ ID NO: 6276 - protein, 525 aa, synthetic construct
MSNPARTVTTIPATKKPGQGATSTTAKLTRRVAAYARVSTDMEEQASSYQTQIDYYTTYIQSRADWIFAGMYADEGISGTSTKHRKGFQAMIADALAGKIDLILTKSVSRFARNTVDSLTTVRQLKEAGVEVYFEKENIWTLDSKGELLITIMSSLAQEESRSISENVTWGHRKRFSDGKVMVPYSSLLGYKKGADGNLAIDETQAPTVHLIYQLFLDGSSITEIRAELQRRGILTPRGKTNWSTSTVRSILSNEKYKGDALLQKTFTADFLTKRIEVNEGEVPQYYVTGNHEPIIDPAVWDQVQYELATRHATNTAKIGLFASRLKCEDCGAWYGRKTWASNTKYKHTIWRCNQKYDHAQPCKTATLRDEQIQTAFLRALGQLAEKYRGESHLPQVIDAMFNTDQLEAESKRLDEKIRALTSEIEALVAENQRIAQDQDQYLAHYTQLEARYQKTLGRKQAIDAETAAKHAKATAIKTAYSQLADKSIEHFQACQWTALIDHAIIGANLIRFIFRTGKEIKVKL

SEQ ID NO: 6277 - protein, 416 aa, synthetic construct
MAKIEQVTPVRPVRVKLVNVAAYARVSTASERQLSSIAAQVSYYSRLIQSTPGWTYVGVFTDEGITGAKTSGRQGLSDLMALARSGGVDIVLCKSISRLARNTVDLLRIVRELKNLGVSIRFERERIDTATADGELLLTLLASFAQEESASLSANVKWAIRNRYKAGGTNSFFLYGYTWRNGQFIINEEEAGVVRFLFSNYLAGISPEKTADQLNAQGLSSRGGGLFYGSVFRRMLENERYKGCQLLQKTYNKTIKAPSRTVNDGVLSKYWVEGALPPIIEPALFDEVQQEIAYRRQVGPAATPSKNTGVFTGRIHCRVCGRNYQRKTRRYSSGNYYRYWRCWSACLGQGNPCGSHNLRETMLQTMCTTILGLEDFDEEAVTYHVAVIEASPHHLTVHLDNGTSVNIDLDEQGRPA

SEQ ID NO: 6278 - protein, 428 aa, synthetic construct
MVKTTPQLKKITVKPAKPRLLRVGAYARVSTEHDRQLSSIAAQVSHYSRLIQSTPGWEYAGVFIDEGITGTTTKKREGFNDLMNAARSGKIDVILTKSISRFARNTLDLLQAVRELKSLGVAVKFERENIDTTTADGELLLTLLGSFAQEESRSISQNVKWGIRKKYADGQLHSRQPYGYRYSEGELHIIDHEATVVKRIFNEFLAGISPEKTAARLNSEGIKPRYTNKFQGKRLRTILENEVYIGNASLQKTYRPQIANHCTKPNQGELPRFIVENSHEPIIDHQTFNAVQIELAKRRKHGRAASPGISTNAFTSHIVCSVCGKKYHRRTKKRGNRSRKIWWCETATKGKGNPCRAPQLPETILKTICLDLLGLTDWDDTQILTKLDKITVFPNRYLTFTLTNQNEPVIVDLAQWRKPSDCHRNNQA

SEQ ID NO: 6279 - protein, 525 aa, synthetic construct
MTATATTRRKRVTAIPATKTLRHNADSFSHAIKRRVAAYARVSTEQEEQASSYEAQIDYYTRHIQSRTDWEFAGMYADEGITGTNTRHRQGFKTMIADALAGKIDLILTKSVSRFARNTVDTLTHVRQLKDAGVEVYFEKENIWTLDSKGELLITIMSSLAQEESRSISENVTWGHRKRFADGKVMVPYKSLLGYKKGDDGNLAIDQTEAPAVRRIYARFLEGATPQTIAKELTTDQILTPHGKNIWSASTIRSILSNEKYKGDALLQKSFTTDFLTKTKKVNEGEVPQYYVTGNHPAIIEPATWEIAQAELARRSGKGTASAHPFANRIKCADCGGWYGRKVWHSTSKYRRHIWRCNNKYKPGYQCTTPHVTEQQIKEAFTQALTEQVKDNATLDHVIQLLNDTVYNTTELETRQTKIAKKMEETVALINQLITENATTAHDPDEYDQRYHQLEQRYQQQEKEHQTITNKIADLTTRQTQAKAIHDYLATQPPLEYSDQAWNTLVDYVLIGGANIFDVVFKHTI

SEQ ID NO: 6280 - protein, 525 aa, synthetic construct
MNRTVTAIPATKKLGNVTTPSGVPARRRVAAYARVSTEMEEQTSSYEAQIDYYTTYIRSRSDWRFAGMYSDEGISGTSMKRREGFQTMINDALAGKIDLILTKSVSRFARNTVDSLTTVRKLKDAGVEVYFEKENIYTFDAKGELLITIMSSLAQEESRSISENVTWGHRKRFQDGKIMVPYASLLGYKKGADGSLVIDETQAPTVRLIYQLFLDGMAISEIKTELAARKILTPRGKEVWSTSTVRSILSNEKYKGDALLQKTFTTDFLTKKMKVNEGEVPQYYVTGNHEPIIAPRIWDQVQYELATRHGNISSAKVGLFSTRLKCAQCGSWYGRKTWASNTKYKYTVWQCNHKYAGDKPCSSATVKDEDIKNAFVQALNQLIARQPRQSQLLQIFDSMFDTSRLEEQAAACQTKIVELTEQIEALIAKNQQRALDQDAYQNKYTELDTACRKTLACKASLEADIAANTAKHAAITTTLGDLAGEPVNDFRPAQWSALIDHAIVDEDGIRFVFRTGEQVRIALKG

SEQ ID NO: 6281 - protein, 416 aa, synthetic construct
MAHISVVTPVRSPAPKLVNVAAYARVSTNAVEQLASLSAQVSYYSRLIQSTPGWAYVGVFTDEGITGTSTKSRQGLADLMDTARSGGVDIVLCKSISRLARNTIDLLATVRELKDLGVAVRFERERIDTLSADGELLLTLLASFAQEESRSLSQNVKWAIRNRYKSGGTNSFVVYGYKWADGQFTIIEEEAKIVRLLFANFLDGISPEKTATMLNAEGKRSRGGGRFYGSVFRRMLENERYKGCQMLQKMYRPTIQAPTRSLNDGELPRYWVDNALPAIIDETTFDAVQKEIAHRREAGPAATPSKNTGVFTGRICCGACGKNYQRKTRTYKSGTSYKFWRCWSACTGNGNPCRGHNLRETLLEHACADMLGTQGFDPVQVGEQIVMIEAFEHQLTFHLADGTMMPVGLTSEGRLA

SEQ ID NO: 6282 - protein, 567 aa, synthetic construct
MAYRKVKSLLDTIGLRAVFYARVSTAEEEQLNAIELQIEENRNCIHKNKWKKVDEYIDRSKSGTMVKGRDDYQRLYEDLLTDKFDIVVIKDQERLMRNTKDWYLFIDRLVQTGKLLYMYLDNKFYNPDDALITGIRAIIAEEFSRNLSKKLHNYHDGRIEKARQGKEIDLQGSGNVFGWDKKDGKYYINPEQAKIRRLMCEGIMARKGSTQIAKELNEAGYRNTVGKPWKPMDIPKFVYDCKNVGTMIINKERQDFESKQVIKLPKEEWVYVKNALPPIVTEEEWELICKIHEERLIATGSDKRGKGKKVSGYSFSGKLVCGVCGAPYWRKQRSTKEEYWVCSTKQQKGRKTRKRDSVNGKAGEINEAGCDNTNISYNSLMEIMTIISERLQANTELVKVDMVNKLHSMRKRIVEANRGATEEDLQKELSRKDKLLDALLDGILTKEEYTRKAESIENRIVELRQEIEDNKTQFEDIAEIDRVLANIDEEVAVYLDENKQLKVEYILEHLDKVEIYPDKVIVIVPLFDVGFIVDKSQYVSREKWLWKNNIRKSPVWSDSLPPRGIFH

SEQ ID NO: 6283 - protein, 524 aa, synthetic construct
MKTAYSYIRFSSKAQELGDSLRRQLDDTRRYCTEHNLKLSETSYQDLGISAFKDRDRASLEDMLSAIKNGSIQHGSVIILESVDRLSRAGIDKTQEIVKSILRHDVEIVSLHDGLHLTKDSLNDLIAVIRLAASADLAHQESVKKAERVKAAKKRQKDDARQGKAIKKRLVWWLSRESDTYKLNENAQYVRKMITLRQQGAGYHKIAMKLNELGIQTRYGKTWSDTAVREMLSHDALYGGYQVGTVKDGKFIKEELIHNYYPPLISYSEFKELQSEYVNRTGGHKKHNHLSGLVRCGHCGSAMQKKLSKRTTKKRTIEYKQWICVASVSGGCEFKNGIRDLDEHIFKVAKHLVIEDNATISEAEDTAIARVDELQSRLIMQKDKLANADGVAFDLILEATERTKAELDSASSHLAQLQANSRDITTEDVDRLAQYSNDAVKFNLHLKKLIQRVVVSKKGNNLWHVKLFQRNQHTVNLTIFRETQRSAFKYFWGGSEDRINLIEDAKNSFAKMHEWEKDYDNEVT

SEQ ID NO: 6284 - protein, 529 aa, synthetic construct
MRKVYSYMRFSRPEQAKGTSIERQSNFAEQYAIEHGLELDKSLTMMDKGLSAFHGVHKTKGAFGQFLAAVTAGKVPSGSVLVVESLDRLSREDPLIAQAALTDLILSGITVVTAADNQVYSREEIQQNPFKLIMSLVVMIRANEESETKQRRSNAFLKSALNQYQANGKIRRLGSDPSWLDFNKDNDTYSFNERVEVIRRILNLYNQGIGSLKIARQLTEENIPTLSGKRSAWGQTTVANIVKSHALYGMKRINVQGVEYDLEDFYPALITTSKWLALQQHRTKRSKSMHGRGEVVHLITGHGKGFTTCGYCGGGLGAQTQKQYKRSGEYSITVTRLHCLTHKETSSCCSSVFLEPIESAVLFAACIGVEPQSLVPTVNNVNYSALIDEVENKVKHIVEQVTAGAPWDLFKDAHDKLKLEKQKLIKERDSQKPDVNQSDVQKWVNKLVELADKARANDKEARLKCRTLINSICKSIVIKLRGHDLKSEPVVTITFVTDEQFEFKVGKNGAVQFVDNGMAVNRRLKPLLA

SEQ ID NO: 6285 - protein, 634 aa, synthetic construct
MKLEHFSHTEPQIYSYSRFSNIRQEKGRSLARQKKFIDEVSAKFNLKINKDLVMTDRGLSAFHGHHKTKGALGVFLAAVEKQLIKPGSVLIVESLDRLSREQPYIAQATLASLVNADIVVVTAADEKIYSKETMAKDPLGTMILSVLEMVRAHKESLRKTEASIDFLHGQIATHEEGGVSDLAGPLPFWISRKQRPHPKIKTGFELNEHEEIIRLIVDMHFKQGMGLRPISVELLNRGIKPPSQLKHSPANSRKPKNDVWGVSTLSHIVSNQALCGRYVVNLNYQKDGKKHVEDYVLRSYYPAIMSEEEFDTFQAIKKRRYGSNKGDKSKRNGLVYLLTDYGNKSVCAKCGRSIGSQPQKQKHGIRRRLHCSKHKETANCCKSIIQDYIEDAFLISVARHIDYNLINTQVKPVDIIRNSDRLEEIDLEMANVIDMRRTVKDEKIKLKLKFDYETLENEKEELIKQKLEFKQFKIAPDDIKKFIRTVNDARNYNNNEARTFVKSILMQCIRKIEVHMEKKKLECYGYPNLFENAIVNVVDVEFYTDKKLSIFVSAETNALLFSKISDEFADESLGSFTEEQLKAWNDVGFDNFQNLGERGTLVNENENSTENLWFASDLAEAFMNEMINQSEDES

SEQ ID NO: 6286 - protein, 628 aa, synthetic construct
MPQLYSYIRWSTDRQDKGTTRNRQLAAAKAYADENGLEMVEILEPGVSAFRGKNRTEKLGGFIDAVKNNAIPSDSYLYCENLDRISRDQVDKALSLFLELIGLGLTIITGMDRKVYNRDTIRQNPTDLMISILMFIRGNEESETKSNRTVGNVVALVERHKEGLPVNIKSVGRHPFWIDDTGSQYEAVKKHPFYWNIAREIIDMFLSGNGVYSVKKYLDEKYPNGLKGREWDYQVLKKMRDNRALIGERTINLRGVPYKLENYYPWLCKDEAEFFLLEKRKQQNNYKSKKDGADTIKLLSGLSILRCSKCGGTMHSFMNHGKARYICTNGVHLQKNCSGWSITAQLVEHCTMIALLIGYMDKSRKNGSDTTLIEEELNEKEKLIKDLDSKISNLVAAIAIAPEVSSLAHSLNEINGKRKELVLAVEKLKDRLVSLQGKGSFEVDIMEFLILIQWAVFTNMEDNDRDKIRKIIDAIIEYVVVDKTDECITIKIKYYGNDEVLVFGGVDRKPHWRFTIDFDTGKEGALTVLENDLKDVPEIQKAVSYLHKLEKGYLAMYDSAVTMLAEVGYPEIKGAQFWPNSGKHEKVTVSFDGMEYTISFNGRLPKAIASAIETTGLTRQQFIEKFKV

SEQ ID NO: 6287 - protein, 635 aa, synthetic construct
MPKITRIKPGIKALPAKKKVAAYARVSKDTERLLHSVSAQVSYYSDLIQKNPEWEYAGVYADSGITGTLVAGRSEFGRLLEDCEAGKIDIILCKSISRFARNTVDLLNTVRHLKDIGVEVRFEKEQINSMSGDGELMLSILASFAQEESRSISENVKWGIHKRFKNGEIGAANKHILGYRYDDELKKYVIIPEEAETVRWMFQMYIDGVTLRDIADSMNNAGIRTTLGNDFQEASVRQLIFNEVYAGDIRRQKCYIEDPITKRKVPNRGELPQYYMADSHEAIIDRDTYAKVKAEMERRASLLNPTYCFTGKFKCAVCGANFTRKKGRVRGKEYVDWICRSKKEPGVTCKSHNYPEHKLMDICAELMETDGFDEEAFERNVKQITSLADGSIEMQLYGGEVRQWQMPPKPVKPKKIKPESKRPRNLFDGKIFCGKCGRRFGRAISDTTDGGHLYWYCRAKSNHGITCDSVNYPDSEIRDIFCRVMGKKTFDEDYFTKTVDRMVVQASGSIDFHLKDGTVKTYETLKLRSNRHETTSTDEFTGMIRCACCGNIYHRYCGYGKYVYWRCSGKHKVRTECNGQDLADFNIRKVSAYILGMDDFDGKAFTEQIDHITALEDGSLEYFFKDRRAKKWQRT

SEQ ID NO: 6288 - protein, 558 aa, synthetic construct
MKGKIALYSRVSTSEQSEHGYSEKEQEQLLIKEVMKNFPGYDYETYTDSGISGKNIEGRPAMKRLLQDVKDNKIEMVLSWKLNRISRSMRDVFNIIHEFKEHDVGYKSISENIDTSNASGEVLVTMFGLIGSIERQTLISNVKLSMNAKARSGEAITGRVLGYKLSLNPLTQKNDLVIDENEAHIVREIFDLYLNHNKGFKAITTILNQKGYRTINQKPFSVFGVKYILNNPVYKGYVRFNNHQNWAVQRRSGKSDKNDVILVKGKHEAIISEDVFDQVHEKLASKSFKPGRPIGGDFYLRGLIKCPECGNNMVCRRTYYKTKKSKERTIKRYYICSLFNRSGSSACHSNAINAEVVERVINVHLNRILSQPDIIKQIASNVIEELKQKHSNQPEIKYDIDSLEKQKAKLKTQQERLLELFLDDEMDSEMLKAKQNEMNQQLEVLDQQIKEAKQANQSQDDIPNFDKLKARLILMITRFSVYLRKATPEAKNQLMKMLIDSIEITTDKQVKLVRYKIDESLIPQSLKKDWGSFFMPKFQFEIYGQNDYFIDQITTFTT

SEQ ID NO: 6289 - protein, 547 aa, synthetic construct
MKLLVTYIRWSTKEQDSGDSLRRQTNLIDAFYSKHKNDYYLLPAHRYVDKGKSGFHQQHKNQGSDFRRMFENVMSGVIPEGSLIVVENFDRFSRADIDTAIDDVRQILRKGVSILTLGDGELYDKSALTDPVKLIKHIIIAERAHQESLVKQKRIAQVWNHKTQLARELKKPMGKQAPGWLELSEDGSHYIVDEDKASLVNIIYDKRLSGMSMFAICKWLNEQGYPTINQRKVRISKTKKPDGNWSALSVKHILTSRSVLGYLPAKISTEDRKTVLREEIESFYPQIVTDSKFYAVQQLLEETGKGKTSSGEHWLYVNILKGLIRCKCGLVMTPTGIRKPVYQGTYRCNGNKESRCSYGTVSRKLLDTQLCSRLFSKLSQLHDEATDTAKLDELQRRLNTVDSELEKLTETLIQLPNITQIQEALRVKQEEKDELIVQLSREKARVKSVSSLDLSGLDMESVEGRTEAQIIIKRLVKEIVVSGNEKLVDIYLHNGNMIRGFPLDGKDDHTLTLEEATDEMQSLDDMLIFGEPVTRIYPAGDMEEVDA

SEQ ID NO: 6290 - protein, 506 aa, synthetic construct
MRSVITYLRYSSAIQGAEGADSTRRQNDLFKQWLKKNSDAQVVASFSDEGLSGYKGKHLTGQFGDMLARIESGEFPEGTILLVESIDRIGRLEHLETEALMNRILGNGLEIHTLQDGLIYTKDALADDLGISIIQRVKAYIAHQESKQKSFRVSQKWEQRAKLALAGEQRLTKMVPGWIDPDTFKLNEHAETVRLIFKLLLSGESLHNIARHLQSNGIKSFSRRKDANGFSVHSVRTILRSETTIGTLPASQRNDRPAIPNYYEAAIDASTFNKAQEILGKNRIGRTPASDNPLTINIFKGLFRCQCGASVHPTGTKNKYQGVYRCNNHLDGRCDVPPLKRKPFDKWMIDNFLGMIDVGNDGEAEGKIASLQHEVEIVTTRIKKATALLLEMDDIDELKIQLKELNQKRTELQTTIDNMRRKASLTDKELPQLKDIDLTTKAGRVECQLILSKHLKGLTLGKDSVIVTLQNDTEITIPTNPLPLNDGSPIFEIADKELLDIDAYQL

SEQ ID NO: 6291 - protein, 506 aa, synthetic construct
MRTVITYLRFSSATQGAEGADSTRRQNELFKQWLRKNSDAQVVASFSDEGLSGYKGKHLTGQFGDMLARIEAGEFPAGAILLVESIDRIGRLEHLETEALMNRIIAHGIEIHTLQDGLIYTRDALSDDLGISIIQRVKSYIAHQESKQKSFRVSQKWEQRAKLALAGEQRLTRNVPGWIDPDTFKCNEHAETVRLIFKLLLDGESLHNIARHLQSNDIKSFSRRKDANGFSVHSVRTVLRSESVIGTLPASQRNDRPAIPNYYEAAIDAATFNKAQEILDKNRKGRTPASDNPLTINIFKGLFRCQCGASVHPTGTKNKYAGVYRCNNHLDGRCDVPPLKRKPFDRWMIDNFLGMIDVGNDGESERKIAALQHEVEIVTARIKKATALLLEMDDITELKAQVKGLNQKRTEIQTTIDTLKRKTSLTDKELPQLKDIDLTTKAGRVECQLILSKHLKGLTLGKDSVTVTLQNDTEITIPTNPLPLNDGSPIFEIADKELLDIDAYQL

SEQ ID NO: 6292 - protein, 507 aa, synthetic construct
MKRVISYIRFSSEKQAKGDSLRRQSKMVTDWLKAHPEYYLDESLTFRDLGVSGFTGKHLKGGLGDFLTAIEKGLVKAGDTLLIESLDRLSRQAVDRASELLRNILRSGVDVVTLSDGEHYTSESLKDPLALIKSILIMQRAHEESLRKSERIQAAWDAKKEAAKAGIKVSKRCPAWLKLNDDRKSFSVIPEKVETVKRCFQLRLEGKSIWEIVRTLNDECHQSMNQYKPGKFGQTSVQDLLKNRSVIGYFTPKGREEIAGYFPSIIHETDFYKVQQLSYARHGRKPASAKPLSVNLFKGVIRCSECGHALIITGFSDTRNGIYRCPLRNENRCSAKGLSRKQTDGTLLALLSRLDRFDSDTTNNIDTLKLHREHISSNIEKLVQLSLEIEDLNAITSKLKQLKGELSQVDADIEKETQRLKSIDVGCLSDCDLTTKAGRIEAQLIIKSAVKEVVLNTAKRRCKVTFHNGKIIDLPITENPSEDVTEAIQSLSEVTERGLIDVDVVAI

SEQ ID NO: 6293 - protein, 506 aa, synthetic construct
MRSVITYLRYSSAIQGAEGADSTRRQNDLFKQWLKKNSDAQVVASFSDEGLSGYKGKHLTGQFGDMLARIESGEFPEGTILLVESIDRIGRLEHLETEALMNRILGNGLEIHTLQDGLIYTKDALADDLGISIIQRVKAYIAHQESKQKSFRVSQKWEQRAKLALAGEQRLTKMVPGWIDPDTFKLNEHAETVRLIFKLLLSGESLHNIARHLQSNGIKSFSRRKDANGFSVHSVRTILRSETTIGTLPASQRNDRPAIPNYYEAAIDASTFNKAQEILGKNRIGRTPASDNSLTINIFKGLFRCQCGASVHPTGTKNKYQGVYRCNNHLDGRCDVPPLKRKPFDKWMIDNFLGMIDVGNDGEAEGKIASLQHEVEIVTTRIKKATALLLEMDDIDELKIQLKELNQKRTELQTTIDNMRRKASLTDKELPQLKDIDLTTKAGRVECQLILSKHLKGLTLGKDSVTVTLQNDTEITIPTNPLPLNDGSPIFEIADKELLDIDAYQL

SEQ ID NO: 6294 - protein, 507 aa, synthetic construct
MKRVISYIRFSSEKQSRGDSLRRQSKMVTDWLKAHPEYYLDQDLSFRDLGVSGFTGKHLKGGLGDFLTAIEKGLVKAGDTLLIESLDRLSRQDIDIASELLRNILRSGVDVVTLSDGEHYTRESLKDPLSLIKSILIMQRAHEESLRKSERIQAAWNRKKELISEGIKVSRRCPAWLRLNDDRKSFSVIPEKVETVKRCFQLRLEGKSIWAIVKALNDEGHQSMSQYKPGKFGQTSVQDLLKNRSVIGYFTPKGCEEISGYYPAIIDETTFYKVQQLSHYRYGRKPVSDKPLSVNLFKGVIRCSECGHALIITGFSDTRNGIYRCPLRNENRCSAKGLSRKQTDGTLLTLLSRLDRFDSDTTNIIDTLKLHREHISSNIEKLVQLSLEIEDLSAITSKLKQLKGELSQVDADIEKETQRLKSIDVGCLSDCDLTTKAGRIEAQLIIKSAVKEVVLNTAKRRCKVTFHNGKVIDLPITENPSEDVTEAIQSLSEVTERGLIDVDVVEI

SEQ ID NO: 6295 - protein, 507 aa, synthetic construct
MFKQSDVEITKYNDYKYLIYTRVSSDKDSQKESVPNQIDICRYWLEQNHYEFNENAVLVDEDKSGTLFLERTAMQLILQKARNREIKMVLFKSIHRLARDLKDALEIKEVLLGHGVRVVTIEEGYDSYVEGKNDMKFEMFSMFAAQYPKSLSVSISSALAAKVRRGEHIGKIPYGYDRIEQKLVIKEDEANVIRQIYKWYNEEGFGFKKITHLLNKGVQQGEILPPRSGKAWQITSIQRIIKNPTFCGTFILNQYTTIKVDGRKKQIRNPEEKWLVFEDHHPAIVSKEDWKLANNKKKVNIKTKITPWNEFRGLLKCGKCGSNIVIIQSWNRKLDGTKTHWRYLKCSAYRRSGKNGCDNHVPIRYEEFRRFIVERLLETGQKVSLDFNNTLNNHSKQQVKQLENSIAKYQEKNEGLVDLYLDKLIDKVEFQVRRKEFEQQIKEAQDKLFLYKNEEVQEVSVKNIQQAFKTIEKKDQDLYHVLKVIIDYITVNIDGSVDIKYNFDLNK

SEQ ID NO: 6296 - protein, 645 aa, synthetic construct
MKGVMYLKKAALYIRVSTSHQIDKDSLPFQRQELSNYSKYVLGIDDFEIFEDAGYSAKNTDRPKYQEMMSRIKNNEFSHLLVWKIDRISRNLKDFTEMYDELKDYGVTFISKNEQFDTSSAMGEAMLKIILVFAELERKLTAERVFSIMLSRAEKGLWNGATVPLGYKWSKEKKFPVIDEEEAKTVKYIYDLYEKKASTSKVAFQLNSEQVKTKRGGKWTAKTVNDILRNPFYIGTYRYNVKNSPNRRWKDEKEWVVVENNHPGFISKEQFEKVNKMLSDNYKGNGEFQRANTNTHIFSKILFCGKCGLGMNAGLDRARKDGYRPSRYTCYSNHFTENTRNCNNFVSDITLMPFVLNYISNFTNLQNKITQKHSLRDIERILLRGKSFVDVECIDRKGLEETYIAFAVGFDDKAYNNSNEEESAENLELESLKKEKMKYEKALKRLEDLFLFSDEAMSNKDFLFKKRDLTQHLERVNEKLSELHRRNADMRLTTDVAFLNKASNFLMSKHLSGKRNIDYRELLEVVDKTLIQDFIQTVIDKIIVVDKRVHSITFQNGITHKFLYKAKEKQKMRPKQKFLYRSYEPILIQYLKEHESVSRKEVEDLIGMGRTGAGSILKEFVDRGIVEKKGNSVATRYFLKEKKTT

SEQ ID NO: 6297 - protein, 530 aa, synthetic construct
MKAAIYSRKSKFTGKGESIENQVQMCIDYAKNIGIEDFYIYEDEGFSGKNIDRPQFQKMIKDAKDKKFDVLICYRLDRISRNIADFSALIQDLQDMGISFISIREQFDTSTPMGRAMMYIASVFAQLERETISERIRDNMHELAKTGRWLGGQAPLGYDSEQIVYFDENMKERKMYKLSANEEELKIVKLIFKKYLETKSLSQVHKYMLINNIKGKNGGNLAKGSINDILKNPVYVKADEQVIDYLESLGISVVGKPDKKHGILTYSKRRNGKETDMTKWIAAISKHKGVIDSKDWLLVQKILEKNKAKAPRTDTSHTAILTGVIKCKCGSGMRVIYGKKRKNGTKPFYYTCTMKNDSGGTRCKSKNLNGTEVENIVINEIKKINKNILIQEYKNVKNHLSNNDNLIEIENINKKIVDNESAISNLVKQLSKNIDSIASNYIISEIEKLNEEISKLKEKLNELNQNKKMLNNNLFNIDMVLEALNRFNKEIDNASIEDKRFLISMLVDKIIWDYESGEIKIIYWGGVKKN

SEQ ID NO: 6298 - protein, 535 aa, synthetic construct
MASNAAVKKVVTVIPVKPVEVVKGFALGAKKRVAAYCRVSTDLKEQETSFESQVQHYTDTIGKRTDWDLVDIFADDGISGTTTTKRTEFLRMIKECMAGNIDMIITKSISRFARNTEDCLHFVRKLKDKGIAVYFETENIDTLGSGGELLLTILSGMAQDSSRNQSDVTKWGILRQFESGRVLVNTTRFLGYDKNEDGELVINEEQAELVRRVFREYLEGKSYNAIAKGLTKDKIKTITGKDKWWDSTISGMLENEKYHGAALLQKTITVNFLTHKRTPNKGQSPKYMIDENHLPIIDKEIFDKVQDEKERRALLRGNLVGDRHKYSNKYPFSAKVFCGDCGNIFKRRQWNSTNTSKKVVWQCKTYIMDGKDACKAKAVDESVLMDAFVRTFNGIYENKQSFIKTLTENIEMIILQRPEGNETETLDNRIEKLKNELKRLIRFQVNNSIDSEVYNEEYRSISEDLEEVRKKRLEHERVIESKDGLKQRFDEILDAINSRDSLLEEFDEEIFNAMVEKWYATLRQDSEIKNCSVWG

SEQ ID NO: 6299 - protein, 533 aa, synthetic construct
MKAAIYSRKSKFTGKGESIENQIDLCKEYCIKNNIDVYEVYEDEGFSGGNTQRPRFKKMLKDAKDNKFNFLVCYRLDRISRNVADFSTTLESLQGYDIDFVSIREQFDTSTPMGRAMVYISSVFAQLERETIAERVRDNMHQLARTGRWLGGRTPLGFISEQIKYLDANLLERKLYKLVPVPEELKLVETIYNKYLELKSLSRLESDFLINGISTRSDKKYDMSTLKVILTNPAYVIADELFYEYCIKHNMDVASTKDEFDGNHSVMVFNKHKHANNRVKLNNTSEWIVSIAKHEGIIPSKDWIRIQDILKYNSSKTPRTGTSKVALLTTILVCSKCGSKMRITGKYKEGELQHHYYKCRLKERSKGTLCDMKNLNGYQAEKIVFDEMKKLALNKSIISKGFNESKEKLKKESSNASMDILSLEKRIKEKEKGIQNLTIQLSQNASSTAATYIIKQIETLDNELKQLKLQYESKEEIKQSNKMEQMNLELKDQLIKEFALNCNNMPFEKQKELLTSIIDKITWDGENLDIKLF

SEQ ID NO: 6300 - protein, 519 aa, synthetic construct
MKRIIKIEENKMLSVKKKIRVAAYCRVSTASDEQLISLDAQKAHYENYIKANDEWEYAGLYYDEGVTGTKKEVRDGLLSLIVDCEKGLIDLVITKSISRFCRNTTDCLELVRKLLGLNVYINFEKENLNTGSMESELMLSILSSLAESESVSISENEKWSIKKRFQNGTYIISYPPYGYANINGEMVIVPEQAEVVKQIFTDTLAGKSTHIIAKELNELGVKSKKGSKWTAGTVNAIIRNEKYTGDVIFQKSYTDSSFNRHTNYGEQDQYLCTAHHVAIASHEVFKKANEVMSQRGKEKGNGEDTQRYQNRYGFSGKIRCGECGSAFKRRIHNKPSGKYVAWCCTHHIEDKDACSMKYITDDSIKMAFLTMINKLIFAHQIVLKPLLRNLQGLDDKDRLLQIQEYESKLEKNMEQRQVLTSLMTSGILEPALFNGENNTLIQEEKMLQAEKDRLMHSVSGDRTRFDALKKLIKYVSGSEMMKEYEDEVFLAHVDKITVASREEIIFLLKCGLELKERMA

SEQ ID NO: 6301 - protein, 521 aa, synthetic construct
MNKSVTLIPARRHIGNTVKMEDKPKLKVAAYCRVSTDSDEQATSYEAQIEHYTNFIRKNEEWEFAEIFADDGISGTNTKKREEFNRMIEECMAGNIDMIITKSISRFARNTLDCLKYIRQLKEKNIPVYFEKENINSLDSKGEILLTIMASLAQQESESLSKNVKLGLQFRYQNGEVQVNHNRFMGYTKDDEGHLIIEPTEAEIVKRIYLQYLQGASLKQIGESLESDGILTAAGKAKWRPETIKKILKNEKYIGDALLQKTYTVDVLTKKRVKNNGIVPQYYVENNHEAIIPRDLYMQVQEEMLRRVNLHSGADRKKRVYSSKYALSSIVYCPKCGDIYRRIAWNNRGKRSFVWRCVTRVEHGPERCDTPTVQETELQEAVVKAINMALGGKEDMLVALEQNIASILALEDENSMENINAKLEELQKELLKRANAKKDYNDLADEIDRLRELKQNAMAENAEREGLKQRIAEMQEFLAEQTEQIEEYDESFVRRMVEKVTVYDDRFVVKFKSETLVDVER

SEQ ID NO: 6302 - protein, 533 aa, synthetic construct
MIAAIYSRKSRLSEKGESVENQIELCKQYGNNLGITDFLIYEDEGFSGGNTNRPNFQKLLSDAKKKRFNYLICYRLDRISRNVADFSTTLEMLQKNNIEFVSIKEQFDTSSPMGRAMVYISSVFAQLERETIAERIKDNMLELAKTGRWLGGTPPLGFKSVPVEYSGKENIKKMYKLEVVDNEMSIVKNIFSLYLEKRSTSTVSRHLCTNNVKGKNGGNFSRNTVLQILINPVYTFADDKIYNYFNEFGATLCNEFDGKHGLMVYNKREGGRKDKPVNEWIISAALHPGIIPSSEWLKCQEILKSNLSKPSPRSNTSNRFLLSGLVKCANCGSSMTAWSHLNKKINKLEKYYRCELRNRASTRCSTKMLNAYAAEDAIINALKNIDTKTIVNLYSSNENSEATKQELQNESNNLKKTISHNNMLIQGLIRKLALIEDSDTIKLIENELKTIKSENLSHEKRLSQINLDQMAAEDIDTKIISISSHIKTIKEFFDYIEDIDAKRVIIKEVIENITWDNETLEINLVGANASLNV

SEQ ID NO: 6303 - protein, 508 aa, synthetic construct
MKKAIAYMRFSSLGQMSGDSLNRQRRLIAEWLKVNSDYYLDTITYEDLGLSAFKGKHAQSGAFSEFLDAIEHGYILPGTTLLVESLDRLSREKVGEAIERLKLILNHGIDVITLCDNTVYNIDSLNDPYSLIKAILIAQRANEESEIKSSRVKLSWKKKRQDALESGTIMTASCPRWLSLDDKRTAFIPDPDRVKTIELIFKLRMERRSLNAIAKYLNDHAVKNFSGKESAWGPSVIEKLLANKALIGICVPSYRARGKGISEIAGYYPRVISDDLFYAVQEIRLAPFGISNSSKNPMLINLLRTVMKCEACGNTMIVHAVSGSLHGYYVCPMRRLHRCDRPSIKRDLVDYNIINELLFNCSKIQPVENKKDANETLELKIIELQMKINNLIAALSVAPEVTAIAEKIRVLDKELRRASVSLKTLKSKTVSSLGDFHAIDLTSKNGRELCRTLAYKTFEKIIINTDNKTCDIYFMNGIVFKHYPLMKTISAQQAISTLKYMVDGEVYF

SEQ ID NO: 6304 - protein, 506 aa, synthetic construct
MSSAEIRAAAYARYSSDNQREESIEAQLRAIKEYCEKNNIQLVKIYTDEAKSATTDDRPAFLQMIKDSSLGLFNAVIVHKLDRFARNRYDSAFYRRQLKKNGVKLISVLEQLDDSPESIILESVLEGMAEYYSKNLAREVMKGLKENAFQAKFNGGIPPLGYDIVDEKYVINEKEAEAVRLIFELYAQGYGYRHIIDELNLRGYRTKKGNPFSKNSIHEILKNEKYIGKYIFNKGTKKNHRMVKEDVIVIDNAIPAIIDKDLFEQVQKKIEERKITRGANSAKRVYLLSGLVYCGICDSKMVGCLSRGKYVTYRCSRKDRTKQCTNRDINKEKLEAFVIDELNKRVLDPKVAPVLAKLLNEENQKLNKERVEEITLLKKRYKEVEEQMKNIVEAIAQGMFQPIMKEKMNELEAMRNELAYRIKELENKKETSFITPEMILKIFEKDREIINSSKDPHEIKEVLKNYIKKIIVTPDEIKCEFYFWIGDDFRSLLVAASGFEPPTLRV

SEQ ID NO: 6305 - protein, 523 aa, synthetic construct
MAVSKNVMIIPAIKRMGNNRKEDETPKLRVAAYCRVSTDSDEQASSYEVQIEHYTEFIKKNSEWEFAGIFADDGISGTNTKNRDEFNRMIDECMAGKIDMIITKSISRFARNTLDCLHYIRKLKDKNIAVYFEKENINTLDAKGEIMLTIMASLAQQESQSLSQNVKLGYQYRYQQGEVMVNCSRFLGYTKDENKRLVIVPEEAEIVKRIYREYLEGSSMDKIKKGLEADGILTGAGKKRWHTSTIRKILSNEKYIGDALLQKTYTVDFLTKKRVVNNGIVPQYYVENSHEAIIPREIFMQVQEELVRRSKGHISTSGKKRNFSANHVFSQIIFCGECGEIYRRVHWNNRGKKSIVWRCVSRLENTGLACHSRTVQEDMIGLATVDAINKLLGQKDDFLITLKENIETVISETDNNIVSEIDKKLEELQKDLLRLANSKEDYNDIADEIYRLREERHKALAEEAGKKGSKQRLEDMEKFINEQSILLEEYDEQLVRRLIEKITVYDDKLTIEFKSGVEIDIEK

SEQ ID NO: 6306 - protein, 519 aa, synthetic construct
MKKITKIDGNKGTSIIKPKLRVAAYCRVSTDSDEQLVSLEAQKSHYETYIKANPEWEYVGLYYDEGISGTKKENRTELLRMLSDCENKKIDLIITKSISRFARNTTDCLEMVRKLLDLGIYIYFEKENINTQSMESELMLSILSGLAESESISISENNKWAVQRRFQNGTFKISYPPFGYDNIDGQMVVNPEQAEIVKYIFAEVLSGKGTQKVADDLNQMGIPTKRGARWTATTIRGILKNEKYTGDAILQKTYTDSRFNKRTNYGEKNKYLIENHHEAIISHEVFEAVEAALNQRAKEKGIEKRNNKYQNRYSFSGKIICSECGSTFKRRIHSSGARKYVAWCCSKHLKQITECSMQFIRDEDIKKAFVTMMNKLIFGRKLILQPLLEALRGMNKSDNLSRIQELEKQIEKNAEQRELLVKLMAKGYLEPALFNRENNELQMEANNYMEQKEALIHALNGELSKVQEVSNLIKFTNKAEMLSDFNDQLFNDYVEKIIVFSRVEIGFILKCGITLRERM

SEQ ID NO: 6307 - protein, 544 aa, synthetic construct
MAIIRAVGYSRYSTDLQNELSIEDQQALITRYALANGMAIQQFYSDAAQSGASIFRRDGLLQLLADAREGLFDAVIVEELDRLARDMEDLAGIHKRLSFAGIEIRAVHEGVANTVTVGLRGLVGQLFREDNARKIRRGMTGNISRGRTAGGRAFGYRPHPTERGELVIVPEEAEIIRRIFQEFADGRSAVEIAHGLTKDKCPMPRGARAWQASTIYGWAERRSGILRNDLYVGRIVWNKTRFVTDPETGRRVSRSNPAENWLHHDAPHLRIIDDAVWDQVQAMITPDRTTSHSDRAKMRRPTRPLSGLLRCGACGGGMSVKGKDRSGRVRIGCTRHVQSRTCPKPRTWYLDVVEEQVIGLLRGELQKPAMLDLYVSEYNKARAEYAAGMLRRRSKLESRIKQLDAEVSRLIDFVARGIGNTDRLAADYEARCEELASAKAELEDEPPAITPVMLHPAALVGYRLDLAKLAQIMGTDNSSETTRYAEILRGLIETVTISETAKGQMEITVAGKLRALIDAPTLKRRLSGGAVVAEEGLEPPTRGL

SEQ ID NO: 6308 - protein, 523 aa, synthetic construct
MKTAVIYARVSTQRQADEGVSLDAQVEQCRGRAEQLGAEVLKVFRDEGVSGRSTKGRHGFQAAVDFCGQAGVHFFITWATSRVARNAVDLIMAQETLRDGGTRLECLNADVNDDTDAGFINRTFMAAMDELHSRNISRDTLRSQKRVAAEGFFTGGRVPYGYAVVDEGKRRRMVPDLEAAAIVRRAFDLCLQEGLGAQAIAHALNDAGLLRAGARWGKNSVQYLLNNRVYTGVKTYNRKHSRTGRAKPLDEWVSVDAHEPLISKEAFERAQTMIKDRTPHEGGGTPRSEFVFAGKLTCGICSSLLQITNGTSRSGALYSYYSCVAHKHGRPQCLFRPIRADLMDEWLTQTILERVLTPEVVSKALDDVAAMTETWLRDREAARGRLVRDLRAVEGKRDGLLDFVAEHGRATPADVIGKLNEARAQIDELQAELDRLERAKVPRRNRHIDPEVAIEVMHETIMAADAKKKRAFMGAFLDQITVSNSEVEVAYRADALLQTGPVKDVHSGLDWLPDLGSNQGPTD

SEQ ID NO: 6309 - protein, 577 aa, synthetic construct
MKVALYARYSSDNQRDASITDQLRMCRLRAEKEGWTVVEEYTDHAISGASMILRPGVQALISDSLRGRFDMIMAEAMDRLSRDQEDIAGIFKRMTYADVKMFTLSEGEITHLHVGLKGTMNALFLKDLADKTRRGLRGRVEDGKSGGGLCYGYDVVKKFDDRGEAIRGDRTINETEAGIVRRIFADYLDGKSSRTIAMSLNHEGVAGPQGSEWGPSTIHGNPKRGTGILNNELYIGKLVWNRLRYIKDPDTGRRVSRLNPESDWVVHEVPDLRLIDQNIWDAVKARQSRLAYDVVETSPNPLNDRRRPKHLFAGLVKCGCCGGGYTMISKDLLGCATARNKGTCNNRLNIRRDALEASILNGLRKHLMDPALFKEFCTEFTREVNRLRIERGADLEGWKRELERVDKELDKIVDAIVHGFPLSKLKDKSEKLEARKAELTEKLANADEPPPLLHPNMAALYAQRIGQLYEHLQDEDGRSRAAETFRSLVDQVTLVPDNGELAIVLRGDLGAILRFAAGKKNPDFLAEAEALDNLLGASMASRKAGRTNAKTSAAGALEVSQLSLVAGVGFEPTTFRL

SEQ ID NO: 6310 - protein, 450 aa, synthetic construct
MQVAAYIRVSTDKQADKGYSLPEQEERIRAYCKSKGWELSKIYSDAGFTGSNMDRPALQELMREISAYDIVLVNKLDRLSRSQKDTLHLIQDIFAPAGASFVSMQESFDTTTPIGIAMVGILSAFAQLERSQIKERMKMGKEGRKKKGLWHGGVNIPTGYDYKDGILLPNDEAEQVRIIYEMFLEGISIRDITRYLQSHFTTRYTSWNYVGTVRRILSNPVYIGMVGDYKGQHEPLIDLETFDRVQVLLDERKQGGKVSTGKHLMTGFIYCGYCGSRVRSCCSVTKAKRYGYYRCGRADTGQLSKLDHKCELKPKNENEIDEIIKNEILKVKFEDVEISDSAATVLPDNSEEIKKIDQQINRLIDLYAICGDNVEELAKKLKDLKAKKTALEKISAKPKRATKKHIMESLRIAQDTFDSGSIEDKRMIIDSLISRVDLYNDTVKITWKFS

SEQ ID NO: 6311 - protein, 539 aa, synthetic construct
MKTAVSYRRVSSGKQLKGHGLTRQKEMVTNWIKRLDLQLVDDLVDDGLSAFKGHHKSKGELGVLLHAVQSNSISFDCLLVENFDRLGRMGVMDQFSQFSILINAGIELHIISEDKIFTSESINKNPYELFGVLAQMARSYDESKQKAQRVKKAFDSKMKLVEEHGVIFTKTVPVWLKVNSERTKFTIKPEAELVQRIFQLALQGYGATKIAKVFTKEKIPVPVYDKRSNSIWTQNKIQRILSNHAVYGKFVGTKTTIERDGYYPAIVSKEDFFIVQQQSKVRLNHRTKTTTNEVPNLFSGLLTCGHCDRAMRTHKLKNAPFLRKRTFRCKTSAQTDGCCHNNSYHLKSFEIGMILVLFEIDFSTNKKNQSKLPFIKAQIDDFNKQNENLVQAIMSGNVSKLIINKSVELEQQIADLKKELIKEEAAENISAPQLNLAERDQIIEDALYNEVYDVRLKLQSKLQQLISNIKIYDFGVLIELSMNRKVFFKPLSNRDFTPMYTLRIPDDVFDGPNDWQQLVTKSKIKIDTSRIKRTANPVV

SEQ ID NO: 6312 - protein, 519 aa, synthetic construct
MLTATIYKRQSTLRQHTNGDSNSRQTNSSAEYCTRNNLQVTEVLSDAGISGFTGENFAKGELGYFIERVQAGEYQQGHTLVLEHLDRFSRADVDVAINRLTSITTAGVDIAITGLGKEERILKKGMPLTDMLVVLLEFAQANDESAKKSERLKSAWVTKKQQAKDGVIITKRYPNWLDTKDGKFIVKKVNADLVKEIFSFYIGGESFMSIARILTDKDTDGSLIKCYPRSTTFKSTCVGAILKNHSVYGRLDKMDVDDYYPVIVSKEDFDLVQSIRGKRTKNQHSSGYTIKSASKKGVIKHLFSGLYECITCGGSLQYNEGERAKLKSNPNWESLYRLRCISAQLKSYGRCADSYTLKAREVERMLWNQMDNLMLYDAADEINTQQTIKKLDNEIVSYDETFNTYDFMIASKYQVPVELENDYNKAFHRVTEINNTKKTLEQQLKNSNKSLLTYKELNSNDKRNQARRLVEHTIKSIKVNWNKKPNAEFLVTLNNHQRYIIVNVDGKYKTVAKGLLLEF

SEQ ID NO: 6313 - protein, 524 aa, synthetic construct
MKQIIPYYRFSSIGQNKDGGSIARQKLDIENYSKQHSIPIATGEIYSDNGISGFKSHNIKYGKLGLLLDLLESGKLGSPHNLIIVVSALDRLTRASIMDAMDNVIKPILATGCTLATVRDGQHYVKDDLNDLSKLMMLQIGLNSAHQYSKSLSYHVKSAYNRMFDQLKNDGRCLRVFLPSWIEYTDSNKTHMQLKYPQADSVKLICNLSLQGLTCTTITDELIKLNMPTCGRATKWNLTAVNRILSSPSLHGQFYSSTRDLTVDDYYPVVITQDEYNIITAYRSNRTVNGRGKRLAGNDGKIFNLYSGLLQCGCGAGMSINRNGSFHHALRCNSRSQKGGCDNQQTNYKNFEHLLLNFINVVDLQSIFNPDANDNAQAELLNLNASLVNVKKNIENIQADIETEYSRELSQALRQTVKKRDYILEQINKIKMNSTVIPEFIKYNVNNLMLNAGHDNNKLRAEYKSKLMLVVDKIVIDHHLAIFGNTRTVRVYFSNGDFILLNLNKKLKNNSAGLYYKDGESINL

SEQ ID NO: 6314 - protein, 455 aa, synthetic construct
MANEIKQVALYIRVSTDQQAKHGDSLDEQQHTLNEYVRQQGNMRVFKTYIDDGISGQKLYRDEFQKLLDDVKKGKIDTILFTKLDRWFRNLRHYLNIQEILDKNNVTWLAVTQPFFNTETAMGRSFVNQSMGFAELEAQMTSERIRAVFDNKIRKGEVVSGKVPLGYDIKDKHLVPNEKAEIVKEIFQYYLETGSMRATVRHLENHFSMTRDYQSVRQMLTNRKYIGELRDNKNFCEPIVDRDVFERVQLQLSKNIRMNKKRDYMFTGLLVCSECGCNYSATAVISRYVRKDGTTNPNERHLYRCTKNRNNVKKCSNKKGIYETTLENFLLENIEKQAEELSVRMQKEPAVKKTKNINDKIKKKIDRLKKAYLNDVITLEEYKEDREELEALLIPEQDNKIAKIDLSSLHNYSTAEFREGYKQLTISEKSSLWRQVIKNIVVYPDGNLKINFLGY

SEQ ID NO: 6315 - protein, 495 aa, synthetic construct
MKHYYGYTRVSTVKQGDGVSLEAQQDAIKAYADKQNLLISGWFEEKETAAKSGRPVFNKLISSLRQGEADGVVIHKIDRSARNFSDWALIGELIDSGIDVRFAHESLDMQSRGGRLTADIQAVIAADYVRNLREECIKGIEGRLKQGLYPFNAPIGYMDQGAGKPKIPDPVRAPYVRQAFELYASGEFSILGLLEELRARGMRTRRGGQISKGCLENLLFNPFYHGVIHIKRGNRTYKGIHEPLIEKALFDRVQIMKSDRCNKKHNKHEVMFRRLVDCGYCGCRLYGEVQKGHIYMRCHTSGCPTTTVRQDVLDAEIELSLAGMQIPDTDLRRLRKQLENMFARRTHAQDQRAVALQIQNIDKRQDRLTEALIDGLIDQNTFQERKVRLTGEREKLELTITEMGDITRERAIAEKFLELTKSLYLIYQMSDPGKKRRLAEIVFSNLTLTGKNLVLTPRNWCVKVDQTLNLICGAPDRDTLRTREEIEEVFQVVDL

SEQ ID NO: 6316 - protein, 595 aa, synthetic construct
MNTRVKLIKASNTGARNRNALDLELKRVAVYCRVSTDSKDQLESYKSQVDYYTNLIKNNMNWTLAGIYADEATTGTTATKRADFMRLISDCQNGDIDMIITKSISRFARNTLDTLKYVRLLKENNVGVVFEEENIDTLTMDGELLLTILSSVAQQEVENTSAHVKKGLKMKMEKGELIGFQGCLGYDYDPITKSISINEEEATIVRYIFKRYLEGNGGSVIGRELEEQGYLTPRGKAKWSDTTVLGIIKNEKYIGDILMGKTFTVDPITKRRLANFGESDKYHIENHHEPIISREDFEKAQEIRLRRAQNRNTIANKDRKREKLSRQYAFSSMLECGFCGEILSRRTWHTSSIYKKINWQCVRSTKKGKKYCPHSKGIQEAAIEKAFVESYRQLCHADSTVIDDFLKIVEEEINDNTLVKDLKKLENQLNRIISQERKLVDLHLEDSIDEEVYAKKYKKLTKQKEELLDEKKTLELTIKDENSIKERLKQFKKVLENREIIEEFNRTVFESIVDKVVVGRIDKDGTVHPYDLTLYFKTGIEDSQNSNNFKDKRKNAKDNDSDKLCSHKNDEDKKLCSQAKDNECGDCSIDVKKIR

SEQ ID NO: 6317 - protein, 525 aa, synthetic construct
MPSAFSYVRFSSGKQAKGSSEQRQRSMLGQWLEQHPSFTLSDLRFEDLGRSGFSGEHLDHGLGQLLAAIDSGAIKSGDVILVEAVDRIGRLEPLEMLPLFSRIVRAGVSVITLEDGHIYSKDSVNETSLFLLVAKVQQAHDYSNRLSRRINASYTARREKARAGLGVKRETPVWLTTDGQLVPHVAPHIAQAFQDYADGLGERRICRKLRESGLEEFSKTNATTVRRWLKNKTAIGYWNDIPDVYPHVVDPALFYRVQQRLDAPKVDRAKPSAHYLTGLVKCAVCGRNYNFKQRKHTDPAMLCTSRARLAGEGCSNSKTYPVIVLDQVRKLTSLPFLQHAMESASSQADPSSQRLAVIDGEIGELSRKISEATKALLVLGFTPEIQESLEQLKTAREALEEERAALLLPQAEKLTAAQLEAFSNGLLDDEPMKLNHVLQTAGYSMVVHPDGSIDVDGKRFVYEGASRKEKVYKLRLLGEDKRWSLPILTPQMATYKSLFMAAVRLPGDPSEEELRRFEEAKHSER

SEQ ID NO: 6318 - protein, 489 aa, synthetic construct
MKRIAIYIRKSVKGDENSISLEAQTEVIKHYFKDKNEFVVYKDDGFSGGNTNRPAFQRLMADAMEGKFNTVACYKLDRIARNTLDFLTTFNTLKEYGIDLICVEDKYDPSTPAGRLMMTLLASLAEMERENIKQRVSDSMLNLAKQGRWTGGTAPFGYRVISKDGGKYLELEDSKNIKYIFNEFINGKGIIKLGHEFNCDKKKISRMLHNITYLQSSKDANIYLKHLGYEVIGQVDGCGYLPYGKYKILNGKKVRNYDGLKIACISKHEAVIDLDTFIKAQDRLKTFAGKKAPRISTKTFLAQMVQCGICGANMLVTLGQKRKDGTRKLYFSCPNKCGNKFKDVSELENDILTTLKDVNFFDEIRKNTNIMNKDNSKIKKSMLKELEEKKKILDGLMDKLALVDSNLANVIIEKMNSVNVDINDLQNKIDLLEKEEIASSYNKEDFKLKEENRKHFIEDFENMDMEEKQNSIRGVINKVVWDGKNIIIS

SEQ ID NO: 6319 - protein, 502 aa, synthetic construct
MNNKICIYLRKSRADEELEKTLGEGETLYKHRNALLKFAREKKLNVIEIKEEIVSGESLFFRPEMLELLKEVEAKKYDGVLVMDMQRLGRGDMKDQGIILETFKNSNTKIITPQKTYDLNNDFDEEYTEFEAFMSRKELKMINRRMQGGRVRSVEEGNYIATNPPFGYDIDFIKKSRTLKINEDEAPAINLIFKLYIEGNGASAIADELNVLGYKTKLGNKFSQSSVLTIIKNPVYIGKIAWKRKDIKKSKTPGKVKDTRLRDISEWIIADGKHQAIINTETWEAAQKILKSRYHIPYQLSNSPVNVFAGLITCGICGKKMVMRKARGINRLMCIYKCGNKSTRFDNVESDCLKYLREYLTDYTAEIKNQIKEDDNNIYISQISQLKKELTTLNNQRLKLFDLLERNLYDEDTFLERSKNINDRIETVSSTLKSIEKLLKKKSKASYEEDIEFFKSVLDAYDETEDISKKNSLLKSILFKIEYTKTNKGKDYEIKLFPKLRK

SEQ ID NO: 6320 - protein, 570 aa, synthetic construct
MKTVAIYSRKSRFTGKGDSIENQIEMCKDHIKKFVSPNVEFLIYEDEGFSGGNTNRPAFQRLINDIKYRNIDLLICYRLDRISRNVADFSSVLDILQEYKVDFISIKEQFDTSSPMGRAMIYIASVFAQLERETIAERIKDNMLEMAKKGKWTGGKLPLGFTSKKIAYIDEEGKKRFKVTLEHDSKDLEFVKFLYEKYLELGSLHKLETYTHENNIRSASGKIFEKSTLKIILQNPIYVKADENVFNYFENKGWSVYGEPDGLHSLLSYNKTETAKKDGKLTKRNKDESESLVAVSDIKGFIASSLWLKVQYQFKKNKNTFPRLGKTHNALLVGKLFCGNCGTRMIIQHGRTSTKTGIKTFYYVCSLKKTSKKKLCSAHNVKTDFLENLVLDSLEKLYYKKDFINDSLKINLKENKDNIKEINTTKKLIELNKNKINSLIEKLSLDFDNVLSDILIPQIKKIKIENDVLESKLEELKLKKQESEMNRIEIDLITSLLNKCKNIKELTRTEQKQIIDCLVDSIYYYSNDNGNDKIKIKFINDIDSINTLLSDEEKRQFEKLSFYSHSMSSI

SEQ ID NO: 6321 - protein, 489 aa, synthetic construct
MKQIAIYIRKSVKGDENSISLEAQTEIIKHYFKGENNFIIYKDDGFSGGNTNRPAFQKLMADAVENKFDTIACYKLDRIARNTLDFLTTFNLLKEYNIDLICVEDKYDPSTPAGRLMMTLLASLAEMERENIKQRVSDSMLNLAKQGRWTGGTPPFGYKVITLDGGKYLEIEDKNNIKYIFNEFINGKSIIKLGNEFNCNKKKISRILHNITYLQSSKDASIYLRQILGYEVIGESNGYGYLPYGNYKVVNGKKIKNTDGLKIACISRHEAIIDLNTFIKVQEKLKTFEGKKAPRISTKSFLAQMVQCTCGSNMLIVLGHKKKDGSRKLYFSCPNKCGNNFANVKEIEDDTLTVLKNVDFFNKIRQNNTNLNKDNSKIKSTILKELEEKKKLLDGLVNKLALVDSSLANVLIEKMESLNIDIKDLQNKIYLLEKEEIASSYNKEDFNLKEESRKHFIEQFENMDTKERQNAIRGVINKIIWTGKNIIIS

SEQ ID NO: 6322 - protein, 498 aa, synthetic construct
MKRIAIYSRKSVYVENSESIETQINMCKAYFTRQFKDCEFEIFEDEGFSGKNTDRPAFKRLMKLCSIKSFDAVAVYKIDRLARNIVDFMSIYNELEKLEIKLISITEGFDPTTPIGKMMMVMLAGFADMERMNIAQRVKDNMISLAKKGCWTGGAINRGYTAERKADGKKYLKLENEEFIKFTFENFLNGYSMHTLSKMQKEVYGSYGLKGAISIRNMLRSPVYVKSSKDVSDYLKNKGFEVVGKEDNKHGYLTYGLVSKEPFAIVSKHEAVIDPIVWLKVNNKLDNIKSTALTKESKCYWLTGVLKCPYCKANYVLANTKGKTYYTCSTRLKRGANKPNTCQNRTYVNAVEIETLIEDLIKKLYSKKYFDSFFCKSEKVYEDNTLELEKKLKKNEKSIMNLVEKLALIDNSNSATKFITNKIEELSKEISDIKIKIEENKFNKLEIELNKSTPDIIYNNISNFSKCKTLEEKRLRLKLIFKSVYYDPKTKAIEVEFI

SEQ ID NO: 6323 - protein, 507 aa, synthetic construct
MKRVISYIRFSSEKQAKGDSLRRQSKMVTDWLKAHPEYYLDQDLSFRDLGVSGFTGKHLKGGLGDFLTAIEKGLVKAGDTLLIESLDRLSRQAVDRASELLRNILRSGVDVVTLSDGEHYTSESLKDPLALIKSILIMQRAHEESLRKSERIQAAWDAKKEAAKAGIKVSKRCPAWLKLNDDRKSFSVIPEKVETVKRCFQLRLEGKSIWEIVRTLNDEGHQSMSQYKPGSFGQSSVQDLLKNRSVIGYFTPKGCEEISGYYPAIIDETTFYKVQQLSHYRYGRKPVSDKPLSVNLFKGVIRCSECGHALIITGFSDTRNGIYRCPLRNENRCSAKGLSRKQTDGTLLTLLSRLDRFDSDTTNTIDTLKLHREHISSNIEKLVQLSLEIEDLSAITIKLRQLKGELSQVDADIEKETQRLKSIDVGCLSDCDLTTKAGRIEAQLIIKSAVKEVVLNTAKRRCKVTFHNGKLIDLPITENPSEDVTEAIQSLSEVTERGLIDVDEVII

SEQ ID NO: 6324 - protein, 507 aa, synthetic construct
MKRAISYIRFSSEKQSRGDSLRRQSKMVNDWLKAHPEYYLDQDLSFRDLGVSGFTGKHLKGGLGDFLTAIEKGLVKAGDTLLIESLDRLSRQNVDRASELLRNILRSGVDVVTLSDGEHYTRESLKDPLALIKSILIMQRSHEESLRKSERIQAAWNRKKELISEGIKISKRCPAWLRLNDDRKSFSVIPEKVETVKRCFQLRLEGKSIWEIVRTLNAEGHQTLNQYKAGSFGQTSVQDLLKNRSVIGYFTPKGCEEISGYYPAIIDETTFYKVQQLSYARHGRKPASAKPLSVNLFKGVIRCSECGHALIITGFSDTRSGIYRCPLRNENRCSAKGLSRKQTDGTLLTLLSRLDRFDSDMTNVIDTLKLHREHISNNIEKLVQLSLEIEDLSAITSKLKQLKNELSQVDADIEKETQRLKSIDVGCLSDCDLTTKAGRIEAQLIIKSAVKEVVLNTAKRRCKVTFHNGKVIDLPITETPSDNVTEAIQSLSEVTERGLIDVDVVEI

SEQ ID NO: 6325 - protein, 507 aa, synthetic construct
MKRVISYIRFSSERQAKGDSLRRQSKMVNDWLKAHPEYYLDQDLSFRDLGVSGFTGKHLKGGLGDFLTAIEKGLVKAGDTLLIESLDRLSRQDVDQASELLRNILRSGVDVVTLSDGEHYTKESLRDPLSLIKSILIMQRAHEESLRKAERIQAAWDAKKEAAKAGIKISRRCPAWLKLNDDRKSFSVIPEKVETVKRCFQLRLEGKSIWEIVRTLNAEGHQTLNQYKAGKFGQTSVQDLLKNRSVIGYFTPKGCEEISGYYPAIIDETTFYKVQQLSYARYGRKPASDKPMAVNLFKGVIRCSECGHALIITGFSDTRNGIYRCPLRNENRCSAKGLSRKQTDGTLLALLSRLDRFDSDMTNTIDTLKLHREHISSNIEKLVQLSLEIEDLSAITSKLRQLKNELSQVDADIEKETQRLKSIDVGCLSDCDLTTKAGRIEAQLIIKSAVKEVVLNTAKRRCKVTFHNGKTITLPITENPSDNVTGAIQSLSEVIERGLIDVDEVIV

SEQ ID NO: 6326 - protein, 506 aa, synthetic construct
MRSVITYLRFSSAIQGAEGADSTRRQNDLFKQWLKKNSDAQVVASFSDEGLSGYKGKHLTGQFGDMLARIESGEFSEGTVLLVEAIDRIGRLEHLETEALMNRIIAHGIEIHTLQDGLIYTRDALSDDLGISIIQRVKSYVAHQESKQKSFRVSQKWKQRAKLALAGEQRLTKMVPGWIDPDTFKLNEHAETVRLIFKLLLSGESLHNIARHLQANNISSFSRRKDANGFSVHSVRTVLRSESVIGTLPASQRNDRPAIPNYYEAAIDAATFNKAQEILDKNRKGRTPASDNPLTINIFKGLFRCQCGASVHPTGTKNKYAGVYRCNNNPDGRCDVPPLKRKPFDKWMIDNFLGMIDVGNDGEAEGKIASLQHEVEIVTTRIKKATALLLEMDDITELKAQVKELNQKRTELQTTIDSMRRKTSLSDKGLPQLKDIDLMTKAGRVECQLILSKHLKGLTLGKDSVIVTLQNDTEITIPTNPLPLNDGTSIFEIAEKELLEIDAYQL

SEQ ID NO: 6327 - protein, 506 aa, synthetic construct
MRTVITYLRFSSATQGAEGADSTRRQNDLFKQWLKKNSDAQVVASFSDEGLSGYKGKHLTGQFGDMLARIEAGEFPASTILLVESIDRIGRLEHLETEALMNRILGNGIEIHTLQDGLIYTKDALADDLGISIIQRVKAYIAHQESKQKSFRVSQKWKQRAKLALAGEQHLTRNVPGWIDPDTFKCNEHAETVRLIFKLLLDGESLHNIARHLQSNDIKSFSRRKDANGFSVHSVRTVLRSESVIGTLPASQRNDRPAIPNYYEAAIDAATFNKAQEILDKNRKGRTPASDNPLTINIFKGLFRCQCGASVHPTGTKNKYAGVYRCNNHLDGRCDVPPLKRKPFDKWMLENFLGMIDVGNDGEAEGKIASLQHEVEIVTTRIKKATALLLEMDDIDELKIQLKELNQKRTELQTTIDNMRRKASLTDKELPQLKDIDLTTKAGRVECQLILSKHLKGLTLGKDSVTVTLQNDTEITIPTDPLPLNDGTSIFEIAEKNLLNIDAYQL

SEQ ID NO: 6328 - protein, 515 aa, synthetic construct
MKNVILYERFSSLGQKKGDSLVRQSRLCDEWCKKNNGKLINAYVDEGVSGFKGKHAAVGALSKILSAIENGYIERDTYLLIENLDRLSREEISTALDRFSSILRAGINIVTLMDGKVFTPESANNLPDLMWALMTMARANEESATKSKRASSVWLSKRKFVEGGGKPKFKTPNWLDYDEKKQEYKLNKHAASVALIFELYLKGKSINRVAMDLNELKTPPIGYSKKWSHSTVRWILDSKQTYGVLDAKTMYQDDFYPAAISKETFYKAQSELNRRKNKTGRTRNDKTPNLLTGLACCGVCGESITMQGKNHSSTGKAGNFKYLMCSTKRYSHVESHCGLPNFRYKYVEMILAVILSSIDTLPKSRDDKDNIVRIKTEIESIGEELEDIEKQIDNLIEALAVSKSDRIAAKLAQLEQNEAELKRNREALEVQYNEITLIEDDEKFEQRIRKLSVNIQNDEYRRELLSVLYKVIDEWRFNADGSISVQVSGNKINVSGVKGNVEISFPDRKIMIQTK

SEQ ID NO: 6329 - protein, 507 aa, synthetic construct
MKRVISYIRFSSEKQAKGDSLRRQSKMVTDWLKAHPEYYLDQDLSFRDLGVSGFTGKHLKGGLGDFLTAIEKGLVKAGDTLLIESLDRLSRQDVDQASELLRNILRSGVDVVTLSDGEHYTKESLRDPLSLIKSILIMQRAHEESLRKAERIQAAWDAKKEAAKAGIKISKRCPAWLKLNDDRKSFSVIPEKVETVKRCFQLRLEGKSIWEIVRTLNAEGHQTLNQYKAGKFGQTSVQDLLKNRSVIGYFTPKGCEEISGYYPAIIDETTFYKVQQLSYARYGRKPASDKPMAVNLFKGVIRCSECGHALIITGFSDTRNGIYRCPLRNENRCSAKGLSRKQTDGTLLALLSRLDRFDSDMTNTIDTLKLHREHISSNIEKLVQLSLEIEDLSAITSKLRQLKNELSQVDADIEKETQRLKSIDVGCLSDCDLTTKAGRIEAQLIIKSAVKEVVLNTAKRRCKVTFHNGKVIDLSITENPSEDVTEAIQSLSEVTERGLIDVDEVII

SEQ ID NO: 6330 - protein, 507 aa, synthetic construct
MKRVISYIRFSSEKQAKGDSLRRQSKMVTDWLKAHPEYYLDESLTFRDLGVSGFTGKHLKGGLGDFLTAIEKGLVKAGDTLLIESLDRLSRQDVDQASELLRNILRSGVDVVTLSDGEHYTRESLKDPLSLIKSILIMQRAHEESLRKSERIQAAWNRKKELISEGIKISKRCPAWLKLNDDRKSFSVIPEKVETVKRCFQLRLEGKSIWEIVRTLNDEGHQSMSQYKPGKFGQTSVQDLLKNRSVIGYFTPKGCEEIAGYYPAIIDETTFYKVQQLSHSRYGRKPVSAKPLSVNLFKGVIRCSECGHALIITGFSDTRNGIYRCPLRNENRCSAKGLSRKQTDGTLLALLSRLDRFDSDTTNTIDTLKLHREHISSNIEKLVQLSLEIEDLSAITSKLRQLKGELSQVDADIEKETQRLKSIDVGCLSDCDLTTKAGRIEAQLIIKSAVKEVVLNTAKRRCKVTFHNGKVIDLSITENPSEDVTEAIQSLSEVTERGLIDVDEVII

SEQ ID NO: 6331 - protein, 506 aa, synthetic construct
MRSVITYLRFSSAIQGAEGADSTRRQNDLFKQWLKKNSDAQVVASFSDEGLSGYKGKHLTGQFGDMLARIEAGEFSEGTVLLVEAIDRIGRLEHLETEALMNRIITHGIEIHTLQDGLIYTRDALSDDLGISIIQRVKSYVAHQESKQKSFRVSQKWKQRAKLALAGEQRLTKMVPGWIDPDTFKCNEHAETVRLIFKLLLDGESLHNIARHLQSNDIKSFSRRKDANGFSVHSVRTVLRSESVIGTLPASQRNDRPAIPNYYEAAIDASTFNKAQEILDKNRKGRTPASDNPLTINIFKGLFRCQCGASVHPTGTKNKYAGVYRCNNHLDGRCDVPPLKRKPFDKWMLENFLGMIDVGNDGEAEGKIASLQHEVEIVTTRIKKATALLLEMDDITELKAQVKELNQKRTELQTTIDSMRRKTSLTDKELPQLKDIDLTTKAGRVECQLILSKHLKGLTLGKDSVIVTLQNDTEITIPTNPLPLNDGTSIFEIAEKELLEIDAYQL

SEQ ID NO: 6332 - protein, 507 aa, synthetic construct
MKRVISYIRFSSERQAKGDSLRRQSKMVNDWLKAHPEYYLDQDLSFRDLGVSGFTGKHLKGGLGDFLTAIEKGLVKAGDTLLIESLDRLSRQDIDIASELLRRILRAGVDIVTLSDGEHYTRESLKDPLALIKSILIMQRAHEESLRKAERIQAAWDAKKEAAKAGIKISKRCPAWLKLNDDRKTFSVIPEKVETVRRCFQLRLEGKSIWEIVRTLNDEGHQTLNQYKAGKFGQTSVQDLLKNRSVIGYFTPKGCEEIAGYFPPIIPETDFYKVQQLSYSRYGRKPASDKPLSVNLFKGVIRCSECGHALIITGFSDTRNGIYRCPLRNENRCSAKGLSRKQTDGTLLALLSRIDRFDSDMTNTIDTLKLHREHISSNIEKLVQLSLEIEDLSAITIKLKQLKNELSQVNADIEKETQRLKSIDVGCLSDCDLTTKAGRIEAQLIIKSAVKEVILNTAKRRCKVTFHNGKAITLPITENPSENVTEAIQSLSEVTERGLIDVDEVII

SEQ ID NO: 6333 - protein, 507 aa, synthetic construct
MKRVISYIRFSSEKQAKGDSLRRQSKMVTDWLKAHPEYYLDQDLSFRDLGVSGFTGKHLKGGLGDFLTAIEKGLVKAGDTLLIESLDRLSRQAVDRASELLRNILRSGVDVVTLSDGEHYTSESLKDPLALIKSILIMQRAHEESLRKSERIQAAWDAKKEAAKAGIKVSKRCPAWLKLNDDRKSFSVIPEKVETVKRCFQLRLEGKSIWEIVRTLNDEGHQSMSQYKPGKFGQTSVQDLLKNRSVIGYFTPKGCEEISGYFPPIIPETDFYKVQQLSYSRYGRKPASDKPLSVNLFKGVIRCSECGHALIITGFSDTRSGIYRCPSRNENRCNAKGLSRKQTDSTLLALLSRLDRFDSDTTNIIDMLRLHREHISSNIEKLVQLSLEIEDLSAITSKLKQLKGELSQVDADIEKETQRLKSIDVGCLSDCDLTTKAGRIEAQLIIKSAVKEVVLNTAKRRCKVTFHNGKIIDLPITENPSEDVTEAIQSLSEVTERGLIDVDVVAI

SEQ ID NO: 6334 - protein, 507 aa, synthetic construct
MKRVISYIRFSSEKQAKGDSLRRQSKMVTDWLKAHPEYYLDQDLSFRDLGVSGFTGKHLKGGLGDFLTAIEKGLVKAGDTLLIESLDRLSRQAVDRASELLRNILRSGVDVVTLSDGEHYTSESLKDPLALIKSILIMQRAHEESLRKSERIQAAWDAKKEAAKAGIKISKRCPAWLKLNDDRKSFSVIPEKVETVKRCFQLRLEGKSIWEIVRTLNDECHQSMNQYKPGKFGQTSVQDLLKNRSVIGYFTPKGREEIAGYFPSIIHETDFYKVQQLSYARHGRKPASAKPLSVNLFKGVIRCSECGHALIITGFSDTRNGIYRCPLRNENRCSAKGLSRKQTDGTLLALLSRLDRFDSDMTNTIDTLKLHREHISSNIEKLVQLSLEIEDLNAITNKLKQLKNELSQVDADIEKETQRLKSIDVGCLSDCDLTTKAGRIEAQLIIKSAVKEVVLNTAKRRCKVTFHNGKIIDLPITENPSEDVTEAIQSLSEVTERGLIGVDEVII

SEQ ID NO: 6335 - protein, 506 aa, synthetic construct
MRSVITYLRYSSAIQGAEGADSTRRQNELFKQWLRKNSDAQVVASFSDEGLSGYKGKHLTGQFGDMLARIESGEFPQGAILLVESIDRIGRLEHLETEALMNRIIAHGIEIHTLQDGLIYTRDALSDDLGISIIQRVKSYIAHQESKQKSFRVSQKWEQRAKLALAGEQRLTKMVPGWIDPDTFKCNEHAETVRLIFKLLLDGESLHNIARHLQANNISSFSRRKDANGFSVHSVRTILRSETTRGTLPASQRNDRPAIPNYYEAAIDAATFNKAQEILDKNRKGRTPASDNPLTINIFKGLFRCQCGASVHPTGTKNKYQGVYRCNNHLDGRCDVPPLKRKPFDRWMIDNFLGMIDVGNDGESERKIAALQHEVEIVTARIKKATALLLEMDDIDELKIQLKELNQKRTELQTTIDSMRRKTSLTDKELPQLKDIDLTTKAGRVECQLILSKHLKGLTLGKDSVTVTLQNDTEITIPTNPLPLNDGSPIFEIADKELLDVDAYQL

SEQ ID NO: 6336 - protein, 507 aa, synthetic construct
MKRAISYIRFSSEKQSRGDSLRRQAKMVTDWLKAHPEYYLDESLTFRDLGVSGFTGKHLQGGLGDFLTAIEKGLVKAGDTLLIESLDRLSRQDVDQASELLRNILRSGVDVVTLSDGEHYTKESLKDPLALIKSILIMQRAHEESLRKSERIQAAWDAKKEAAKAGIKISKRCPAWLKLNDDRKSFSVIPEKVETVKRCFQLRLEGKSIWEIVRILNDEGHQTLNQYKAGKFGQTAVQDLLKNRSVIGYFTPKGCEEIAGYYPAIIDETTFYKVQQLSYSRYGRKPASDKPMAVNLFRGVIRCSECGHALIITGFSDTRSGIYRCPLRNENRCYAKGLSRKQTDGTLLALLSRLDRFDSDTTNTIDTLKLHREHISSNIEKLVQLSLEIEDLNAITNKLKQLKNELSQVDADIEKETQRLKSIDTGSLSDCDLSTKAGRIEAQLIIKSAVKEVVLNTAKRRCKVTFHNGKAITLPITENPSDNVTEAIQSLSEVTERGLIDVDEVII

SEQ ID NO: 6337 - protein, 531 aa, synthetic construct
MSIAYSYIRFSSAQQAQGDSLRRQTQLAQRYCEENNLTLSDTNFQDLGVSAFHSDNVKEDSGLGQFLEALEQGAIPEGSYLLVESLDRLSRAKVQTALIQMLRITQLGVKIVTLMDNRLYDKDLDTTDLIISLTIMERAHNESKTKSERIKAAWTNKRQNPNTTNRHSSAPFWLTLNSDKRTYTINEEYAELVRKIYQLSIDGWGVIKIVRYLNQNGITAPKGASWATTTVNRILNSKAALGHYEPTQNRKSLNTLIEDYYPPIIDEKTYYLSQQRKFERSKPEAAGRKTEYPNPLNQIAKCKKCGSSMYYENKSQSLKYLTCREFKKKNCTNKPIRMELIYRFIYEVFNSPMYHQQHAKLVDKSKQKDVNKLAELKGRYEAERKAYEELLEASSSFSDPFILKELQKRSTLILELSKQLEEAKAKETVEKARTVHINFTEALQLTVNAFHLPLEEVKVEELSTDELFNTRVRLNRILRQAFNHLSIFHCNESKRITIETEVTEDYPIDLRYETNQKAIKEPMKNRIWSAY

SEQ ID NO: 6338 - protein, 506 aa, synthetic construct
MRSVITYLRYSSAIQGAEGADSTRRQNDLFKQWLKKNSDAQVVASFSDEGLSGYKGKHLTGQFGDMLARIESGEFPEGTILLVESIDRIGRLEHLETEALMNRILGNGLEIHTLQDGLIYTKDALADDLGISIIQRVKAYIAHQESKQKSFRVSQKWEQRAKLALAGEQRLTKMVPGWIDPDTFKCNEHAETVRLIFKLLLSGESLHNIARHLQANNISSFSRRKDANGFSVHSVRTILRSVTTIGTLPASQRNDRPAIPNYYEAAIDAATFNKAQEILDKNRKGRTPASDNPLTINIFKGLFRCQCGASVHPTGTKNKYAGVYRCNNHLDGRCDVPPLKRKPFDRWMIDNFLGMIDVGNDGESERKIAALQHEVEIVTSRIKKATALLLEMDDITELKTQVKELNQKRTALQTTIDNMRRKTSLTDKELPQLKDIDLTTKAGRVECQLILSKHLKGLTLGKDSVIVTLQNDTEITIPTNPLPLNDGTSIFEIAEKELLEIDAYQL

SEQ ID NO: 6339 - protein, 498 aa, synthetic construct
MEGATKRALIVTRLSRVTEATTSPERQMEICQGLCDDRGYEVVGYAEDLDVSGSVDPFDRKRRPNIARWLANEAEPFDVIVVYRVDRLTRSLRHLQKLVHWAEDNGKLVVSATEPHFDMTTPFAPVLIALIGTVAEMELEAIRERNSSAARHNIRAGRWRGGQPPWGYVSSNASGEWRLVPCPEQVELINEVVARVLSGEPLQRIAHDLTSRSIPTPKGRTEWNVTPLKRSLTSEAMLGYVMSGDKPLRNDDGSPIVRAEPILSREVFDRVKVELESRSRRGEPTKRSSSLLLRVLYCGVCQLPAYQFNGGSHSKSPRYRCSSTGKSTKCENLTVRMDLADQAFTENLLDMFGDSERLERIWDTGSDHSAELADINEILEDLTGLLGTGPYKAGTPQRSALDSRIAALASRQAELSTEAVRPSGWVWRTTGEMFADWWDNQDTESRNVWLRSMNIKVTYNNSSGAVTWGLDWGDLKKFEEQLKFGKSAQRAVLQITEA

SEQ ID NO: 6340 - protein, 495 aa, synthetic construct
MGARVSVLSGPQKVSHEAQIDTATKWAKAHDYPVVGAFEDLGVSASVPPDERPDLGPWIRERSHEWEVIIWSKLDRAFRSMRHCSDFIKWAETNRKVVVFAEDSMTLNYLNPSTGIDSILGELFVQIAAAFAQIELNRFKSRAEDMHRAIRPTTRWAAGLPPLGYQVVDHPSGRGKGLAIDSDAANLVREMADKLVDGWSFVRITEWLNESGKLTSQGRSREARGLEPKGRWTTTNVIEILTGYRTLGIKTHKGQPVLDDDGEPVRLAPPLFTPERWDEVQRAAQLRKGKPRTPSETANPMLEVGFCAVCGSSLAQQFAKSRPRKSDGHVIHYRYYRCSRTPINCKAVFVVADDLDELLSEQFLLERGDRRVTERVFIPGEDNSYELDFIKDRIERLREDRVAGLFPSGEDELVFRNQMKQLLARREELESVPVRQPGYENVELEKTYREVWPGATPEEKRKMLIDAEISIRLGESPGKSLRAELVVNCMSATPD

SEQ ID NO: 6341 - protein, 559 aa, synthetic construct
MKTKLYSYIRFSSMRQSDGSSYERQIRMAREIAAKYDLELVNDYQDLGVSAFKGANSKTGALSRFLDAIGRSVPVGSWLFIENLDRLSRADIVSAQELFLSIIRRGITIVTGMDNKIYSLDTVTANPMDLMFSILLFIRGNEESQTKRNRTNSSALIKIKSHQENPQNPAVAIEEVGKNMWWTDTTSGYVLPHPVYFPVVQEIVELRKNGRSTAEILDHLNETYAPPPAVSNKKHSKWSRAMVERLFHTRALIGIKEISVDGVNYELKDYYPRVIDDPTFYHLKKNIGARAWNFGDKEEVKPIPLLSGIGLLKCDHCGCAMVKVKGTNKRSDQYRYTCDATRSRRLDCEHPNWSFRGDQLEKAVLQLLADKIWIAEDKANPVPALKVQVDEISRKIDNLIALSAMTGATKELADQITTLNSERETLYNQIKMAEEEMYSVDSQGWEKLAEFDLEDVYNEERLKVRFKIKQALKRIGCSRIDRNKNLFVLEYIDGKTQRVVIENSRGTRKGQIFVDLKTINDRQILESNGLVLHPCLDMLTDKNWKPEEEIPGPLQEFGI

SEQ ID NO: 6342 - protein, 551 aa, synthetic construct
MEYVAYLRVSSYNQKEKGDSIDGQRKSITRWVTERGGNIIKWYIDDGVSAYKGKRNNFDLMLQELENDIVKVDGLIVYSLSRFSRNLLAQLEATKVLQRKEIRLISATEALPESYEESYVMSSILGLMNEHSSMQNGKVVRDRLRDTALKQCFTGGPIPFGYRSVTVTGETSKKRKKLQIQEEEAEIVREIFNLAEKGENGKPLGVKKIAERLNIDMKYKRGSKWEKNTICRLLHNKTNIGEFIFNPSEGDPVTVKIPSIISKEQFYNVQECLRLKDIFSSESRGIRSKNLLTGLLKCSVCGGSMVVTSGKNGKYHYYQCSKQVRHSPDSCSSKRIRKDEIEPIVKDKFVKQLLKEDHLKMIHYNAKQRLKEVNKLSSTDKAKISKKIGSLETRYSRLVNLIADGDLVPDKRINKTLTGLSTQIDALEADMEKLKVRTNLPVKNFGSARLEEFAKAIQIYLHGIDDEALKQLMLATVTSVKVVKTTKKLKFEGSNMAVLYLIANAKTGTDFSVPVFVTKWRRDRDLNPRYAINVCRFSRPVLSTTQPSLRC

SEQ ID NO: 6343 - protein, 509 aa, synthetic construct
MRRAISYIRFSSERQLKGDSVRRQSKLVTDWLDKNPEFYLDSSLSFKDLGKSAFSGKHLKGGLGDFLTAIEKGLVKAGDTLLIESLDRLSRQDIDIASELLRRILRAGVDVVTLSDGEHYTRESLKDPLSLIKSILIMQRAHEESLRKSERVQAAWNRKKELISEGIKVSRRCPAWLRLNDDRRTFTIIPDKVEVVKRAFDLRLQGLSFWAITRTLNDEGHLSLNQYTPKQKGWSDTAVKKLLRNRAVIGCFTPAGREEVQGYYPAIISESLFYRVQQLNTGQYGRASVSSNPLSVNLFRGIIKCSECGATIVLGGYALKRFGMYRCPNRSANRCSAKAISRKQTDATILYMLALCDRFETENTDTIDSLKLQREDLQRKISKMAELAIELDDMTIITEKLRDMKNALSKLNHDIEEETQRIKAITTGSLKDIDRTTKEGMVETQLLIKGVLKEIVIDAAKRRCKVTFHNGRIIDLPITENPSEDVTEAIQSLSEVTERGLIDVDVVEI

SEQ ID NO: 6344 - protein, 507 aa, synthetic construct
MKRVISYIRFSSEKQAKGDSLRRQSKMVTDWLKAHPEYYLDESLTFRDLGVSGFTGKHLKGGLGDFLTAIEKGLVKAGDTLLIESLDRLSRQDVDQASELLRNILRSGVDVVTLSDGEHYTKESLKDPLALIKSILIMQRAHEESLRKAERIQAAWDAKKEAAKAGIKVSKRCPAWLRLNDDRKSFSVIPEKVETVKRCFQLRLEGKSIWEIVRTLNAEGHRSMNQYKPGKFGQTSVQDLLKNRSVIGYFTPKGCEEISGYYPAIIDETTFYKVQQLSHSRYGKRSVSDKPLSVNLFKGVIRCSECGHALIITGFSDTRNGIYRCPLRNENRCNAKGLSRKQTDGTLLALLSRLDRFDSDMTNVIDALKLHREHISNNIEKLVQLSLEIEDLSAITIKLKQLKGELSQVDADIEKETQRLKSIDVGCLSDCDLTTKAGMIEAQLIIKSAVKEVVLNTAKRRCKVTFHNGRAITLPITENPSEDVTEAIQSLSEVTERGLIDVDVVEI

SEQ ID NO: 6345 - protein, 618 aa, synthetic construct
MKPYDITATMFGTPTEDATVEVKDAVSLLRVSSKRQMDTAIDIDPDGLSIATQRRVVELKANSVGTRVVKEFLEPGYSAKTIDERPIFKELLHYLNTHPNIGFVIVYMRSRAFRNQYDAAMVQMHLQKRGIRLISAKEDFGEGPYAEAMEGMVDIMNGLTNKLQGLDIQTKMYEKARHGGTNGQARLGYLNVRDVYDGKPFNTVRLDPKRAPLVKKAWELYATGDYTLERVADTMTDLGLTARANRRCPERPVSYKWYHRMFKDIYYLGFITYKGKGEQTQIFPGRHEPLIEQELFDRVQDVLNQRSRKGQRDRIHQHYLKGHLFCARCERHGRTSRLIYTEAKSRNGSYYGYFMCRARQDKLGCDLPLLPVELVEDTITDHYHTLALPADFIDSVRELLSQTLADEQGSVRTMHAQLAKRIKDLDQKEERLIDLAADDSLPQDKIRIRLRRIQSDRASAQAGLLSTTAELNTGADILKSALAALSNPASYYQLADDTTRRFMNQTFYTKFLLDDEGVVDHCLNPPFDDFHQAKAAWNTTKPATLTDYLNAHPPQTQKRLPSRETPSHNLEPTLAGIVSVPGLSTASMVELRGIEPLTFSMRTSVTRGYSSSSCHFSR

SEQ ID NO: 6346 - protein, 491 aa, synthetic construct
MKQRAKRALVVVRLSRVTDETTSPLRQRAACFELCEQRGYEVIGTAEDLDISAGKTSPFDRPQLGDWLTNRRGEFDVLVTFRMDRIVRRLLDLADLIRWCQSNSVSLVSATETFLDLDSAFGDIIALLVAKVAEMELAAISERNRSAAQHNMRQGKYRGGPPPWGYMPEKVDGDWRFVHDDEQVKVINEVVRRVLDGEPLRQVAADLTDRAVLTPRDRVNQLKGREIRGYSWHSAKIREMLTSKSLLGHAVTANGSIRNDDGSPIIRATPILERDVFEQVQVELAGRENRKEPTKRSSSLLLRVLYCGVCGKPAYKLKGGKGRQDRYRCASAQYKSTCGNGMVLVADANEVLTDAVMFELGDKYRRDRVWDAGSDYAAELAEIDDTLADLTDQLGTGAFRKGTRQRERLDARIADLAERQAQLAAQATRPAGWTWVPTTELFKDWWKSQTVEQLNLWLRSMDIQMWWNHQGIQTDMLHLEKMAEQWSPALS

SEQ ID NO: 6347 - protein, 559 aa, synthetic construct
MKTKLYSYIRFSSMRQSDGSSYERQIRMAREIAAKYDLELVNDYQDLGVSAFKGANSKTGALSRFLDAIGRSVPVGSWLFIENLDRLSRADIVSAQELFLSIIRRGITIVTGMDNKIYSLDTVTANPMDLMFSILLFIRGNEESQTKRNRTNSSALIKIKAHQENPQNPAVAIEEVGKNMWWTDTTSGYVLPHPVYFPVVQEIVELRKNGRSTAEILDHLNETYTPPPAVSNKKHSKWSRAMVERLFHTRALIGIKEVSVDGVNYELKDYYPRVIDDATFYHLKKNIGARAWNFGDKEEAKPIPLLSGIGLLKCDHCGCAMVKVKGTNKRSDQYRYTCDATRSRRLDCEHPNWSFRGDQLEKAVLQLLADKIWIAEDKANPVPALKVQVDEISRKIDNLIALSAMTGATKELADQITTLNSERETLYNQIKMAEEEMYSVDSQGWEKLAEFDLEDVYNEERLKVRFKIKQALKRIGCSRIDRNKNLFVLEYIDGKTQRVVIENSRGTRKGRIFIDLKTINDRQILESNGLVLHPCLDMLTDKNWKPEEEIPGPLQEFGI

SEQ ID NO: 6348 - protein, 503 aa, synthetic construct
MENQPKRALIVTRLSRVTEATTSPERQMEICQVLCDDRGYEVVGHAEDLDVSGSVDPFDRRRRPNVARWLANEAEPFDVIVVYRVDRLTRSLRHLQKLVHWAEDNDKLVVSATEPHFDMTTPFAPVLIALIGTVAQMELEAIRERNSSAARHNIRAGRWRGGQPPWGYVSSNASGEWRLVPCPEQVELINEVAARVLGGEPLQRIAHDLTSRGIPTPKGRTEWNVTPLKRSLTSEAMLGYVMSGDKPLRNDDGSPIIRAEPILSREVFDRVKVELESRSRRGEPTKRSSSLLLRVLYCGVCQLPAYQFNGGSHSKSPRYRCSSTGKSTKCENLTVRMDIADQAFTENLLDMFGDSERLERIWDTGSDHSAELADINEVLEDLTGLLGTGPYKAGTPQRSALDARIAALATRQAALSAEAVRPSGWAWKPTGEMFAEWWGNQDTESRNVWLRSMNIKVTYNNSSGAVTWGLDWGDLKKFEEQLKFGKSAQRAVRQLDKMAEQWE

SEQ ID NO: 6349 - protein, 547 aa, synthetic construct
MKLLVTYIRWSTKEQDSGDSLRRQTNLIDAFYAKHKEEYYLLPAHRYVDKGKSGFHQQHKAQGSDFRRMFENVMSGVIPEGSLIVVENFDRFSRADIDTAIDDVRQILRKGVSILTLGDGELYDKSALTDPVKLIKHIIIAERAHQESLVKQKRIAQVWNHKTQLARELKKPMGKQAPGWLELSEDGSHYIVDEDKASLVNIIYDKRLSGMSMFAICKWLNEQGYPTINQRKVRISKTKKPDGNWSALSVKHILTSRSVLGYLPAKVSSEDRKTVLREEIEGFYPQIVTDSKFYAVQQLLEETGKGKTSSGEHWLYVNILKGLIRCKCGLVMTPTGIRKPVYQGTYRCNGNKESRCSYGTVSRKLLDTQLCSRLFSKLSQLHDEATDTAKLDELQRRLNTVDSELEKLTETLIQLPNITQIQEALRAKQEEKDELIVQLSREKARVKSVSSLDLSGLDMESVEGRTEAQIIIKRLVKEIVVSGNEKLVDIYLHNGNMIRGFPLDGKDDHTLTLEEATDEMQSLDDMLIFGEPVTRIYPAGDMEEVDA

SEQ ID NO: 6350 - protein, 506 aa, synthetic construct
MRSVITYLRYSSAIQGAEGADSTRRQNDLFKQWLKKNGDAQIVASFSDEGLSGYKGKHLTGQFGDMLARIEAGEFPEGTILLVESIDRIGRLEHLETEALMNRILGNGIEIHTLQDGLIYTKDALADDLGISIIQRVKAYIAHQESKQKSFRVSQKWGHRAKLALAGEQRLTKMVPGWIDPDTFKINEHAETVRLIFKLLLDGESLHNIARHLQSNGIKSFSRRKDANGFSVHSVRTVLRSESVIGTLPASQRNDRPAIPNYYEAAIDAATFNKAQEILDKNRKGRTPASDNPLTINIFKGLFRCQCGASVHPTGTKNKYAGVYRCNNHLDGRCDVPPLKRKPFDKWMIDNFLGMIDVGNDGESERKIAALQHEVEIVTARIKKATALLLEMDDIDELKIQIKELNQRRTELQTTIDSMRRKASLTDKELPQLKDIDLTTKAGRVECQLILSKHLKGLTLGKDSVTVTLQNDTEITIPTNPLPLNDGSPIFEIADKELLDIDAYQL

SEQ ID NO: 6351 - protein, 507 aa, synthetic construct
MKRVISYIRFSSEKQAKGDSLRRQSKMVTDWLKAHPEYYLDQDLSFRDLGVSGFTGKHLKGGLGDFLTAIEKGLVKAGDTLLIESLDRLSRQDVDQASELLRNILRSGVDVVTLSDGEHYTRESLRDPLALIKSILIMQRAHEESLRKAERIQAAWDAKKEAAKAGIKVSKRCPAWLKLNDDRKSFSVIPEKVETVKRCFQLRLEGKSIWEIVRTLNAEGHRSMNQYKPGKFGQTSVQDLLKNRSVIGYFTPKGCEEISGYYPAIIDETTFYKVQQLSHSRYGKRSVSDKPLSVNLFKGVIRCSECGHALIITGFSDTRNGIYRCPLRNENRCNAKGLSRKQTDGTLLALLSRLDRFDSDMTNVIDALKLHREHISNNIEKLVQLSLEIEDLSAITIKLKQLKGELSQVDADIEKETQRLKSIDVGCLSDCDLTTKAGRIEAQLIIKSAVKEVVLNTAKRRCKVTFHNSKSITLPITENPSEDVTEAIQSLSEVTERGLIDVDVVEI

SEQ ID NO: 6352 - protein, 548 aa, synthetic construct
MQKIIYPYVRFSSEKQSAGHSHERQIEKIKEYASVNGYEVNDTLNLRDLGVSAFKGKNAEKGALAAFLKMIEDGTIPTDGTSYLCIEQFDRLSRQTVDESYALFRKILISNVNIITLMDDKVYTKKSLNEMVSIISSLLLMEQANVESEKKSKRVSAVFKSKLEKLRNGEKIQFAYMLPGWIDNIGTKQDPNFIINDQVKTVRMIIDMYLGGETMGHIARILNEKQIPQFARKKTKNAISSWNSGKISHLLVNRCLIGELKIKKTGEIIKDYYPSVMSKDEWDIIQSTKRTNATIKVAGRRTINIFQGRLFCADCGNKYYFETDDKTGKHGKKYIYHMLKCSGRRFHSCDSKSIKYDDLTSGNLFFFEKIQDQKSKEYYDKIKLEISNHEKQIEELKKEQDELDLLLNNKSINFTAHAIANSKILDQIDILEKDIALNKQHIAFTMNTNMVEKFDKNDPVSVAKAKKFIKDNYAGILISSKHGTIISLMKSGQFFIKPIPNRFDDSIPKASLQLFEIKEQIQSQERKGLLDGKLKELLDAFNFSDRFE

SEQ ID NO: 6353 - protein, 559 aa, synthetic construct
MKIKLYSYIRFSSMRQNDGSSYERQIRMAREIAVKYDLELVNDYQDLGVSAFKGANSKTGALSRFLDAIGRSVPVGSWLFIENLDRLSRADIVSAQELFLSIIRRGITIVTGMDNKIYSLDTVTANPMDLMFSILLFIRGNEESQTKRNRTNSSALIKIKAHQENPQNPAVAIEEIGKNMWWTDTTSGYVLPHPVFFPIVQEVVELRRNGRSTAEILDHLNATYTPPPAASHKRHSNWSRAMIERLFHTRALIGIKEISVDGVKYELKDYYPRVLDDAEFYHLKKSIGVRACNFGDKEEAKPIPLLSGVGLLKCEHCGSAMVKVKGTNRRPNQYRYSCDAMRSSRIECVHTNWSFRGDQLEKAVLQLLADKIWIAEDKANPVPALKVQIDEISRKIDNLITLSAMTGATKELADQITTLNSERETLYNQLKMAEEEMYSVDSQGWEKLAEFDLEDVYNEDRIKVRFKIKQALKRIGCSRIDKYKNLFVLEYIDGKIQRVVIENSRGPRKGRIFVDLKTINDRQILESNGLVLHPCLDMLTDKNWKPEEEIPGPLQEFGI

SEQ ID NO: 6354 - protein, 507 aa, synthetic construct
MKRVISYIRFSSERQAKGDSLRRQSKMVNDWLKAHPEYYLDQDLSFRDLGVSGFTGKHLKGGLGDFLTAIEKGLVKAGDTLLIESLDRLSRQDVDQASELLRNILRSGVDVVTLSDGEHYTRESLKDPLALIKSILIMQRSHEESLRKSERIQAAWNRKKELISEGIKISKRCPAWLKLNDDRKSFSVIPEKVETVKRCFQLRLEGKSIWEIVRTLNDEGHQTLNQYKAGSFGQTSVQDLLKNRSVIGYFTPKGCEEISGYYPAIIDETTFYKVQQLSYARYGRKPASDKPMAVNLFKGVIRCSECGHALIITGFSDTRNGIYRCPLRNENRCSAKGLSRKQTDGTLLALLSRLDRFDSDMTNTIDTLKLHREHISSNIEKLVQLSLEIEDLSAITSKLKQLKGELSQVDADIEKETQRLKSIDVGCLSDCDLTTKAGRIEAQLIIKSAVKEVVLNTAKRRCKVTFHNGKVIDLSITENPSDNVTEAIQSLSEVTERGLIDVDEVII

SEQ ID NO: 6355 - protein, 487 aa, synthetic construct
MKLQAKRALVVIRLSRVTDATTSPERQREACLDLCKQRGYEVVGTAEDLDVSAGKTTPFTRPQLGDWLTNRHNEFDVLVVFRMDRIVRRLLDLADLIRWCQTHSVALVSATEAFLDLTMEFGDVVALLVAKVAEMELAAISERNRSAAQHNMREGKYRGGPPPWGYRPEKIDGDWRFVQDDEQVAVINEVVRRVLDGEPLRQVAADLTDRAVLTPRDRVNQLKGREIKGYSWHSAKLREMLTSKSLLGHAVTASGSIRNDDGSPVIRATPILERDVFEQVQVELAGRENRKEPTKRSSSLLLRVLYCGVCCKPAYKLKGGKGRQDRYRCASAQYKSTCGNGMLLVADANEVLTDAVMFELGDKYRRDRVWDAGSDHSAELSDIDDTLADLTDQLGTGAFRKGTRQRERLDARIADLAERQAQLAAQATRPAGWTWVPTTELFRDWWGSQTIEQQNLWLRQMEVRMTWDHQGPHIDMRQLDKMAEQWE

SEQ ID NO: 6356 - protein, 685 aa, synthetic construct
MTKITGDHLARSAYVYVRQSSIDQLLHNPESRRRQYALTTRACALGWDNAIVIDDDLGRSGGGTARPGFERLLAAICSGDAGAVFALEASRLARNGRDWHTLLEFCALVGSLIIDEDGVYDPRLVNDRLLLGMKGTFSELELSTLRQRSQEALRLKAARGDLHTTVAIGYRRSADDRLEQDPDLRIREVLSLVFRKFREISSVRQLVLCLRQEGIDLPTAVHGPQGRTVRWGPPRYHAVHRLLTNPVYAGAYVFGRTISRTRVEGGRKVITHGVARRRDDWMVLIRDHHAGYISWEEYDRNRTIIAGNASMKGAMVAGAVRNGSGLLVGLLRCGRCGRKFKVLHHSRRDARYVCASHVDPSRERGCSAFSNTRIDAAVSAEVLRAISPLALEAALQVISGHKQAGNERLRQSELALDQARYETAHARRQYDAVDPDNRLVAGELERRWNDCLAAVARLEDQIRSLRSEQPSAVSDDERMALMALAGDLPALWNDAAASIETRKRIVRAVLKEIIVTVETGRLHLVLHWQGGDHTRLEVLKNRSGQNRYKTDVATEQLVRELARLLPDHSIAPVLNRLGIRSARGQTWTQLRVRNFRGAHQIPVYREGERAERHELILGEAASRLGVSKMTVVRLIRDGLLPARQVCARAPYVIREDDLARPAIRQAIARVRPISADPRQEILSFQ

SEQ ID NO: 6357 - protein, 488 aa, synthetic construct
MRVLGYPRVSTEEQAEKGNSLTEQMERMTAYCKAMGWDEPIFFIEDGYSAKNLNRPEITRMLDYVKKNAEGGIVLTTKLDRLSRKLFDILSLNEYFNKHNYNFVSATEGFDTSTPAGRLVLQMLGMVAEFERERTSERVRDNMLSIARNIKNNKKIITRPCFGYDVKHGEMVFNIEESLLIKKAAADLISGIPSRRIIQNWNMVEGVKTKDGNEWSDKTFRELFQRETLVGDFVYNKTYKEGTKVITRPEEEWIRIEDNHPAILDRDTFERLQALFQSRKTVGKHMSNDRYLLSGLVVCGHCGNKMNGKMNRSYSKRNQKENIHYQYLCDGYLKKSNCYHHYVKRDMLETLIVNEIISLSESAPGKLKILISETKEKTLDINIIKSKLAKLDKKMQKQIDAYNDDLITAHDLKIATERVQGERRELECMLEVPNNGQEKKEERVIHKAKKEKKYITSEDRLVVKQSIRKLIDKIEIMNGEEVVVTWLG

SEQ ID NO: 6358 - protein, 502 aa, synthetic construct
MKVAGYIRVSTEEQAKEGYSLDAQREKLINFCKSQNDWELVEVYPEEGKSAKDTNRPELQRLLRDARSGMYDVILVYRLDRLTRSVVDLYDMLQMFEEHSIKFKSATEVYDTTTAMGKLFITIVAALAQWERENLSERVRFGMEELVRKGNWHGGPVPYGYEWTGKTMLIVEEEANILRTLRDTYMSGEGLGSTAKKLNALGLMRRGKKWSSQSVWYTLDNPFYAGKIRYGEKKKNGKYASRKKEQLVDVIWSETNFPTIYTWEEYQEHKARMERKEFYGHSKKREYLFTGVLRCARCGATLIGRPYRNTKVDGTKTENVYNYICSSRSLSKGCDLPLLRQHIAEDLLLKHIKKKKLEESKILDQLKRKTPNRQKNVLEIEKLNKELKNITERRKKWQYMFVENLINVSDFKERKNEEDIKEQLINEKIKELQSENIGVSKENLNRFFELPDLWEVLDDNDKRELTQILFEKIFIECKVKTGRGVAGKGRSLPFYIKELKLN

SEQ ID NO: 6359 - protein, 523 aa, synthetic construct
MMKKDRGYVRVSTLYDSQKDSPEHQESFLIESAAREGVELDRIYEDRDTGTSIVAREDVQKMIADAKSGEIRSLWFTSLSRFSRDALDAISLKRILVNALNIRVVSIEDGYDSAKKDDELLFGIKAVVNQNTSGDISVSSRRGIRKSVLEDGNIIASKPAYGYKIVTTAEGRRTYETYPEQAAVVDLIYELYISGTGDKNIVNYLNGENPAGIVYKSYTGRPWNLGSVQSILKNPTYTGYNISGRYTTEVVYDDLNDLMNRRKKLVQRPESEWEWSKEQTHPAIIPLERYKLARELRIQRGGAARGGRRTFVNVFAKMIFCKDCGSAMVTMKGKSRDGGKEYRYLLCSRRRRMGKAGCSNNTYFPYYDLRNDLIGNILGRIRQKIRELESRGTDDIGITIPQNDFDKEKRKLNKQIENNRKLLFEIRRQHMLGDIQTSQYEYEKEQYEKEITDHEKRLEAIVAEEKRSFDVERIKKDARRVLTEMTNLKSYDDDIQKTRALLMQVVRRIDVAQDGDIDIRTYI

SEQ ID NO: 6360 - protein, 524 aa, synthetic construct
MKVADLYIRVSTDEQADKGYSQRDQEDRLKKYCSSNNISVGQIIYEDHSAKSFNRPGWMRLLTTLKKKSCKTNLILFTKWDRFSRNAGDAYQMIGTLAKLGIEPQAVDQPLDLSIPENKMMLAIYLAAPEVENDRRALNVFYGMRRAKKEGRVMGKAPFGYVNKSRENGEKYIVLQEPEASAMNWAFNEIAKGVLASNQIRKRVNELTIKKVSRTSFHVAIRNPIYYGKVFLEKHKDEEAHFVNGQHEALISEDLFNRVQEILDGKRRLQRPNTKILSGEHFPLRGFLICPKCGKNITASASKGRNKRYYYYHCNATCGFRLRAELINSVFEEGLKQLEMTEPAKKLIEKVFLDNYQKFIKAPQDERKKISDEIDRLNSRISLARNKLLSEVITDEEYLEIKKEYKDHVEKLETQLNDKPIENNVDIPKLLEKALGTLTNIWKVYTEGDIAVKRQIIGSIFPEKLEFDKNHYRTTRINAVAHYVFQINNGLSQNKNRRNDNNNHFSCYVDPQGITLYICLQFIE

SEQ ID NO: 6361 - protein, 629 aa, synthetic construct
MPQLYSYIRWSTDRQDKGTTRTRQVAAAKAYAEEAGLEMVEIIEPGVSAFRGKNRAGKLGDFIDAVKNAAIPSDSWLYCENLDRLSRDQVDEALRLFLELIGLGLTIVTGMDRKVYNRDTIRQNPTDLMISILMFIRGNEESETKSNRTVGNVVALVERHKEGLPVNIKSVGRHPFWIDDTGSQYEAVKKHPFYWNIAREIIDMFLSGNGVYSVKKYLDEKYPNGLKGREWDYQVLKKMRDNRALIGERTINLRGVPYKLENYYPWLCKDEAEFFLLEKRKQQNNYKSKKDGADTIKLLSGLSILRCSKCGGTMHSFMNHGKARYICTNGVHLQKNCSGWSITAQLVEHCTMIALLIGYMDKSRKNGSDTTLIEEELNEKEKLIKSLDSKISNLVTAIAIAPDVNSLAHSLNEINSKRKELVLSVEKLKERLVSLQGKGSFEVDIMEFLILIQWAVFTNMEDNDRDKIRKIIDAIIEYIVVDKTNDCITIKIKYYGNDEVLVFGGVDRKPHWRFSIDFDTGKEGALTVLENDLINMPEIQKAVGYLHKLKESYVAMYDAAVTMLSEVGYPEIKGSQFWPNTGKHEKVTVAFEGIVYTISFNGRLPKAITSALETTGLTRQQFIENFKVQ

SEQ ID NO: 6362 - protein, 555 aa, synthetic construct
MLCYSYVRFSTPEQARGDSHRRQMEFAKNYCKLNNLTLVEDLSFNDFGISAYKGDNLKNGALGKFLELVHSGYIPNGSTLIIESFDRLSRQTAIKAQAIFSEIISAGITIVTAMDNRSYNLKSVTENPFDLMYSLMIMIRANEESETKSKRVKEAIKANIRNKKIVSSKLPYWIKHNKEKDILELIPERVEVILYIIEKYLSGLGISKLTQHLNDNIKPFAGKNWYPVYLQKLLRSPSLYGERQYNIDNTLHIMDNYYPAIINKSKFAVIQENLDLRAPTRGGKISSAITGIRKAYCGYCYGVLVSQSTRRNGKIVDGLRRVRCNSNHNGKHCITSTFRASLVEHAIAEYCSQHIDLSFLEPTSNASKLKLSEYKLELHELNKKINNYVKFISEGHVSPAIVASLNEAENRKKEIEYNINKLDLDILSDNKEELIKKWREIKTNLESYNEENILKLRELIRISIKTIYVFQYGVWGKENSIILPSRKSIPIEKGAFTIQITFKSGVRKTLVLGDKIEDMEVIPQNRTIKENGKTYTSEEYTKILEDKIKIEYEQK

SEQ ID NO: 6363 - protein, 520 aa, synthetic construct
MRTAYAYIRFSSEKQSAGDSVRRQQSLIDSWVKNNPDYILSQKTYKDEGLSAFTGKHAAGDLGRLMNDISNGSITAGDVILIESLDRLSRENISTATDRLKAILIHGVNVVTLTDQKQYTPESLNSPMDLILSILTAQRAHEESQSKSKRMREVWAKKRTEAEESGKVITKSCPRWLTVNSDRTGFEPIPEHVESIRLMFEMRLSGKGFAGIAQALNESGRLTLTGRSKGWNSSSVQQLLSNKALIGYKIPSRKAVVNYIEIPDYFPSVIPLEQFQQVQLIGADKQGQRAANDRPMNVNLFRGVMKCAECGATVIVSGVDDKRAGYYSCSFRRLGRCNTSKPMNRGMVDEALIKGLLYSLDRLTTQGQGENPLMKLEAKRADLTERSQKLLAALEIADDVSAIATRLKAVTDEIRAIETQIKTCKDLEQVHTVQSVQGMDLTVKSQREEVQLLVKKTFREINLDGIRKTVNVYLHNGLTLLNVPVNQIVDAGEWIELLPVIGGDTVDFKDINFKAPRYLD

SEQ ID NO: 6364 - protein, 531 aa, synthetic construct
MKEIIKIDSTIRKTGFKKKTRVAAYARVSSDSDEQLLSLEVQKEHYENYIKSNPCWEYAGLYFDEGISGTKIGKRESLKQLLKDCQSGQIDRIITKSISRLARNTVDCLEIVRKLTGLGIYLYFEKENIDTEHMSSELMLSILSSIAQSESRSISENNTWAIQKRFENGTFVISCPAYGYKNENKKMIIVPEQARVVKEIFNMALSGMGGEAIARVLTDKKIPTKKGGSWTSSTVNAILTNKTYTGDVIFQKTFTDDNFNRHKNCGEKQQYVIENHHEAIISHETFNLVKEIIAWRRSENNIVCGSGKYNKLYAFSGKIRCGECGSKCKRRIIYQHNKAYGIWVCITHLEDIHACSQKSVMESYLKISFLQMLNKLKAGYVQMLTPLVESLRGVNNKDGLNKVIELEEKIAKLQEQEQVLSKLLAGGYIEMDSYYLESNQLKTEIDTCLKEKLQLSNSLNGNLTHLNEAQKLQRFVSVTEVFSEFKDEDFLDFVDGIVVKSRTRFLFILKCGLELEEEVKETWHASHMVTE

SEQ ID NO: 6365 - protein, 525 aa, synthetic construct
MSANVIIIPPRKIAGNTVDKHEDKPKLRVVAYCRVSTDSEEQATSYDTQVQHYTDYISRNPLWEFAGIYADDGISGTSTKKRVGFNDMIHDCMSGKVDMVITKSISRFARNTIDCLKFVRQLKDKNIPIIFEKENINTMEASGELLLTIMASLAQQESASLSQNVKLGLKFRYQEGKVQINHNWFLGYTKDDEGNLVILEQEAKVVRRIYREYLEGASLRDIAEGLEKDGIKNGAGHLKWNLSNIKGILQNEKYIGDALLQKTITTDFINHVRIKNDGTEPQYYVKDSHTPIIPRDIFFKVQEEMLRRANMFSGEENKKRRVYSSKYALSSLCVCAKCGDVYRRIAWNNRGVRSVVWRCCTRVENGPSACDAPTVQENELQSAIVKAINKVFSISDEVLDTLKNNIREIIAGNNLSEIETVDKKIADKQAILLTLLKAKKDYTKIADEIDELKGKKQQLLIEKAGQEDAKRRIREMEDFLKNERHDISEYDEKLVRKYIKKIKVYEDRFSVTFKSEISVDIERAS

SEQ ID NO: 6366 - protein, 490 aa, synthetic construct
MKNIAIYIRKSVKGDDNSISLEAQTEVIKHYFKTENKFTIYKDDGFSGGNTNRPAFQKLMHDATQNKFDAVACYKLDRIARNTLDFLTTFNTLKEYGIDLICVEDKYDPSTPAGRLMMTLLASLAEMERENIKQRVTDSMLNLARSGRWTGGTPPFGYKVITIDGGKYLELEDKNNILYIFDEFINGKGILKLSNEFNCDKKKISRILHNITYLKSSTEANTYLKQTLKYEIVGTPNGCGYLPYGKNKVINGKKVKNIDGLKIAAISKHKAIIELETFIKAQEKLKTFEGRKAPRISNKSFLAQMVQCTCGSNMLIVLGHKKKDGTRKLYFSCPNKCGNTFGDVKEIEEDTLLTLKAVNFFEKINQNKPTINNKDSSRIKTSLLKELENKKKLLDGLVQKLALVDSDLANILIDKMETLNENIKELQSKIDLLEKEEISLSYNKEDLNLKEKNRKHFIKEFENMNMQEKQTSIRKVINKITWTGENIIIS

SEQ ID NO: 6367 - protein, 559 aa, synthetic construct
MKTKLYSYIRFSSMRQNDGSSYERQIRMAREVAAKYDLELVNDYQDLGVSAFKGANSKTGALSRFLDAIGRSVPVGSWLFIENLDRLSRADIVSAQELFLSIIRRGITIVTGMDNKIYSLDTVTANPMDLMFSILLFIRGNEESQTKRNRTNSSALIKIKAHQENPQNPAVAIEEVGKNMWWTDTTSGYVLPHPVYFPVVQEIVELRKNGRSTAEILDHLNETYAPPPAVSNKKHSKWSRAMVERLFHTRALIGIKEVSVDGVNYELKDYYPRVIDDATFYHLKKNIGARAWNFGDKEEVKPIPLLSGIGLLKCDHCGCAMVKVKGTNKRSDQYRYTCDATRSRRLDCEHPNWSFRGDQLEKAVLQLLADKIWIAEDKANPVPALKVQVDEISRKIDNLIALSAMTGATKELADQITTLNSERETLYNQIKMAEEEMYSVDSQGWEKLAEFDLEDVYNEERIKVRFKIKQALKRIGCSRIDRNKNLFVLEYIDGKTQRVVIENSRGTRKGRIFIDLKTINDRQILESNGLVLHPCLDMLTDKDWKPEEEIPGPLQEFGI

SEQ ID NO: 6368 - protein, 547 aa, synthetic construct
MKLLVTYIRWSTKEQDSGDSLRRQTNLIDAFYSKHKEEYYLLPAHRYVDKGKSGFHQQHKAQGSDFRRMFENVMSGVIPEGSLIVVENFDRFSRADIDTAIDDVRQILRKEVSILTLGDGELYDKSALTDPVKLIKHIIIAERAHQESLVKQKRIAQVWNHKTQLARELKKPMGKQAPGWLELSEDGSHYIVDEDKASLVNIIYDKRLSGMSMFAICKWLNEQGYPTINQRKVRISKTKKPDGNWSALSVKHILTSRSVLGYLPAKISTEDRKTVLREEIESFYPQIVTDSKFYAVQQLLEETGKGKTSSGEHWLYVNILKGLIRCKCGLVMTPTGIRKPVYQGTYRCNGNKESRCNYGTVSRKLLDTQLCSRLFSKLSQLHDEATDTAKLDELQRRLNTVDGELEKLTETLIQLPNITQIQEALRVKQEEKDELIVQLSREKARVKSVSSLDLSGLDMESVEGRTEAQIIIKRLVKEIVVSGNEKLVDIYLHNGNMIRGFPLDGKDDHTLTLEEATDEMQSLDDMLIFGEPVTRIYPAGDMEEVDA

SEQ ID NO: 6369 - protein, 705 aa, synthetic construct
MQSLSHSPQIYSYSRFSRLRQKDGDSLKRQREYAEQVAKEYSMTINEDLVFSDHGKSAFHAEHKKKGKYGIFLDAVKQGKVVKGSVLIVESFDRLSRENAMRAQSDITALIESDITIITSSDKRVYNKEVVYRDPSQIFMMVAVMVRAHEESLTKQKRSLKRIKGAVEKWQGGDKAVSVGGANPSWLKRTKIGLVFDKEKADVAKKICDMFTSGKTMVSIAAYLNDSNIPTFGRASHWRVTTITTLLENEALFGRKIVDLGGSEDGVVLPFRAILEGYFPALITKEEFDLIQEIKKLKAKGRAGHRTKRKVTDEIGNVIEEIEENAIYLLSGYGVALDGAAKSRCAKCGGSMGTRRQHQYTRKGVYTKTEYRFECAESSTTGFKKCDVGSIRLGNMEASFLLTVSKHIDFNLLNKNVDSREVEVIDSKLKEIEVQLESATELLITTTNVTIRQTAQKKLSELEAEQRELERKKLDGKEFVINQDAIDHFVSVVDRAAFNVADHEARSEVKNILMQSTTKLVMHIKKKQTMKDFGFSNIMPNVNVYAIEVHFKSGKVMWYFHDAKRDQLAFTVILDSEEVAGGLSESYLKKWNELGDDSYEEHLAFEDGEVFADLMEKLIESQQDDGSFADYDEVFGSYDQKKTRAEEIQEKWDDWKFRVDLDANNREYDELLSKNSSKASSVSKSEFSSEVDLHCDTWGFSLGRE

SEQ ID NO: 6370 - protein, 705 aa, synthetic construct
MTCFSREAQVYSYSRFSRMKQKDGDSLRRQAMYAEAIAKEYNLTINEDLVFSDHGKSAFHADHKKSGMYGIFLEAVKNGKVAKGSVLIVESFDRLSRQHAMRAQTDITALIENDITIITSSDKQVYNKESIYQNSGQIFMMAGIMLRAHNESLEKQKRSLTKIREAVQEWEGGDKSVSVGGANPSWVKRTRNGLVLIDDKARTVKSICSMFIDGKSMNHIAGFLADNNVDTFGNSSHWRVNTITKILENEALFGRKTVDLDASEDSVILPFYAVLDNYFPALITKEEFDLIQEIKRLKTNGRTGYKIAKRVTDENGNVTEEVEQNSIYLLSSYGRAKGGIAKCRCSECNGSMGTRRQQQYTRSGKYTKTEYRLGCNNTSTTSNKKCDVGSIKVGNLETSFLIAVSNHIDFNLLNKNADSRAVEVIDSKLKEIEEQLEKATELLITTDNVTIQKTAQKKLSELEAKQKELEHKRMDGKAFVIKQDAIDRFISIIDRAAFNIDDHEARSEVKNILMQSTTKLVMYIKKKQTMKDFGFSNIMPGVNVYAIEVHFKSGKVMWYFHDAKRDQLAFTVMLDPEEVAGSLSESYLKKWNELGDDSYEEYLALEDGEVFANLMEKLIESQQDDGSFAAYDEFFGSYDQKKTRAEEIQEKWDDWKFRADLDANNREYDELLRKNSSKSSSVSKSEFSSEVDLHCDTWGLPLGRE

SEQ ID NO: 6371 - protein, 516 aa, synthetic construct
MTGKQVTVIPMKPKKLVADNTEEKPKLKVAAYCRVSTEMEEQSSSYEAQVQHYTDYIQKNPDWELAGIFADEGISGTDTKKRAEFNRMIDACKNGEVEYIITKSISRFARNTVDCLQYIRQLKELKIAVFFEKENINTMDAKGEVLLTIMASLAQQESQSLSQNTKMGVQYRFQQGQLRINHNHFLGYTKDEDGNLVVEPNEAEVIKRIFREYLEGSSLQEIAKGLMDDGILTGGKRKLWRAEGVRLILRNEKYMGDALLQKTFTVDFLTKKRVKNDGSYAQQYYVENSHPAIIPKDIFMQAQQELDRRKSMKNKNSQCFSGKYALTGITICGDCGNVYRRVHWKNRGTVWRCKSRVDKREHNCSGRTIYEKDLHQGILQAINETLIDRDIFLQQLTDNINSVLTDVLTEQLVVLDKQLKDLESEIISVAIGGQGYDELASQIFSLRDERDAVAKQIAANTNLQQRVDEMEAFVKEHDVITEYSEVLVRRLIEKVTIFKKNIVVDFKSGVSMAVEI

SEQ ID NO: 6372 - protein, 498 aa, synthetic construct
MTPIKMTTASKPQAILYSRFSSSQQADGDSIRRQEEAAYKFCEREGLELIESQFKDLGFSGWKRHVKREGLESLLMAVENGTIPSGTWLLVEATDRLSRQGWDHVVQLVKSLVSTGCTFVTLDNNQIYNSSNIQDLMSALPLMISADLAFKESQKKSERLRAVKTNKRSNRVIQGNQPFWIDVVDGKPVLNDKAPLARRIVDMALEGIRPLAIVRQFNTEGIKSPKGKDWEVAVIRRILKNTILYGAKTYFEARDGEYKDVETVAGLYPKICTLAEFEQITIKKKKDDTSYNTAGPFSNLLKCQCGKPLVAKQRRGDDYYKVCSGMQNKTCNYRGYYKNIDFYLTKWLGTLSMEEIAHKSNVIDNSPRITELEQLLIDLEAMRVENKGKTRILQRIYEDIEEAESELEQLQAQKSLSEGDTKTTLRDALSFSDNPTKQNMIFRRYINTIVCRKETKDIIVGEVHFKSGASYEVWIHHDSKLKNTSESISYKYNLKTNR

SEQ ID NO: 6373 - protein, 568 aa, synthetic construct
MSHPVKAYSYIRFSTPKQAQGDSYRRQLQQAMDYCAEHNLQLDDKTIDDFGTSAFRGANMTEGALGRFVDAVKHGEIEQGSYLLVESVDRLSRQAVEEALEQFLAIVRAGIVIVTLSDKQVFRRGQVDFTKLIVSIVYMARANDESEMKSRRSRAAWSNGREQARKNNKVIANSRLPSWLTRDGEQIVPIPERVAIVNEMFEMAKSGCGYEQIAKVFLEKGYKTFGKEADWRPAGIQAVIKSQAVIGVFQPHVIENGHRVPADEPILGYYPTIVSPALFEEVQHLISKRNKHSGSYRKGTFNNLFSGVLRCQCGESLRYQNKGRAGSPRNYLVCPKQNTAGCKLPNMLYDKVEPQLLQAVFLLNRVMKQRVEGEDKTIALRTMLAELRVQLEVETQKRKKAAQLVLDNDNDADYRVLFEQCKKKTQALEKQIQRAESDLMSRELSVKTLKYIVDPEDLSSTEQRQRFNGQLKTALKEIRFRFDGGYLWAEYMDIDGSRVLTQIFEDRLAGSSIYDGSSYLVRKTQTEAPYGVDPSVMQQEMSDYIRNLQKNDDGTDPDFEDLSSEYSK

SEQ ID NO: 6374 - protein, 547 aa, synthetic construct
MKLLVPYIRWSTKEQDSGDSLRRQTNLIDAFYSKHKNDYYLLPAHRYVDKGKSGFHQQHKNQGSDFRRMFENVMSGAIPEGSLIVVENFDRFSRADIDTAIDDVRQILRKGVSILTLGDGELYDKSALTDPVKLIKHIIIAERAHQESLVKQKRIAQVWNHKTQLARELKKPMGKQAPGWLELSEDGSHYIVDEDKASLVNIIYDKRLSGMSMFAICKWLNEQGYPTINQRKVRISKTKKPDGNWSALSVKHILTSRSVLGYLPAKISTEDRKTVLREEIEGFYPQIVTDSKFYAVQQLLEETGKGKTSSGEHWLYVNILKGLIRCKCGLVMTPTGIRKPVYQGTYRCNGNKESRCSYGTVSRKLLDTQLCSRLFSKLSQLHDEATDTAKLDELQRRLNTVDGELEKLTETLIQLPNITQIQEALRVKQEEKDELIVQLSREKARVKSVSSLDLSGLDMESVEGRTEAQIIIKRLVKEIVVSGNEKLVDIYLHNGNMIRGFPLDGKDDHTLTLEEATDEMQSLDDMLIFGEPVTRIYPAGDMEEVDA

SEQ ID NO: 6375 - protein, 506 aa, synthetic construct
MRHVITYLRYSSAIQGAEGADSTRRQNDLFKQWLKKNSDAQVVASFNDEGLSGYKGKHLSGQFGDMLSRIESGEFSEGTVLLVEAIDRIGRLEHLETEALMNRIIAHGIEIHTLQDGLIYTRDALSDDLGISIIQRVKSYIAHQESKQKSFRVSQKWEQRAKLALAGEQRLTKMVPGWIDPDTFKLNEHAETVRLIFKLLLSGESLHNIARHLQSNGIKSFSRRKDANGFSVHSVRTVLRSESVIGTLPASQRNDRPAIPNYYEAAIDAATFNKAQEILDKNRKGRTPASDNPLTINIFKGLFRCQCGASVHPTGTKNKYQGVYRCNNHLDGRCDVPPLKRKPFDRWMIDNFLGMIDVGNDGESERKIAALQHEVEIVTARIKKATALLLEMDDITELKTQVKGLNQKRTELQTTIDNMRRKASLTDKELPQLKDIDLTTKAGRVECQLILSKHLKGLTLGKDSVTVTLQNDTEITIPTNPLPLNDGTSIFEIADKELLDIDAYQL

SEQ ID NO: 6376 - protein, 534 aa, synthetic construct
MVSQTIQPTMPATIYVRWSSEAQTGRDSLRRQLEAAQRYADEHRLLIVETIIDEAVSAFSGHHLTKGRLGEFIRRVEDRAVAMPHVLICESLDRLNRQAPLDALAPFIGLINAGITLITLTDRQRFTRQSMADDGGLRLLGSLIVMLRAHEESATKSKRVRAAWERKRREADVRKLTKTCPAWLRLSPDRSRFEIIVERADVIRMIFSETTAGVGKGSIAARLNAAGVPAFRGKHGWHASYIQKLLSSDAAGGTYQPHTMEDGRRVPIGPPVLNYFPPIVDHALMMKARAAIIARRTGAAGRKGADFRNIFTGIARCAACGGTMTYVGKGDAERYLACSSARRRRACGCRALFNFNEAERLFFEAALTFDPAIRNAPGASRTREDLLRASRDAARLSGRLTKLLDSFGSDATDEIVVTVATARDQLRLARTEEKRLRDQILVEEYGANLPDLRAAILELRAADESASASSMFTLRARIAHAAKAAGFTATFHEDQRQVQLACEGYEREVWFTCQPKRLPASRNAMGQFCPFDRA

SEQ ID NO: 6377 - protein, 507 aa, synthetic construct
MKRAISYIRFSSEKQSRGDSLRRQSKMVNDWLKAHPEYYLDQDLSFRDLGVSGFTGKHLKGGLGDFLTAIEKGLVKAGDTLLIESLDRLSRQAVDRASELLRNILRSGVDIVTLSDGEHYTSESLKDPLALIKSILIMQRAHEESLRKSERIQAAWDAKKEAAKAGIKVSKRCPAWLRLNDDRKSFSVIPEKVETVKRCFQLRLEGKSIWEIVRTLNAEGHRSMNQYKPGKFGQTSVQDLLKNRSVIGYFTPKGCEEISGYYPAIIDETTFYKVQQLSHSRYGKRSVSDKPLSVNLFKGVIRCSECGHALIITGFSDTRNGIYRCPLRNENRCSAKGLSRKQTDGTLLTLLSRLDRFDSDMTNTLDTLKLHREHISSNIEKLVQLSLEIEDLSAITIKLKQLKGELSQVDADIEKETQRLKSIDVGCLSDCDLTTKAGRIEAQLIIKSAVKEVVLNTAKRRCKVTFHNGRIIDLPITENPSEDVTEAIQSLSEVTERGLIDVDEVII

SEQ ID NO: 6378 - protein, 509 aa, synthetic construct
MRRAISYIRFSSERQLKGDSVRRQSKLVTDWLDKNPEFYLDSSLSFKDLGKSAFSGKHLKGGLGDFLTAIEKGLVKAGDTLLIESLDRLSRQDIDIASELLRRILRAGVDVVTLSDGEHYTKESLKDPLSLIKSILIMQRAHEESLRKSERVQAAWNRKKELISEGIKISRRCPAWLKLNDDRRTFTIIPDKVEVVKRAFDLRLQGLSFWAITRTLNDEGHLSLNQYTPKQKGWSDTAVKKLLRNRAVIGCFTPAGREEVQGYYPAIISESLFYRVQQLNTGQYGRASVSSNPLSVNLFRGIIKCSECGATIVLGGYALKRFGMYRCPNRSANRCSAKAISRKQTDATILYMLALCDRFETENTDTIDSLKLQREDLQRKISKMAELAIELDDMTIITEKLRDMKNALSKLNHDIEEETKRIKAITTGSLKDIDRTTKEGMIETQLLIKGVLKEIVIDAAKRRCKVTFHNSKSITLPITENPSEDVTEAIQSLSEVTERGLIDVDEVII

SEQ ID NO: 6379 - protein, 470 aa, synthetic construct
MKGESELDKKAAIYIRVSTQEQATEGYSIQAQTDRLTKYVEAKDFILYKKYIDAGYSASKLERPAMQELIQDVKSKKVDVVIVYKLDRLSRSQKDTMYLIEDIFRPNDVELISMQESFDTSTAFGSATVGMLSVFAQLERKSISERMITGRVERAKKGFYHTGGQDRPPAGYQFNSDNQLIINEYEAAAIKDLFRLYNDGLGKSSISEYLKKNYPGKNKWLPSSIDRMLKNSLYIGKVKFSGVEYDGIHEPIIDEVTFYKTQKEIARRKQSNTKRYNYVALLGGLCECGICGAKMANRRAVGRKGKVYRYYRCYSKKGSPKHMMKTDGCSSKAQQQFIIDEAVINNLKNIDVEAELKRRSAPQTNTSLISSQIESIDKQINKLIDLFQVDSMPLDVISEKIDNLNKEKQSMEKLLERKNRLDKTELQHRFDILKSFDWDNSSIESKRAVIEMLVQKVIIHDNSIEIILVE

SEQ ID NO: 6380 - protein, 464 aa, synthetic construct
MKRAALYIRVSTMEQAKEGYSIPAQTDKLKAFAKAKDMAVTKVYTDPGFSGAKMERPALQEMISDIQNKKIDVVLVYKLDRLSRSQKNTLYLIEDVFLKNNVDFISMQESFDTSTPFGRATIGMLSVFAQLERDTITERMHMGRTERAKQGYYHGSGIVPLGYDYVDGELIINDYEAQIIQEIYDLYVNQGKGQQYITKRMVAKYPDKVKTLTIVKYALTNPLYIGKISWDGKVYDGHHTPIIDKSMYDKAQEIIARKAQKGGEQHGNQLGLLLGITYCGKCGAKVFRYVSGGKKYRYNYYMCRSVKKMLPSLVKDWNCKQPSLRQEVVEKKVIDSLKSLDFKKIERELKQVENKTKSKITTINNQISKKHNEKQKILDLYQYGTFDVTMLNERMKKIDNEINALTANISNLEGTKSESLINKLETLKTFNWETETTENKILIIKEFIERIELFDDEVIIKYKF

SEQ ID NO: 6381 - protein, 507 aa, synthetic construct
MKRVISYIRFSSEKQAKGDSLRRQSKMVTDWLKAHPEYYLDQDLSFRDLGVSGFTGKHLKGGLGDFLTAIEKGLVKAGDTLLIESLDRLSRQDIDIASELLRNILRSGVDVVTLSDGEHYTRESLRDPLALIKSILIMQRAHEESLRKAERIQAAWDAKKEAAKAGIKVSKRCPAWLKLNDDRKSFSVIPEKVETVKRCFQLRLEGKSIWEIVRTLNDEGHQSMSQYKPGSFGQSSVQDLLKNRSVIGYFTPKGCEEIAGYYPAIIDETTFYKVQQLSYARYGRKPASDKPLSVNLFKGVIRCSECGHALIITGFSDTRSGIYRCPLRNENRCSAKGLSRKQTDGTLLALLSRLDRFDSDMTNTIDTLKLHREHISSNIEKLVQLSLEIEDLSAITSKLKQLKGELSQVDADIEKETQRLKSIDVGCLSDCDLTTKAGRIEAQLIIKSAVKEVVLNTAKRRCKVTFHNGKVIDLSITENPSEDVTEAIQSLSEVTERGLIDVDEVII

SEQ ID NO: 6382 - protein, 507 aa, synthetic construct
MKRVISYIRFSSERQAKGDSLRRQSKMVNDWLKAHPEYYLDESLTFRDLGVSGFTGKHLKGGLGDFLTAIEKGLVKAGDTLLIESLDRLSRQDVDQASELLRNILRSGVDVVTLSDGEHYTRESLKDPLALIKSILIMQRSHEESLRKSERIQAAWNRKKELISEGIKISKRCPAWLKLNDDRKSFSVIPEKVETVKRCFQLRLEGKSIWEIVRTLNDEGHQTLNQYKAGSFGQTSVQDLLKNRSVIGYFTPKGCEEIADYYPAIIDETTFYKVQQLSYARYGRKPASDKPMAVNLFKGVIRCSECGHALIITGFSDTRNGIYRCPLRNENRCSAKGLSRKQTDGTLLTLLSRLDRFDSDTTNTIDTLKLHREHISSNIEKLVQLSLEIEDLSAITSKLKQLKNELSQVDADIEKETQRLKSIDVGCLSDCDLTTKAGRIEAQLIIKSAVKEVVLNTAKRRCKVTFHNGKVIDLPITENPSDNVTEAIQSLSEVTERGLIDVDEVII

SEQ ID NO: 6383 - protein, 541 aa, synthetic construct
MPKAISYIRFSTKIQSVGDSTKRQSKYINDWLKRNPDYYLDESLRFQDLGISGFSGANAKSGAFGEFLAAVESGYIESGSVLLVESLDRVSRQDIDTAGEQLRKILRSGVEVVTLVDNEWYTKESLKDSLSMIKAMLVMERAHEESAMKSTRLRSMWAAKRERAANGEIMSKRCAAWLKVSEDRSHFEFITENVKAVQRVFQLRLEGLSHIKIAKQMNDEGFYTLNQHKSVKGGWSQSSVTELLSNRSVIGFKVPSKSMAVKGVSEIPNYYPAIITDEQFYAVQQLKQGSGRKPSSDLPLLTNLFKGVLRCSECGFIVVVAGVSAKRSGIYKCSMKSEGRCNSVGFSRLQTDRALVQGLLYNTNRLSLNRDTGSAIGSLQSELEQLQKQRERLVKLAMLTDDVESMAKDLKALNSQIKDAEKAVSEVHQREQSSQLETISHLDLTMKKDRIEAQIIIKRIVKEIRLNTAQKKCDVFLHNGLKLLNFPLDRVVDGAQWLEVLPLIDGDEFDFAEFITKPRHTALEEAPEWVKEMEEQPNQPL

SEQ ID NO: 6384 - protein, 507 aa, synthetic construct
MKRAISYIRFSSEKQSRGDSLRRQSKMVNDWLKAHPEYYLDQDLSFRDLGVSGFTGKHLKGGLGDFLTAIEKGLVKAGDTLLIESLDRLSRQAVDRASELLRNILRSGVDIVTLSDGEHYTRESLKDPLALIKSILIMQRAHEESLRKSERIQAAWDAKKEAAKAGIKVSRRCPAWLRLNDDRKSFSVIPEKVETVKRCFQLRLEGKSIWEIVRTLNAEGHRSMNQYKPGKFGQTSVQDLLKNRSVIGYFTPKGCEEISGYFPPIIPETDFYKVQQLSYSRYGKRSVSDKPLSVNLFKGVIRCSECGHALIITGFSDTRNGIYRCPLRNENRCSAKGLSRKQTDGTLLTLLSRLDRFDSNTTNTIDMLRLHREHISNNIEKLVQLSLEIEDLSAITIKLKQLKGELSQVDADIEKETQRLKSIDAGCLSDCDLTTKAGRIEAQLIIKSAVKEVVLNTAKRRCKVTFHNGRIIDLPITENPSEDVTEAIQSLSEVTEKGLIDVDVVEI

SEQ ID NO: 6385 - protein, 403 aa, synthetic construct
MNRSGKKCVLYPRVSTEMQVDGFSLDGQKNSLKRFADREEMEIVNIYEDAGKSGKSIEGRPAFMQMLSDIENGLGIDYVLVYKLSRFGRNAADILNSLEHIQFFGVNLICIEEGIDSSQTSGKLLISVLSAVAEIERENIIEQTMNGRKEKARQGGWNGGFAPYGYFLKDKQLFIQEDEAEAVRIIFDKYVNGNMGFYKIANYPNLQGIQKVKRDNGTLTQWSTHFVRMIIDNPVYMGKIAFGRRTREKVKDTKNEYRQVHQDDYILADCQHDGIISEELWTQAHEKREITGVKAPSKIGRDRAHLLSGILKCPKCGGPMYTNKHAWSNKDGTYKEIYYYVCSKARTTRGKSCDYKAMLKKTDIEPLVVEAIRDLIKNEDFAAEIKSKIGKQIDTSTLDRERT

SEQ ID NO: 6386 - protein, 600 aa, synthetic construct
MIHPKEQLDAYIYSRVSKDVQVQGDGIRRQIDGAIRFVESKNKENLQNGLPTYAIADEFITDRGLSAYKGFNTAANGGLGAFLEAARKGDIKRGSLLVVEAVDRISRMPADESRKTFSLFKEYGIDVAIVKFGIIIKHSESTTLENDLLITAAIHLAHMESQQKSNRINDYFENKRMKEKEGGEKRTSICPSWMKLSEDKRSFELIPDRERVMKRIINMKLDGLGCHRIASTLNSEGVPYFNGKTWSTEIVRKYCKMIQLYGAFQRVKHVRTDAGTKKQPWGDIEQNYYPAIIDEQTFLRLKKSFKRSGGRQTGAFSNLFSKLLFCPQCGSSMSYYKPNRGRKKVRCRKQIDNQGCTQRALNYEEIETRLVKALAGLDYAKINDSSFTDLSAELSSLEANIAELNENVEVVTKQLMENTNPRLYSILTDKLTKLDDEIHSEKAKFDELSILHRNYDTTIINSLKLDNNEDRERYNNFVKQFVKYIICTDEEQGGSLRVVFKADAIGELPFSFSDEKNDKAVSEVFTANRSISDTQAVRSINLDKSSGMYLPLLKEITDVKQPNDLSDSRELIRYMHAVRMAVKRNPSKWKEIAEQAKLRY

SEQ ID NO: 6387 - protein, 673 aa, synthetic construct
MIGEETLREEIFQYDKTKFKGICVPYARFSTKGQSKVGKKSLERQLSKAREYAKRNNLFINEDLIFTDKGVSGYSNQGELSKAFKKGQMATMLLLLEEVPPEERDNVYITFHNFDRFSRMSPDAAQAHFNKILNRGFKIVTTIDNQLYDRRDKGMSNMLISIIKMTTAWQESLNKSIYITDALSRKKKVIEYLYNHPSQKGKHKHIGVVQPSIPRWIDQENITYEYIDADGSKRTDTFKKFSLNQYKAEVVRKIFELKIAGLGYTRICQKLNNDGVEVFEQGRFKKAKKWHPYAVQNIITSDKVLGHITLNEMVTEEYHCKETDEIKTKKVKKEVTSKLENYYPAVVDEEVFRLANVLKFQEKKGKPLGRIGERTNIFATFMSCYCGATLQYSRSQINKRSNKAPVYREQLRCNNALVKNGCFDDYINYVELEQAFFKYVNHIDFREVCLVGDKSLETEIKNLQAEITYLNGQKKELKLKNSGLEKTFESAISQGLNADYVLVALNEAKKSADLIETKINDLKVRITKLQLSLDSKESDFLDIVEYSKRIKNSSTETKIMMRKKLNEFLHSKIKWMEVCSSKHSKFVILCFHDDVIRTFAYGENYANDLMFNTIKISYEVDDSQLNYELFLIYIHQIKRSLRGETEVVSNGDLIEALQRLKRKFYAGKGIDYV

SEQ ID NO: 6388 - protein, 653 aa, synthetic construct
MFDYDKSIFDGICIPYARFSTTEQDKVGRKSLERQLEEAKRYASQNKLYISDDLIFTDKGVSGFAKQGQLSKTFEKGQMALLLDVLEDVPFKERENIYLCFHAFDRFSRQHPEVAYEQFSRILKRGFNIVTTIDDCLYSSKEADLESMLISIIKMSSAHYESEVKSVYVSDAHRRRRETLEYLYNHPTQKGKHKHIGLKQSTTPRWIIESEIIYDFVDDNGVERKDSFSKFSLDEAKAEIINQIFDWKIQGLGHTKICQLLNQKQIPTFEDGNCRKAKKWHTFAISNLFKNKSTIGTFTLKTVEDEEYFCESERIFKTRSNKVDATSEMENYFPAVVTVEKYEAALKIIAMNNKGEKISEPEDKTHVFSKVLRCTCGGRLVFKGTRKTGKSEKADWFEYLRCEKAILKDGCDAENIIYKDFEMAFLRFATSSNYTVFSTTQSKLKTKLKRLSIKQSHLNSEKEQLLLEAKGLKKTFESIVTQNLDATLLLDSISKNKSSLNTVQNELVKIDNQVKGVEREYEKSGKPIDKLTIKKGLRSEDYSKRLLMRKAVNQQLRKNVVHMEVCSTKLLKFVIVCFDDYVIRTYAYQDEFSSDLMFNFIKINVENLDESEAYDLIIHLFKEVRISLSGDNAVITNFDLKVHLSGIKEKYLK

SEQ ID NO: 6389 - protein, 562 aa, synthetic construct
MKQPLAYSYVRFSSPEQAKGDSFRRQTDAARKYCNKHGLELADLRFHDLGISGYKGNHFTQGALGDFVEAIEQGKVQGGSYLIVESLDRLSREEVDIAFSRFASILRADVNIVTLQDGKVFTKTSLKNTTDILTSILVMLRAFEESETKANRIREARDEKHRQARENKTPTGYRPPDWIRTVKDADSGKPKYELIPERAEVIKRIYHLNNSGMGAIVIARLLNEEQIPPWGRSKTGWQTSYIKKILKARTVLGEYQPHVVINKVREAVGEPVFGFYPAVIDPNTFKLAQMSMTARDKRSGGIRKDKVNNLFTGLAKCKHCGNTMHFVDKGKPPKGNQYLLCSLAKTGAVHNGVSCKRASIRYQETENAILTVAATLNLKIESPINKGEVERLQNQLSEVHADLGTAEEAIVRITNAIAELPDSSGLIAKLAELELQKREKKSEYKAIEKRIDELNLVPQASNVWNELQQALKTFREDAADRTKVELRTKINNQLLNSIDRIEFDNHAKIVTIHIDGKRVVEIRFEDKMRGYTVKPSWDNREFLPNTFIIKEQIRKVHYEKEQ

SEQ ID NO: 6390 - protein, 644 aa, synthetic construct
MFNFDKSKYKGICVPYARFSTDVQDEIGRKSLERQIEEAKRFSNEYGLFFDEDIAFVDRGVSGFALSGDTAKTFQKGQMQLMLELLEEIDVAEREFIYITFHNFDRFSRMSPDVASRYFEQILDKGFNIVTTIDNEVYKRNSGNLEQMIISIIHMSTAYYESEVKSIYISDSRQRKRDVIEYLYNDEKQKGKHRHVGIKACCPRWIKTKDIIYEYVGKDGSVKKEALKRFEIDEERAQIINYIFDLKIQGLGNGKICQVLNEQNIPVFHSGNYTKAKYWNLSTISNYLKNENVIGHSYLYHKAKEEVFNEKTQTFSTKRVRKIATDKLYNYYPPIMSEEKFNQAKEAVKANSNKVDRSKASEKPHMFSNLMRCSCGTRLHYKLTKKNNVKKVDDYFEYLKCERAALNDGCKGENINYKNFEAQFVNFIRYIDVNEILDHANGVEGETQGLTELEEREAAINLKITGLTKTYQGLINAGVDGSDVLVELEKAKGELQEVEFEKSKLLNSMKSQTSSSSESIKQKKSALKSKVFAEKVEARKAVNELLKQKIRWMEVYATAYAKFVIVCFVDNVIRTYAYQDEFAKDLMFNTIKINTDGLKGYEADELMVLMIKTVRESLAGMNEVITNTDLKIKLAAVKSEYMNK

SEQ ID NO: 6391 - protein, 664 aa, synthetic construct
MFSFDKSKFKGICVPYARFSTKGQSKIGKKSLERQIEEARRYAKSNNLYINEDLIFADKGISGFAQQGNIAKAFKKGQMQVMLALLEEVPYQEREFIYVTFHNFDRFSRMSPKQARTYFDLILQKGFNVVTTIDNQLYTRHDKDLGKMLISTIKMTTAWEESQVKSIYIKDALARKKKVVEYLYTHPSQKGKYKHIGVVQPNMPRWIDHEKIELTYTDESGSKRTDSFKKFTLNKEKAKIVNYIFDLKIQGLGYARICRRLNEEGIPTFDQGKHRIAKKWHVFAVQNLICNEMVLGHITLHTHNEEEYMCEIDKVFKKRKIKQTATEKLYNYYPAAVSEAKYLEAHKNTIQQDKPKKLGRIGERTNIFAQILLCECGGTLQYRRTKKNKKKSESVSVNEYLQCNNAFVNHKCNSQTINYTMLETAFFRYVNNIDFKKICSTTNSKHALKIIDLDTDIKELTDEIESLKLREAGLAKTYMSLASAGLDGSTALIDREKTKKEIAEKVLELENLKLKKKGLEIEADKDNREFVDINDYMLNKDNYSSDEKIIIRKKINDFLHSKIEWMEVVSTERQKFVIIAFHDTVIRTFAFDDRCANDLMFNEIDVDLSGLNRVQASNLMFTLIKAIRNSLKGVEAVITKADLISYLQHIKQDYLNNIGEQASV

SEQ ID NO: 6392 - protein, 531 aa, synthetic construct
MSIAYSYIRFSSAQQAQGDSLRRQTQLAQRYCEENNLTLSDTNFQDLGVSAFHSDNVKEDSGLGRFLEALEQGAIPEGSYLLVESLDRLSRAKVQTALIQMLRITQLGVKIVTLMDNRLYDKDLDTTDLIISLTIMERAHNESKTKSERIKAAWANKRQNPKTTNRHSSTPFWLTLNSDKRTYTVKEEYAELVRKIYQLSIDGWGVIKIVRYLNENGITAPKGASWATTTVNRILNSKAALGHYEPTQNRKSLNTLIKDYYPPIIDETTYYLSQQRKFERSKPEAAGRKTEYPNPLNQIAKCKKCGSSMYYENKSQSLKYLTCREFKKKNCTNKPIRMELIYRFIYEVFNSPMYHQQHAKLVDKSKQKDINYHAELKGRYEAERKAYEELLEASSSFSDPIILKELQKRSTLILERSKQLEEAKAKETVEKARTVHINFTESLQLIVNAFHLPLEGIKIEELSTDELFNTRVRLNRILKQAFNHLSIFHCNESKRITIETEVTEDYPIDLRYETNQKAIKEPMKNRIWSVY

SEQ ID NO: 6393 - protein, 522 aa, synthetic construct
MERQEAISYQRFSSDRQRNNSSLDRQSDAIKNWLRMNPNVVLVDEYIDEAMSGWSGKHLESGSLGRLLQAIEAGIVKSGTIILVEHFSRLSRQNIDKTEELLRRIWQHDITIATIRDNGLYPPSTINNMALRIRLIVEIEQAFKESEWRSAKVKASYEKREKDAKLGITPRMRRPFWLDSEGRLNEYSVAVKDMFEMYLDGKGQQRIIVALREKYKDANPIKKLNPSTVMRWLQSEVVRGYWRGNKVYEAAIDDETFYNVQAVHKGRLYQNVKPDRNWPLSGLMQCGVCGGGMSIQKTKNTLPILRCSTKQRDRSCNRKTTFPYFIAHQYMFTIAKKYALRKYTKNTSSHEFQNKIIQIEYELSKLAPQLEDEKNHYNEAKNQGKNTRLLREIMLETDDKIFELEQELKQLKHSFDNQNDYMISKNAVELVLTPRNFNLEMHKLNFRIVIGEDEISAVGFDEELPTMRYLGYNRKTKSYDYQVLGMNYSWPTASINTKDLMLEGIEDFIEQSPYLKRLMEKM

SEQ ID NO: 6394 - protein, 535 aa, synthetic construct
MRFVAYLRISSYSQREKGDSIDGQREYIQRWAKSNGHEIVHWYVDEAASAFKGRRFVFDVMLHELSEQIIDANGVVVYSLSRFSRNLKNQLLAMEVLEKKGMILQSASEALPSEPSSFKFMTNILGILHEHQSRENAAVVSDRLRDTARKGFHTGGPLLFGYQSVSVKGDTSKERKKLVVKSDEAEVVKEIYSLSDIGLNGKGLGVKEIAKILNDKKITNRGKRWNKNTIHRILTNSAYKGEFEFGKTKKNEPGKNIIKIPVPKIVSKELYNRVQNKLSQRQVAYNNVKSLRSSSLLTGTLRCPVCGSTMVISTGKGGKYKYYQCSLQVRQDPKLCSSKRLRKNEADNALRKALLEHVFTYKHLASIYNDTLEIVKNKKKVSDEKLRPIRNQISSLKTKVRNLVDLIADGKIEPNPAINRNMDEYNAQIALYEEKLDSYKSLASIPIKRFGKAQISSFVDNVQQYVKEANDEKLKQFLLATITEVTITEQKKLVLKGSNLTLLYLISNEKVGTDYSVPTFVTIWRRDRDLNPIAH

SEQ ID NO: 6395 - protein, 705 aa, synthetic construct
MQSLSHTPQIYSYSRFSRLKQRDGDSLKRQREYAEEVAKEYSMTINEDLVFSDHGKSAFHAEHKKKGKYGIFLDAVKQGKVAKGSVLIVESFDRLSRENAMRAQSDITALIESDITIITSSDKRVYNKEVVYRDPSQIFMMVAVMVRAHEESLTKQKRSLKRLKGAVEKWQGGDKAVSVGGANPSWVKRTKIGLVFDKEKADVAKKICDLFTSGKTMVYIAAFLNDSNIPTFGRASHWRVTTITTLLENEALFGRKTVDLGGSEDGVVLPFRAVLEGYFPALITKEEFDLIQEIKKLKAKGRAGHRTKRKMTDAIGNVIEEIEENAIYLLSGYGVALDEAAKSRCARCGGSMGTRRQHQYTRKGVYTKTEYRFECAESSTTGFKKCDVGSVRLGNMEASFLLTVSKHIDFNLLNKNVDSREVEVIESKLKEIEVQLESATELLIATTNATIRQTAQKMLSELEAEQKELERKKLDGKEFVINQDAIDHFVSVVDRAAFNVADHEARSEVKNILMQSTTKLVMHIKKKQTMKDFGFSNIMPDVNVYAIEVHFKSGKVMWYFHDAKRDQLAFTVMLDSEEVAGSLSESYLKKWNELGDESYEEYLAFEDGEVFANLMEKLVESQQDDGSFAAYDEVFGSNDQKKTRAEEIQEKWDDWKFRVDLDANNREYDEFLSKNSSKVSSVSKSEFSSEVDLHCDTWGFPLGRE

SEQ ID NO: 6396 - protein, 531 aa, synthetic construct
MSIAYSYIRFSSAQQAQGDSLRRQTQLAQRYCEENNLTLSDTNFQDLGVSAFHSANAQEDSGLGQFLTALSEGLIPEGSYLLVESLDRLSRAKVQTALEQMLGILRRGVKIVTLMDHCIYDGDSDSRDLIISLTIMERAHNESKTKSERLKAAWDNKRQNPKSTNRHGSTPFWLTLNSDKRTYTVKEEYAELIRKIYQLSIDGWGLVKIVRYLNECGIPAPKGRSWAITTVSKLLNSKAALGHYEPSQGRKSLNTVIEDYYPPIIDKKTYYTSLQRKKERSVPESAGRKTTYPNPLVHIAKCRLCGSSMFFENKQPSLNYLTCREFKKKNCTNKPIRMELIYRFIYEVFNSPMYHQQHAKLVDKSKQKDVNKLAELKGRYEAERKAYEELLEASSSFSDPIILKELQKRSTLILELSKQVEEAKAKETVEKARTVHINFTEALQLTVNAFHLPLEEVKVEELSTDELFNTRVRLNRILKQAFNHLSIFHCNESKRITIETEVTEDYPIDLRYETNQKAIKEPMKDRIWSVY

SEQ ID NO: 6397 - protein, 547 aa, synthetic construct
MKLLVTYIRWSTKEQDSGDSLRRQTNLIDAFYSKHKNDYYLLPAHRYVDKGKSGFHQQHKNQGSDFRRMFENVMSGAIPEGSLIVVENFDRFSRADIDTAIDDVRQILRKGVSILTLGDGELYDKSALTDPVKLIKHIIIAERAHQESLVKQKRIAQVWNHKTQLARELKKPMGKQAPGWLELSEDGSHYIVDEDKASLVNIIYDKRLSGMSMFAICKWLNEQGYPTINQRKVRISKTKKPDGNWSALSVKHILTSRSVLGYLPAKISSEDRKTVLREEIESLYPQIVTDSKFYAVQQLLEETGKGKTSSGEHWLYVNILKGLIRCKCGLVMTPTGIRKPVYQGTYRCNGNKESRCNYGTVSRKLLDTQLCSRLFSKLSQLHDEATDTAKLDELQRRLNTVDSELEKLTETLIQLPNITQIQEALRVKQEEKDELIVQLSREKARVKSVSSLDLSGLDMESVEGRTEAQIIIKRLVKEIVVSGNEKLVDIYLHNGNMIRGFPLDGKDDHTLTLEEATDEMQSLDDMLIFGEPVTRIYPAGDMEEVDA

SEQ ID NO: 6398 - protein, 527 aa, synthetic construct
MRKVYSYMRFSRPEQAKGTSIERQSNFAEQYALEHGLELDKSLTMMDKGLSAFHGVHKTKGAFGQFLAAVTAGKVPSGSVLVVESLDRLSREDPLIAQAALTDLILSGITVVTAADNQVYSREEIQQNPFKLIMSLVVMIRANEESETKQRRSNAFLKSALNQYQANGKIRRLGSDPSWLDFNKDTYSFNERVEVIRRILNLYNQGIGSLKIARQLTEESIPTLSGKRSAWGQTTVANIVKSHALYGMKRINVQGVEYDLEDFYPALITKSKWLALQQHRTKRSKSMHGRGEVVHLITGHGKGFTTCGYCGGGLGAQTQKQYKRSGEYSRTVTRLHCLTHKETSSCCSSVFLEPIESAVLFAACIGVEPQSLVPTVNNVNYSALIDEVENKVKHIVEQVTAGAPWDLFKDAHDKLKLEKQKLIKERDSQKPDVNQSDVQKWVNKLVELADKARANDKEARLKCRTLINSICKSIVIKLRGHDLKSEPVVTITFVTDEQFEFKVGKNGAVQFVDNGMAVNRRLKPLLA

SEQ ID NO: 6399 - protein, 516 aa, synthetic construct
MSNNKALAFLYIRFSTKKQEQGDSIRRQIDAAEAWCKEKDIELSAQTFEDLGVSAFKEGGKRPALEDMLFAIEQGRIPRNSYLLLEDHDRLSRRGWLHTQTLVHKVVKLGVKIVMLRSRTVYDQSNINNISDNIMLMFSADRAFQESERKSQLIKASRNNARKNREVTGKLPAWIARNGDEFIFNDKLTTIQELIGCKLSGKSHQATAKHLNSLGMTTGSGSVWSASGVRAIIQNHALYGAKAYFDTGADGRMNAKPIEIVPDIFPQLISFQQYQSLNVKKASGRTSKRGAFTQLLKCGRCGSAMTTRSSNYKGQPRTYKMCVRATEGSCSQVERVREPERYLNDVLRKLTYQISKGAYVSRTGEYEKQLETLNETKDKLISLGLTDALTDVYVDMNRVRELIEDSKIADQANIEPDVDFAYVCDIENIEERNTELRKLLSKIVFYCISKRGQTSQWKVVIHQVNGFTISFLLDQQYGFGNTNVKFVADKQQYIKDTQVDMYAWEDEYVDAILDNV

SEQ ID NO: 6400 - protein, 531 aa, synthetic construct
MSIAYSYIRFSSAQQAQGDSLRRQTQLAQRYCEENNLTLSDTNFQDLGVSAFHSDNVKEDSGLGQFLEALEQGAIPEGSYLLVESLDRLSRAKVQTALMQMLRITQLGVKIVTLMDNRLYDRDLDTTDLIISLTIMERAHNESKTKSERIKAAWTNKRQNPSTTNRHSSTPFWLTLNSDKRTYTVKEEYAELVRKIYQLSIDGWGVIKIVRYLNENGITAPKGASWATTTVNRILNSKAALGHYEPTQNRKSLNTLIEDYYPPIIDEKTYYLSQQRKFERSKPEAAGRKTEYPNPLNQIAKCKKCGSSMYYENKSQSLKYLTCREFKKKNCTNKPIRMELIYRFIYEVFHSPMYHQQHAKLVDKSKQKDVNKLAELKGRYEAERKAYEELLEASSSFSDPIILKELQKRSTSILELSKQVEEAKAKETVEKARTVHINFTEALQLTANAFHLPLEGVKVEELSTDELFNTRVRLNRILKQAFNHLSIFHCNESKRITIETEVTEDYPIDLRYETNQKAIKEPMKNRIWSVY

SEQ ID NO: 6401 - protein, 547 aa, synthetic construct
MRTAYSYVRLSSKKQIQGYGQERQWQAIQAAALAHDWELSEKTFSDLGVSGWKGANIETGALSQFLQCVEDGYIEKGSVLIVENVDRLSRAGVQRAVSLLMQLLASGISIYTFTDSKLYEPDSHNPLMDLMAWALSAQRAFEESERKSQMILNAKAKAREKARLTGEIITRRCPSWLRVNQDKTAFELIPERVETVRKIFDLYVNGYGTPRIGRLLTEEGRKPLTGRAWYPRSISRILQYRAVLGEYQPTLNGKPEGDAIKNYYPAIIDEDRFSEVQAVLKEGGAGKGRRGKEMRNYFAGLLRCSCGEGMHIVSSCVKGKRYYQLRCLQYRISCFGSSWNFYKLSSFVLFALRRLPILEVMGSQDNNNIKELNAKERELTFLLEDTRRQLDNTINAIAALGLNDQLQSKFRELKTSVTNIEKQLSNVKTELETSQGKLVIQKQDSEMLTGRFLELIDSTKDIDGRIKLNQVLRRYLSKIEMHADKKEEYRYIKIYRKDGDELVSIQCDHSLKGALFESKDGLETFELLPATDAKRNEISNTLLCTPK

SEQ ID NO: 6402 - protein, 585 aa, synthetic construct
MIRVIGYIRVSTDKQDLQRQKELIEAYCKENNYQLVRFIGEKISGAKVNRNGLTELLSITKNECDIIVVSELSRISRQDDIMNVIAEINQIRTNNLDLYILDTNTSIKANDIIGGLEVMQLVFMAVGNADERRKITQRMSTGRWIKIQHNHYAYMGGTIPFGFDVVPNDKYDDSVKENKDARRILVPNENEIKIVKMLYNKIINGYTLCRLAKYLIKHNISISKSGKVSKTDQHSILSKLLHNSIYNGKRRYKGNTYSIDKIITDEVFNKAMKALEDNKTYISYVNKERINILKGIVKCSCGKSLYMIDTSNRHYYRCINKKDIIGNVRCTNSGINYNSVVKAIWAVFRLSAYTDDFKAKTSDRENEIKTEIELTGKGLNEDKKRIEQLELELRTIENNMFTVTNQKLISSMEKRYTDIENEISSIKQKIVNKKGEIKSLNEALKQLNEISKDDLLNNMDDTLKSEILHKAIKEAVWHSHKMSNGFLIVTFKNGVQKIMMIRAHYKHKFIYELPQTFDFNAANKKVVVTYYDGKQLNSDGGLNFSYGFKTYQEEYNFDEVLIEFENELPKWEIEKKIEHYFGKKK

SEQ ID NO: 6403 - protein, 520 aa, synthetic construct
MRRITTLDVRTSSETKPKQKVAAYIRVSTSNEDQLISLEAQRRHYKTLIENNDEWQLVDIYSDEGITGTKKDRRPELLRLISDCEKGKIDFILTKSISRFARNTIDCLELVRKLMDLGVHIYFEKENINTNLMESELMLSILSSLAENESVSLSENSKWSIRQRFKRGTYKLSYPPYGYDYINEMVVVNEEQAPVVRRIFNSVLKGMGTERIAMQLNEEGIPTKRNGNWTGSTIRGIVKNEKYTGDVLLQKTFTDEHFNRKVNQGELDQYLIENHHEAIITHAEFEAANQMLEYQASQKNVAAGSRKYLNRYPFSGKIECAECGDTFKRRIHTSTHSKYIAWCCSTHIKNKNECSMLFIREERIHQAFITMMNKLIFARKEILHPLFETVKNGFKQDTEEQLDHIELQLTEGYAKSQMLKKLMDDKFLEQKLYEEQRAKMDKQINELLEDKERLLRLIRNEEEQVYELKRLMSFTDKQQEVASFEETIFNEYIEKVYIHSSTKIGFLLKSGLLLKEEVNR

SEQ ID NO: 6404 - protein, 521 aa, synthetic construct
MGNSRNVTVIPARSRRTREVSDKQKLRVAAYCRVSTDSEEQASSYEIQIEHYTNYIKKNKEWELAGIFADDGITGTNTKKREEFNRMIEECMAGKIDMIITKSISRFARNTLDCLKYIRQLKDKNIAVFFEKENINTMDSKGEIMLTIMASLAQQESQSLSQNVKLGIQYRYQQGEVQVNHKRFLGYTKDENKQLVIDPEGAEVVKRIYREYLEGASLLQISRGLEADGILTAAGKAKWRPETLKKILQNEKYIGDALLQKTYTVDFLSKKRVKNNGIVPQYYVENSHEPIIPRELFMQVQEEMVRRANLRGRKGGKKRVYSSKYALSSIVYCGHCGDIYRRVHWNNRGYKSIVWRCVSRLEEKGSECTAPTINEETLQTAVVKAINELLANKEPFLSTLQKNIATVFNEENDNATDDIEGKLEELQQQLLIQAKSKNDYEDVADEIYRLRELKQNALAENAEREGKRQRIAEMTDFLNEQSCELEEYDEQLVRRLIEKVTVFDDKLTVEFKSGVEIDIEI

SEQ ID NO: 6405 - protein, 572 aa, synthetic construct
MTTTTTKRAVIYLRVSTRDQAKRGGETEGFSIPAQREACHRKAKSLGAEVIEEFIDAGESAKSAQRPELQRMLTYVKHNTIQLVIVHKVDRLARNRMDDVQINFEIQQAGAQLVSCSENIDETPSGMLLHGIMSSIAEFYSQNLATEAKKGMTQKAKSGGTPGRAPFGYINTTQRTAEGREVRTVVTDPDRAHWVPWMYERYATGEWTIGMLRDELKTHGVTTLARPKQPARPLTTSMVHAILSNPYYTGLVIFGGATYQGRHQPLISTELWSKVEAIRHGRSHAKEKPAIRTHYLKGSLFCGQCGSPLSYEISRNRLGNYYEYFYCLGRQARKNGCTFVAIQAHHAEQLVEDHWATITLPDKTLTTVRELVISHLDTVLKEHDHQAHQAKNTLAEATAHSERLMQAYYAGAIDVELLRKEQERIRTDKTTAERQLRHLQTSQDKLHTALDQCLSVLHDGQQQYLAATDNSRRDLNQAVFDKIYLDDDEITNSQHKAVYHYLLDSNLPAVLDGEAKRQQDTATPDNTKNLRPMAGGSNMTLLVELRGFEPLTFSLRTRRATSCAIAPSTGRW

SEQ ID NO: 6406 - protein, 500 aa, synthetic construct
MNVGIWIRVSTEDQARGESPKNHEARARMYAELKRWNIVDLYDLSGVSGKDVLDNPEAKRMLDDVAAGRIQALIFSKLARLARNTKQLLEISDYFQKHDAALVSLEESIDTSSPAGRLLYTVIGALAQWEREEISARVAASIPIRAKLGKNTGGKGAFGYHWVDGKIVPNPDEAPVVKRAYQIFLETGKLLTTCNQLKDEGLYSRSKKVYRPTSLKRLLSDTIYKGIRRANYAKSLGNKKNWVLKPESDWVYTNVQPLVSEEDWDAANKIFEETARRYTSFKSVPKVGRFLFSGILKCQCGEKLYVAPYPSMKIPRYACKKCGMRINEDIIEENFQNALKEVVVAPEQLGANEDLENELVEKQERLELLKKEQKEVNGKVDVLIDLYGKQVLDQNGFKERYDPIKTRLDNITLEIPRLQAEIDFIKTNEIGKSYVIERATTLASLWPSLSYEARQQVVKELVERIDVGEDSLHFVFFYIPSFAPVEKGSHISRGSWLPPA

SEQ ID NO: 6407 - protein, 546 aa, synthetic construct
MKVAIYSRKSKFTGKGDSIENQIQLCKNYAFTHYDLKDEDILVYEDEGFSGGNTDRPQFQLMMKDAKKKKFDLLICYRLDRISRSVMDFSNTFESLEDNDIGFVSIKEQFDTSTPMGKAMLYISSVFAQLERETTAERIRDNMMQLARTGRWLGGQTPTGYESQQVTHLDHNGKERKMFKLSPIPKELETVKIIYDKYMELKSLTQVEQYLIVNNIKTKNNLDFRRYSIRFILSNPVYAIADEKLYEFMMSNDYEVCAPKSDFTGNFGVMAYNKTKQNKKSSVEARDVSEWIVAVGQHEGIIDSDTWIKVQKMLNRNKSKSFRKVKSTTSLLSGLLYCADCGSYMRPKMGRIDKNGQQIFYYMCEMKEKSKRTRCSMKNVKGNDLDKLVIEEIKRMAHDNSELKGNLQSDKLQIETKQNTIHNEIINLETNIKNNEQSINNLVSSLSKSQESAASKYIIQQINQLDKETAEMKERLLKLKENEENNNMKDNSLNVMGDMLAAFNDNIDEVDIEAKRMFLKSIIDKITWDGEIIKIYMFGMNTEKKL

SEQ ID NO: 6408 - protein, 509 aa, synthetic construct
MRRAISYIRFSSERQLKGDSVRRQSKLVTDWLDKNPEFYLDSSLSFKDLGKSAFSGKHLKGGLGDFLTAIEKGLVKAGDTLLIESLDRLSRQDIDIASELLRRILRAGVDVVTLSDGEHYTRESLKDPLSLIKSILIMQRAHEESLRKSERVQAAWNRKKELISEGIKVSRRCPAWLRLNDDRRTFTIIPDKVEVVKRAFDLRLQGLSFWAITRTLNDEGHLSLNQYTPKQKGWSDTAVKKLLRNRAVIGCFTPAGREEVQGYYPAIISESLFYRVQQLNTGQYGRASVSSNPLSVNLFRGIIKCSECGATIVLGGYALKRFGMYRCPNRSANRCSAKAISRKQTDATILYMLALCDRFETENTDTIDSLKLQREDLQRKISKMAELAIELDDMTIITEKLRDMKNALSKLNHDIEEETQRIKAITTGSLKDIDRTTKEGMIETQLLIKGILKEIVIDAAKRRCKVTFHNGRAITLPITENPSEDVTEAIQSLSEVTERGLIDVDVVEI

SEQ ID NO: 6409 - protein, 452 aa, synthetic construct
MKAAIYIRVSTQEQVENYSIQAQTEKLTALCRSKDWDVYDTFIDGGYSGSNMNRPALNEMLSKLHEIDAVVVYRLDRLSRSQRDTITLIEEYFLKNNVEFVSLSETLDTSSPFGRAMIGILSVFAQLERETIRDRMVMGKIKRIEAGLPLTTAKGRTFGYDVIDTKLYINEEEAKQLRLIYDIFEEEQSITFLQKRLKKLGFKVRTYNRYNNWLTNDLYCGYVSYKDKVHVKGIHEPIISEEQFYRVQEIFARMGKNPNMNRDSASLLNNLVVCGKCGLGFVHRRKDTVSRGKKYHYRYYSCKTYKHTHELEKCGNKIWRADKLEELIIDRVNNYSFASRNVDKEDELDYLNEKLKIEHAKKKRLFDLYINGSYEVSELDSMMNDIDAQINYYESQIEANEELKKNKKIQENLADLATVDFDSLEFREKQLYLKSLINKIYIDDEQVTIEWL

SEQ ID NO: 6410 - protein, 506 aa, synthetic construct
MRTVITYLRFSSATQGAEGADSTRRQNELFKQWLRKNSDAQVVASFNDEGLSGYKGKHLSGQFGDMLSRIESGEFPEGTILLVEAIDRIGRLEHLETEALMNRIIAHGIEIHTLQDGLIYTRDALSDDLGISIIQRVKSYLAHQESKQKSFRVSQKWKQRAKLALAGEQRLTKMVPGWIDPDTFKCNEHAETVRLIFKLLLDGESLHNIARHLQANNISSFSRRKDANGFSVHSVRTILRSETTIGTLPASQRNDRPAIPNYYEAAIDAATFNKAQEILDKNRKGRTPASDNPLTINIFKGLFRCQCGASVHPTGTKNKYQGVYRCNNHLDGRCDVQPLKRKPFDRWMIDNFLGMIDVGNDGESERKIAALQHEVEIVTARIKKATALLLEMDDITELKTQVRELNQKRTDIQTTIDTLKRKTSLSDKGLPQLKDIDLMTKAGRVECQLILSKHLKGLTLGKDSVTVTLQNDTEITIPTNPLPLNDGSPIFEIADKELLDVDAYQL

SEQ ID NO: 6411 - protein, 549 aa, synthetic construct
MKNKLKSSLNIESPKIAIYMRVSTSKQTDNQSLDTQEKTINSYIASRHDWINPICYKYIESHSASIKPKVSNTLKESSFDSLKRPKLRELFLDATIGKFDYVLCASHDRLTRNTNEGIILKHLFSRLNITLIYCRPGETISSENEALNKFFENLLVNIAALESNITGGRVTLANKHKIQNNFWAGGPPPFGYNLVSQPNNKRNSFLEINFEEARIVKKIFELYNLGCSYTEILTRLNRDFTLPPKRLWTHNTLKEILRNPVYTGFLVWNKRGGARKPNRHSPNNFVKSNLVEKNIIIPENEFLETQKLRNILSRDSKFLSTDFLLRDFLYCNKCNKKLLAKNYGNNKRFYYCSSHNNMEINKKCRSIKASKIESTILSNINDLINSSLQSEVQIEKFYDKYIENFNAELLDNKKSLEITINQLKSSTDLLELCVNEINISKDNLTVDYEDLSSSSTEFSFINALLEFQVVTQTEIKSLKARKEYLTYKINSSPKSFDDFKSNLNKSFKLFKYDEEKQKLISSPRSFRLFLFKVVKKIILSDHEITIIFK

SEQ ID NO: 6412 - protein, 508 aa, synthetic construct
MINVVGYARYSSDNQREESIVAQERAIREFCQKNNYNLIKVYKDEAISGTSIKDRTEFLELIEDSKKKEFQCVVVHKFDRFARNRYDHAIYEKKLNDNGVKLLSVLEQLNDSPESVILKSVLTGMNEYYSLNLSREVKKGLNENALNCIHNGGIPPLGYNLDEDRRYIINEIEAETVRIIYKLYIEGIGYASIAEQLNQMGRLNKLGKPFRKTSIRDILLNEKYTGVFVYGKKDGHGKLTGNEVKIEGGIPQIISKEDFEKIQIKMKNRKTGSRATAHETYYLTGVCTCGECGGRYSGGYRSKQRDGSITYGYTCINRKTKVNDCRNKPIRKEILEEFVFKTIKKEIFTEKRIKSIASKVEKSVNEKILKKAQEVKKLESEIQKIKDKIDRLLEIFLDNKISKEVFEKKNNELERELFLLTQEKNKISASKKINRESIEAFIRNFKANFNKENIKKAIIETFVKEIKVYETYVEIVLRLFPMYIDRNGGDDESRTRVRNYNDYKPLQV

SEQ ID NO: 6413 - protein, 580 aa, synthetic construct
MSQPANEAALRAVSYLRVSTKDQASRGGLAEGLSIPAQRSAIAAKASAIGAEIVMEFADAGESGRSADRPQLQEMLRYLRNNHADVVIVHKIDRLARNRADDVTINLAIRQAGAQLVSVTENVDETPQGQLIHGIFSAVADFYSANLAQEVLKGMEQKVRSGGTIGRAPVGYINVRTTINGREARQIAIDHERADHVRWAFDTYATNPDMTLSRLTTLLQDRGLTLRATAKQPERPVQRSHTHKMLTNRFYVGRTRLRGVEYPGNHEPLIDERTFQQVQDRLAANRGTGNRERKHLQYLSGSLYCGRCRSRLVYTINRGRHGGVYEYYACSGRQIKKTDCDAPHFAVARIEEAVALVWDAEHAAWQTHAVPTVHEELIQHLRALREESGRNTSLIQRRIDKVQRDRHKWAESAMDGIVPADIAREKQAQLARQLVSLTAELASLEAAGVDTEATLNQLIEQISDPGRAYRRLEEGLRRTYNQAWFSRIYIDAVPEDVNSLLQADTDRTTISQALEACRQIITAAENNSADPEGSAEIIDIGSRHARGSIKNPLVELRGIEPLTFSMRTRRATNCAIAPRR

SEQ ID NO: 6414 - protein, 477 aa, synthetic construct
MITTRKVAIYVRVSTTNQAEEGYSIQGQLDSLTKYCEAMGWIIYQEYTDAGFSGGKIDRPAMSKLITDAKHKRFDTILVYKLDRLSRSVRDTLYLVKDVFSQNDVHFVSLQENIDTSSAMGNLFLTLLSAIAEFEREQITERMTMGKIGRAKSGKTMAWTYTPFGYDYNKEKGELILDPAKAPIVKMIYTDYIKGMSIQKIVDKLNKMDYNGKDCTWFPHGVKHLLDNPVYYGMTRYNNKLFPGNHQPIITKELFDKTQRERQRRRLGIEENHYTIPFQAKYMLSKFLRCRQCGSRMGLELGRPRKKDGKRSKKYYCLNSRPKRTASCDTPLYDAETLEDYVLHEIAKIQKDPSIASRQKHIEDHELKYKRERIEANINKTVNQLSKLNNLYLNDLITLEDLKTQTNTLIAKKRLLENELDKTCDNDDELDRQETIADFLALPDVWTMDYEGQKYAVELLVQRVKVDRDNIDIHWTF

SEQ ID NO: 6415 - protein, 502 aa, synthetic construct
MSGKIHPIIRVSTDKQLQGHGLESQHRAITDWISRHPEYELGESLELDGYSAFKGQHVEKLKAFVSMLPAGDTILLTEISRLSRLPIRQSYDLLYWILDRGVNIGFVTLDQVLTSSELDDSLYLRLSILFQNAKSESEIKSFRIRNVFADRIKRIEKGTHIKTTGLPAWVEVQDNAYHVHEYHAQTLRLMFELKLETGTYKICKWLQENRKVFPRLSGWSASRVQAILKNRAVLGDYTPFTTYHEEGRAKRKALTPIPNVYPQVIDESLFARVQQSFNQQPAGRKPRVPNPLAGIFVCPECGGSTSINRVADRVYYRCERVRDRRGCTAKSIRQKRVLYAVDALIAQVDLSRVLQPQTSPEAIHERIADLTKKIENLVNLVAQGVDLPEVGAQLQQLEQQRSALHQQLIVHKQVITPDFKKDKNKALRLLFNYITLIPDHIYEYPNPETGEPTSRTVDTLRFQLVDVNNWGMPEVKVPVDRLQQSKDLVNNLLDVYKLKSEI

SEQ ID NO: 6416 - protein, 523 aa, synthetic construct
MRQVITYLRFSSKPQERGDSIRRQKGLFERWLKDNPDAKVVDEYSDEGASAYHGHHLKGDFGRMLQNIQDGKYLSGQTVLLVESETRLNRQKARNTENLVDLITGKGVDVICLESGKIYTSTNIDDLDTSIQLKIAAHIAHQQSKEKSIKVSAAWEHRAQLALEGKQQLTKNVPGWIDPDTRKLNEHSSTVVTIFDLLLSGESLHNIARYLQAHNIKSFSRREKANGFSVHSVRTILRSESTVGTLAASKRNDRPAIHNYYEPAIDIATFNKAQEILSKNRVGRAPASDNPITINLFKGIIRCQCGASVHPTGVKATYQGVYRCNNVPDGRCNVPTIKRKPFDKWMLDNIVGFLERSDGNNTDKRKAEIEYQISLVTSKLKKATSLLLELDDVTELKEQVKELNIQRINMQSELDELNQRETLSDKPLHHLSEIDLTTKAGRVEAQLILSKFVQSIELQREMIIITLRNGAVIGKSRDLSPVLSQDLMKQVVSSSSPRDIDMFSVITSDEEFRKSGKPVTKRS

SEQ ID NO: 6417 - protein, 505 aa, synthetic construct
MSKPLRALVGARVSVLRGEQKVSHIAQKETGTKWVLDRGHEIVGTFEDLDVSASVSPFNRPDLGPWLTPEREHEWDVLVFSKIDRMFRSTRDCVRFAEWAEDHKKILVFAEDGMTLNYRDKDTSNSLESMMSELFIYIGSFFAQLELNRFKTRTMDSHRILRGMDRWAGGTAPLGYRVVDHPSGKGNALDTDPESKAVLHDIAGKLLDGWSIIRITQWLNDNHVLSNRDKARMAKGKEAKERPWAVSTVTRALTSLKTQGYKMHRQKPLLDGNGEMIRMAPPTFDDDTWRRIQETVALRQATKSRTNSSNPMLGIGYCDECGASLAQKILRKNGKEYRYYRCGRSPMQCSGVNYKADDADKLLEESFLARYGHRNVTRRVFVPGEDNSHELEQVRATIERLRRESDAGLVVTPEDEEIYLQRMRSLIDRRTTLESTPVRSAGWVTETLNTTYADAWGDQDHHKLLTDRGVKFYLSPGHPRMYVPELDEGQNEEASTNGAASADRM

SEQ ID NO: 6418 - protein, 543 aa, synthetic construct
MAAKARVYSYLRFSDPKQAAGGSVDRQLEYAARWAADNEMDLDASLSLRDEGLSAYHQRHVRQGALGVFLRAVEDGQVPVGSVLIVEGLDRLSRAEPLQAQAQLAQIVNAGITVVTASDGREYNRERLKAQPMDLVYSLLVMIRAHEESDTKSKRVKAAIRRQCQGWIAGTWRAPIRVGKDPHWVQETETGTFELADDRAAAVRLVIEMFKQGHGAVRIVRELADRGLKITDSGRSASSHIYRLLANRMLIGEKSVEVDGETFRLEGYYPELLTPAEFADVRYLAEQRGRRKGKGEIPGVVTGLGITYCGYCGAAIVAQNIMGRRRAADGRPYPGHRRLHCVTYSQSTGCKVSGSCSVVPVERALMLYCSDQINLTRLLAGESGTVPLAAQLTSARQRVAELEVQVQRVTDALLFDDGEAPAAVLRRVRELESQLAIERRGVDSLEHQLTTSASNVAPAAAEAWRELVHGVENLDYDARMLARQLVADTFSKIVVYQSGFRPDEDQGSIGLLLVAKRGSTRMLHIDRKTGAWRSAEEHDHTLS

SEQ ID NO: 6419 - protein, 564 aa, synthetic construct
MSKLSKPKVYSYLRFSDPKQAAGSSADRQMEYAARWAAEHEMQLDASLTLRDEGLSAFHQRHIKQGALGVFLRAVEDGRILPGSVLVVEGLDRLSRAGPIQAQAQLAQIINAGITVVTASDGRKYNRERLKAQPMDLVYSLLVMIRAHEESDTKSKRVKAAIRRQCEGWVAGTWRGIVRNGKDPHWVRQVENGAFEFLPERELAIRTMIDLFLAGHGAIEIARILAERELYVSNAGNYSTHMYRIVRNRALIGEKSLTVDGEEFRLAGYYPALLTPDAFATLQEAMSERGRRKGKGEIPNILTGLSISSCGYCGLALVSQNTAIRPAKGRAFTRRLGCSGATFNTGCPVGGTCDARIVERALMHYCSDQFNLARLLEGDDGAARRVAQLAVARQRAREIETQIQRVTDALLSDDGVAPVAFMRRARELESELEQQHREIEVLEHKIAASNAHEIPAAAEAWAQLVDGVLALDYGARMKARQLVADTFRKIVLFQRGFTPFGNAPADRWKRSGTIGLLLVTKRGGMRLLNIDRKTGQWEAEDNLDLAPHHADEIPLPPTVQGMEC

SEQ ID NO: 6420 - protein, 546 aa, synthetic construct
MAAKARVYSYLRFSDPKQAAGGSVDRQLEYAARWAADNEMELDASLSLRDEGLSAYHQRHVRQGALGVFLRAVEDGQVPAGSVLIVEGLDRLSRAEPLQAQAQLAQIVNAGITVVTASDGREYNRERLKAQPMDLVYSLLVMIRAHEESDTKSKRVKAAIRRQCQGWMAGTWRAPIRVGKDPHWVRETEAGRFELADDRAAAVRLVIEMFKQGHGAVRIVRELADRGLKITDSGRSASSHIYRLLANRMLIGEKSVEVDGETFRLEGYYPALLTPAEFSDLRYLAEQRGRRKGKGEIPGVVTGLGITYCGYCGAAIVAQNIMGRRRAADGRPYPGHRRLHCVTYSQSAGCKVSGSCSVVPVERALMLYCSDQINLTRLLEGDSGTVSLAAQLASARQRVAELETQVQRVTDALLLDNGEAPAAVLRRVRELESQLVSERRDVDSFEHQLAASAANVAPAAADAWRELVNGVEQLDYDARMLARQLVADTFSKIVVFQSGFRPDDDDGTIGLLLIAKRGTIRMLHVDRKTGEWRAAEEIDVNKMLAN

SEQ ID NO: 6421 - protein, 620 aa, synthetic construct
MSTRTTSADMLLGYTKRAVAGDGVDLAVTLLRVSTKKQLYTAIDIDADGNSIATQRDVTALKADALGARVDREFIEPGHSGKTVDQRPVFKELLGYLHEHPEVRYVIVYMRSRAFRNHFDAALVQIQLAKIGVRLVSAKEDFGQGAAAVAMEGMVDIMNGFQNTLQGLDVQAKMGRKARAGGTVSLAKIGYLNVRAEFKGKLVNTVGLDPERAPLLRKAWELYASGEYTITRLEATMADLGLTSRPTKTIPPGRPVSSSTLQKMLRDPYYAGFVHYKGELYTGRHEALVSQALFDQVQDVLDARSRDGQRDRIHMHYLKNTLFCERCRRNGENSRLIYTKVKGHNGSYYEYFLCRGRQEGHCDLPHQPVHLVEDAIVDYYATLGLPETFITEVRERLESTVQDNQASTRELHASLTRKLAAIDTKESRLIDLAADDLMPRDKIRQKLNELKQERARIEAGLTSTNEQLSIGAQVLRDALHLVEDPHRLYSDAPNNVRRHLNSAFYERFYLDDLVVADADKTPLFDDLHEAAHAHHSARIRRTRPTGANSAKTSEKGPQMARNPRNAGVPSGATGLDHPNLATVLTVPSSSTTSLVGVAGFEPTTSSSRTKRATKLRHTPL

SEQ ID NO: 6422 - protein, 564 aa, synthetic construct
MSKLSKPKVYSYLRFSDPKQAAGSSADRQMEYAARWAAEHEMQLDVSLTLRDEGLSAFHQRHIKQGALGVFLRAVEDGRILPGSVLVVEGLDRLSRAEPIQAQAQLAQIVNAGITVVTASDGRKYNRERLKAQPMDLVYSLLVMIRAHEESDTKSKRVKAAIRRQCEGWVAGTWRGIVRNGKDPHWVRQAENGAFEFLPERELAIRTMIDLFLAGHGAIEIARILSERELYVSNAGNYSTHMYRIVRNRALVGEKSLTVDGEEFRLAGYYPALLTPDAFATLQEAMSERGRRKGKGEIPNILTGLSMSSCGYCGLALVSQNTAIRPAKGRAFTRRLGCSGATFNTGCPVGGTCDSRIVERALMHYCSDQFNLARLLEGDDGAARRVAQLAVSRQRAREIETQIQRVTDALLSDDGVAPVAFMRRARELESELEQQHREIEVLEHKIAASNAHEIPAAAEAWAQLVDGVLALDYGARMKARQLVADTFRKIVLFQRGFTPFGNAPADRWKRSGTIGLLLVTKRGGMRLLNIDRKTGQWEAEDNLDLAPHHADEIPLPPTVQGMEC

SEQ ID NO: 6423 - protein, 564 aa, synthetic construct
MSKLSKPKVYSYLRFSDPKQAAGSSADRQMEYAARWAAEHEMQLDASLTLRDEGLSAFHQRHIKQGALGVFLRAVEDGRILPGSVLVVEGLDRLSRAEPIQAQAQLAQIINAGITVVTASDGRKYNRERLKAQPMDLVYSLLVMIRAHEESDTKSKRVKAAIRRQCEGWVAGTWRGIVRNGKDPHWVRQVENGAFEFLPERELAIRTMIDLFLAGHGAIEIARILSERELYVSNAGNYSTHMYRIVRNRALIGEKSLTVDGEEFRLAGYYPALLTPDAFATLQEAMSERGRRKGKGEIPNILTGLSISSCGYCGLALVSQNTAIRPAKGRAFTRRLGCSGATFNTGCPVGGTCDSRIVERALMHYCSDQFNLARLLEGDDGAASRVAQLAVARQHAREIETQIQRVTDALLSDDGVAPVAFIRRARELEGKLEQQHREIEVLEHKIAASNGHEIPAAAEAWAQLVDGVLALDYGARMKARQLVADTFRKIVLFQRGFTPFGNAPADRWKRSGTIGLLLVTKRGGMRLLNIDRKTGQWEAEDNLDLAPHHADEIPLPPTVQGMEC

SEQ ID NO: 6424 - protein, 530 aa, synthetic construct
MKMITKLEAKQPDNSLRKIRVAAYARVSTDSDEQLLSLEVQKEHYENYIKSNPCWEYAGLYFDEGISGTKIDKRESLKQLLKDCESGQIDRVITKSISRLARNTVDCLEIVRKLTGLGIYLYFEKENIDTEHMSSELMLSILSSIAQSESRSISENSMWSIQKRFENGSYIISSPSYGYKNENGKMIIVPKEAEVIKDIFSMALLGKGGHVIANELTAKKIPAKRGAKWSSTTVNAILNNKTYTGDVIFQKTYTDDNFNRHKNCGEKKQYVIENHHEAIISHETFNLVHELRQKRKLKLNITGGSNKYLARYVFSGKLYCGNCHSRLKKHDRHKKDGTYVVWCCTKHIREIKCCPMKAVKEEYVKLAFLQMLNKLKATYAQILTPFIKSLRNVNSKDGLNKVIELEEKKLKLQEQEQVLSKLFAGGYIEMDSYYLESNQLKTEIDTCLKEKLQLSNSLNGNLTHLNEAQKLQRFVSVTEVFSEFKDEDFLDFVDNVVVKSRTEFIFHLKCGLELEEEVKETWHTSHMVTE

SEQ ID NO: 6425 - protein, 525 aa, synthetic construct
MNANVTIIPPRKIAGNTVDKHKDKPKLRVVAYCRVSTDSEEQATSYDTQVQHYTDYISRNPLWEFAGIYADDGISGTSTKKRVGFNDMIHDCMSGKVDMVITKSISRFARNTIDCLKFVRQLKDKNIPIIFEKENINTMEASGELLLTIMASLAQQESASLSQNVKLGLKFRYQEGKVQINHNWFLGYTKDDEGNLVILEQEAKVVRRIYREYLEGASLRDIAEGLEKDGIKNGAGHLKWHLSNIKTILQNEKYIGDALLQKTITTDFINHVRIKNDGTEPQYYVKDSHASIIPRDIFFKVQEEMLRRANMFSGEENKKRRVYSSKYALSSLCVCSKCGDIYRRIAWNNRGVHSVVWRCCTRVKNGPSACDAPTVKEEELQSAIVKAINKVFSISDEVLDMLKNNIREIIAGNNLNEIETVDKRIADKQAILLTLLKAKKDYTKTANEIDELKVKKQQLLIEKAGQEDAKRRIREMEDFLKSERHDISEYDEKLVRKYIKKIKVYEDRFSITFKSEISVDIERAS

SEQ ID NO: 6426 - protein, 588 aa, synthetic construct
MKKEVKVIKGDTTLKRTASGCVERSIKRVAAYCRVSTDTEDQINSYNSQVEHYTEFIQKNNEWTLAGIYADEAITGTQVDRRIDFQRLINDCMNGDIDMIITKSISRFARNTLDTLKYVRKLKEFNVAVFFEEENINTLTMDGELLLTILSSVAQQEVENISANVKKGLRMKMERGEMVGFQGCLGYDYDPETKSISINEKEAEIVRYIFRRYIEGVGGMVISRELEEQGYLSPRGNKRWTETTVLGIIKNEKYKGDLMMGKTYTVDPISKRRLDNYGEQDKFYIENHHEPIISEEDFEKAQGIRLRRSKNRNTVANNGGKREKYSRKYAFSSMLECGFCGHNLSRRNWHSSSEYTKVIWQCVNATKNGKKYCPHSKGIEEEAIEKAFMESYRQVCHNNVEITNEFLKTVEEELKDNSLAKDLKKINNQLDKILKKEKDLVELRLNESISMDIYQDKYNEIAISKEKLLAEKRTLEVTLTDEKALKKRLEGFKKLLESNKYLEEFDRAVFESIVDKIIIGGTNDEGEIDPAMITIIYKTGKKDSQDGRLFKSRRKNAKEVDEKTDNKLYPQSSDEVNDLCSYPMDNTH

SEQ ID NO: 6427 - protein, 548 aa, synthetic construct
MIQTNSNHFSFKAAIYCRLSKDDEQKGESASIQNQKELLENYVKSRGWSIYDVYIDDGYTGLNTNRPSFQRLIRDIENKKVDIVITKDLSRLGRNYLQTGYYTENFFPKNNVRYIALNDGVDTFQENNEIVPFKNVLNEFYSRDVSKKMKSAYMTRARQGKFIGCLAPIGYRKDNDDPHKLVIDDETSWIVEKIFDLAFSGYGVQAIRRRLFEEKIPTPTWWNRKKGLRNKKTKLEMTVDGGEYWWDCTTLKEIIENPVYIGHIASQKVNYKFKVGWLSDKPKEEWIIVENTHEPIISEDIYNIANEKLKSRRRPFKNGEESIFAGIVKCPDCGKSLNLGRNKSKKREKLLTCNTYRRYGKSLCSQHRIYYDTLYEIVLKDIRKNAEIALKDEKEIIKALEKSREIDNEEEQKFIMDKIYEDQIRVEDLTKKIERLYDDWLDNKISESNFQKILEKSQKEQDYLNQRIEDNQKLIVKEDLEDIDVKKWIELIKKHRDIKKLDKETLNELISKIYVHEKEVVNGEITQTIDIYYNFIGNTDTLQVFYNL

SEQ ID NO: 6428 - protein, 613 aa, synthetic construct
MRNFEKITALYERLSRDDELEGESNSIVNQKKILEEYASKNNLTNIIHFTDDGISGTQFDRPGFMEMMNGVNAGNIGCIIVKDMSRLGRDYLKVGQCMEILRQKGVRLIAINDNVDSFYREDDFTPFRNIMNEWYARDTSRKIQSTFRSKGESGKHTASTPPYGYIKDEKDKDKWVVDEKAAEIVRRIFNLTMDGAGPYKIAKILEADKIDIPAYHQQKMGYGLHQSKNFEYPYRWCSSTIASILKKKEYLGHTVNFKTRKHFKDKKSKYVSEDKWLIFENTHEAIIDQETFDNVQRIRGNVKRYPDGWGEYHPLTGLMYCADCGSKMYVHRTNNYKNIPYYVCSNYKKVPCGTLCPSAHRIKAEAVLNLIQETLKDIKKYLDEDNEAFIRSIQNEMEEKEKVEIEKKKIKLTESQNRLQELERLMCRIYEDMILNKIPNNRYEILNNQYETEQLTLSKEIKDLELVISRYEKETDRARKFISLINRYENFDELTNTMINEFVEKIIIHERDRKGSQTSKQKIEIYFNFIGNYELPQAELSEEEKQKLEEEERKIKERKDKLHQNYLKRKASGKQKEYEKKYKARREQKKQEKLKVLKRGGIPVCEMQNILIE

SEQ ID NO: 6429 - protein, 453 aa, synthetic construct
MKQVFLYVRVSTEEQALHGLSIEAQTAALESWARENGNKVVGVYTDAGISARKPASKRPALQRLLEDVRAGKGELVVFTKLDRWFRNISEYYKVQEVLEKHHVDWKTIHEDYDTSSASGRLKINIMLSVAQDEADRTSERIKAAFELKRQKAEPLTGDCPLGYRQQGKKFIKDPETESAVNAFFQTFLLTGSISGAMDAANQNGVLINYFRAHKMLDATCYYGRYFNADGMTPPYISKKEFDKIQSMRRRIVRKTKHNRTYLFSGIILCGECGGRLGGRVNTPNESFFYNCTAHYLQRTGCPSRVNISERKIEKYLMDTIDGQMQELRLETKRICSQKKQRDYKSEIAALRAKRGKLKELYINDLITLEEYKADAGTYDKKISALEAESNQTRVPDLSMLEKLLHRDWQTLYETMDKTSKRDFWRTTIKEIRVYIDRHIEYDFNVDFYTRTSS

SEQ ID NO: 6430 - protein, 507 aa, synthetic construct
MKRVISYIRFSSEKQAKGDSLRRQSKMVNDWLKAHPEYYLDQDLSFRDLGVSGFTGKHLKGGLGDFLTAIEKGLVKAGDTLLIESLDRLSRQDIDIASELLRRILRAGVDVVTLSDGEHYTKESLRDPLSLIKSILIMQRAHEESLRKAERIQAAWDAKKEAAKAGIKISRRCPAWLRLNDDRKSFSVIPEKVETVKRCFQLRLEGKSIWEIVRTLNDEGHQSMSQYKPGKFGQTSVQDLLKNRSVIGYFTPKGCEEIAGYYPAIIDETTFYKVQQLSHSRYGKRSVSDKPLSVNLFKGVIRCSECGHALIITGFSDTRNGIYRCPLRNENRCSAKGLSRKQTDGTLLTLLSRLDRFDSDTTNTIDTLKLHREHISSNIEKLVQLSLEIEDLNAITSKLKQLKGELSQVDADIEKETQRLKSIDVGCLSDCDLTTKAGRIEAQLIIKSAVKEVVLNTAKRRCKVTFHNGRAITLPITENPSEDVTEAIQSLSEVTERGLIDVDEVII

SEQ ID NO: 6431 - protein, 507 aa, synthetic construct
MKRVISYIRFSSEKQAKGDSLRRQSKMVNDWLKAHPEYYLDQDLSFRDLGVSGFTGKHLKGGLGDFLTAIEKGLVKAGDTLLIESLDRLSRQDIDIASELLRRILRAGVDVVTLSDGEHYTKESLKDPLALIKSILIMQRAHEESLRKAERIQAAWNRKKELISEGIKISKRCPAWLKLNDDRKSFSVIPDKVETVKRCFQLRLEGKSIWEIVRTLNDEGHQTLNQYKAGKFGQTSVQDLLKNRSVIGYFTPKGCEEISGYYPAIIDETTFYKVQQLSHSRYGRKPVSAKPLSVNLFKGVIRCSECGHALIITGFSDTRNGIYRCPLRNENRCSAKGLSRKQTDGTLLTLLSRLDRFDSDTTNTIDTLKLHREHISSNIEKLVQLSLEIEDLSAITSKLKQLKGELSQVDADIEKETQRLKSIDVGCLSDCDLTTKAGRIEAQLIIKSAVKEVVLNTAKRRCKVTFHNGKVIDLPITENPSEDVTEAIQSLSEVTERGLIDVDEVII

SEQ ID NO: 6432 - protein, 576 aa, synthetic construct
MTKAYIYTRVSTLQQIDGFGIDRQINTLMDFLENAELPKELGYQLDPKNYEILDSDEGLSGYKGHNFTKGSLGKFKSRVANGEITSGCLLIESVDRFSRRQGYDAIDEFTFLLKRNIDIIEVETEQIFSYRLDHKLTQLSTSIERAYQESKRKSRLITKSWANLKRKAVDEGIALKRNVPYWLALDGDHYRLNTSEAERIRTIFNDYANGKGVTAIVRDLNKAGGKYDEKAFSTNFINVMLRDRRLIGWLTGKRKKDETIADWKLREIKIYPEVIDANLFELVQRRIDANAVTKEVRSSSKQVSLFNGVARCGICNEPLVGHFTQKGSYLRCLGKRSKLGTCNSSLIRYKECELAVINYVKNIDFKSIYGNNKNNTPMINLLQQKMSVATAEINGIESLLYTSDNSSEIVALTKARREKVKERDKISYELTELMRTVDVCDEDFILDLESICDHNNAELREKFNGVLKKVIKSIKIIQDNGSDNKIFIIKFEYHTDYAMHCVALNLDGSLIGYSYIEDKGELCLKSSCMDVNFKTGDITTKHVPDYIEALIVKSTLENIEQVLNEFDDNLKKIEIT

SEQ ID NO: 6433 - protein, 506 aa, synthetic construct
MRTVITYLRFSSAIQGAEGADSTRRQNDLFKQWLKKNSDAQVVASFSDEGLSGYKGKHLTGQFGDMLARIESGEFPAGTILLVESIDRIGRLEHLETEALMNRILGNGIEIHTLQDGLIYTKDALADDLGISIIQRVKAYIAHQESKQKSFRVSQKWEQRAKLALAGEQRLTKMVPGWIDPDTFKCNEHAETVRLIFKLLLDGESLHNIARHLQANNISSFSRRKDANGFSVHSVRTILRSETTRGTLPASQRNDRPAIPNYYEAAIDAATFNKAQEILDKNRKGRTPASDNPLTINIFKGLFRCQCGASVHPTGTKNKYQGVYRCNNHLDGRCDVQPLKRKPFDRWMIDNFLGMIDVGNDGESERKIAALQHEVEIVTARIKKATALLLEMDDIDELKIQLKELNQKRTELQTTIDNMRRKASLTDKELPQLKDIDLTTKAGRVECQLILSKHLKGLTLGKDTVTVTLQNDTEITIPTDPLPLNDGTSIFEIAEKNLLNIDTFQL

SEQ ID NO: 6434 - protein, 507 aa, synthetic construct
MKRVISYIRFSSEKQAKGDSLRRQSKMVTDWLKAHPEYYLDQDLSFRDLGVSGFTGKHLKGGLGDFLTAIEKGLVKAGDTLLIESLDRLSRQDIDIASELLRNILRSGVDVVTLSDGEHYTSESLKDPLALIKSILIMQRAHEESLRKSERIQAAWDAKKEAAKAGIKVSKRCPAWLKLNDDRKSFSVIPEKVETVKRCFQLRLEGKSIWEIVRTLNDEGHQTLNQYKAGKFGQTSVQDLLKNRSVIGYFTPKGCEEISGYYPAIIDETTFYKVQQLSHYRYGRKPVSDKPLSVNLFKGVIRCSECGHALIITGFSDTRNGIYRCPLRNENRCSAKGLSRKQTDGTLLTLLSRLDRFDSDMTNTIDTLKLHREHISSNIEKLVQLSLEIEDLSAITIKLKQLKNELSQVDADIEKETQRLKSIDVGCLSDCDLTTKAGRIEAQLIIKSAVKEVVLNTAKRRCKVTFHNGKAITLPITENPSEDVTEAIQSLSEVTERGLIDVDEVIV

SEQ ID NO: 6435 - protein, 547 aa, synthetic construct
MKLLVTYIRWSTREQDSGDSLRRQTNLIDAFYAKHKDDYYLLPAHRYVDKGKSGFHQQHKAQGSDFRRMFENVMSGAIPEGSLIVVENFDRFSRADIDTAIDDVRQILRKGVSILTLGDGELYDKSALTDPVKLIKHIIIAERAHQESLVKQKRIAQVWNHKTQLARELKKPMGKQAPGWLELSEDGSHYIVDEDKASLVNIIYDKRLSGMSMFAICKWLNEQGYPTINQRKVRISKTKKPDGNWSALSVKHILTSRSVLGYLPAKISTEDRKTVLREEIESFYPQIVTDSKFYAVQQLLEETGKGKTSSGEHWLYVNILKGLIRCKCGLVMTPTGIRKPVYQGTYRCNGNKESRCNYGTVSRKLLDTQLCSRLFSKLSQLHDEATDTAKLDELQRRLNTVDSELEKLTETLIQLPNITQIQEALRVKQEEKDELIVQLSREKARVKSVSSLDLSGLDMESVEGRTEAQIIIKRLVKEIVVSGNEKLVDIYLHNGNMIRGFPLDGKDDHTLTLEEATDEMQPLDDMLIFGEPVTRIYPAGDMEEVDA

SEQ ID NO: 6436 - protein, 506 aa, synthetic construct
MRTVITYLRFSSAIQGAEGADSTRRQNDLFKQWLKKNSDAQVVASFSDEGLSGYKGKHLTGQFGDMLARIESGEFPEGTILLVEAIDRIGRLEHLETEALMNRIIAHGIEIHTLQDGLIYTRDALSDDLGISIIQRVKSYVAHQESKQKSFRVSQKWKQRAKLALAGEQRLTKMVPGWIDPDTFKCNEHAETVRLIFKLLLDGESLHNIARHLQANNISSFSRRKDANGFSVHSVRTILRSETTRGTLPASQRNDRPAIPNYYEAAIDASTFNKAQEILDKNRKGRTPASDNPLTINIFKGLFRCQCGASVHPTGTKNKYAGVYRCNNHLDGRCDVPPLKRKPFDKWMLENFLGMIDVGNDGEAEGKIASLQHEVEIVTTRIKKATALLLEMDDIDELKIQLKELNQKRTELQTTIDNMRRKASLTDKELPQLKDIDLTTKAGRVECQLILSKHLKGLTLGKDSVIVTLQNDTEITIPTNPLPLNDGTSIFEIAEKELLEIDAYQL

SEQ ID NO: 6437 - protein, 507 aa, synthetic construct
MKRAISYIRFSSEKQSRGDSLRRQSKMVNDWLKAHPEYYLDQDLSFRDLGVSGFTGKHLKGGLGDFLTAIEKGLVKAGDTLLIESLDRLSRQAVDRASELLRNILRSGVDIVTLSDGEHYTSESLKDPLALIKSILIMQRAHEESLRKSERIQAAWDAKKEAAKAGIKVSKRCPAWLRLNDDRKSFSVIPEKVETVKRCFQLRLEGKSIWEIVRTLNAEGHRSMNQYKPGKFGQTSVQDLLKNRSVIGYFTPKGCEEISGYYPAIIDETTFYKVQQLSHSRYGKRSVSDKPLSVNLFKGVIRCSECGHALIITGFSDTRNGIYRCPLRNENRCNAKGLSRKQTDGTLLALLSRLDRFDSDMTNVIDALKLHREHISNNIEKLVQLSLEIEDLSAITIKLKQLKGELSQVDADIEKETQRLKSIDVGCLSDCDLTTKAGRIEAQLIIKSAVKEVVLNTAKRRCKVTFHNGKSITLPITENPSEDVTEAIQSLSEVTERGLIDVDVVEI

SEQ ID NO: 6438 - protein, 507 aa, synthetic construct
MKRVISYIRFSSEKQAKGDSLRRQSKMVNDWLKAHPEYYLDQDLSFRDLGVSGFTGKHLKGGLGDFLTAIEKGLVKAGDTLLIESLDRLSRQAVDRASELLRNILRSGVDVVTLSDGEHYTRESLRDPLSLIKSILIMQRSHEESLRKSERIQAAWDAKKEAAKAGIKVSKRCPAWLRLNDDRKSFSVIPDKVETVKRCFQLRLEGKSIWEIVRTLNAEGHRSMNQYKPGKFGQTSVQDLLKNRSVIGYFTPKGCEEIAGYYPSVIDETTFYKVQQLSHSRYGRKPASAKPLSVNLFKGVIRCSECGHALIITGFSDTRNGIYRCPLRNENRCSAKGLSRKQTDGTLLALLSRLDRFDSDMTNTIDTLKLHREHISSNIEKLVQLSLEIEDLNAITNKLKQLKNELSQVDADIEKETQRLKSIDVGCLSDCDLTTKAGRIEAQLIIKSAVKEVVLNTAKRRCKVTFHNGKLIDLPITETPSKDVTEAIQSLSEVTERGLIDVDEVII

SEQ ID NO: 6439 - protein, 449 aa, synthetic construct
MKQAIGYLRQSTTKQQSLAAQKQTIKALAEKHNIQHITFYSDKQSGRTDKRNGYQQITELIQQGQCDVLCCYRLNRLHRNLKNALKLMKLCQTYHVHILSVHDGYFDMDKAFDRLKLNIFISLAELESDNIGEQVKNGIKEKARQGKLITTHAPFGYHYHNGTFTIDTVKSPTVKAVFNYYLQGYGYKKIAQYLEADDNFINRKPYQVRNIILNPNYCGRVINQYGQYENMFPAIVSTTIYEEAQVTRTQKQVKCKPSENQLKQKIKCPYCHSTLTNMTVRKPDHSLRYYVCPQNMNNARFVCEFKGINAQELETSVLATCQDFFQNQQLYSKINHTIQQRLKRQRDIEIKTTLNHEQLIEKLAQGKIDAETFKEQTHSLHQQSKPISSISAYQIRKAFQNIIQQRFTLNMLYSYIDEINISKNKSLAGIYFKNEPLNIVKQTMKLSIV

SEQ ID NO: 6440 - protein, 503 aa, synthetic construct
MPQRNNGIAYSYVRFSSKRQELGDSLRRQTEMAEEYAIKNGLKLSSKNFQDLGISAFREGKRASLVDMLAAIEEGQITAGSTIIIEALDRLSRRGIDATLETVKEILRKDVQVVSLSDGLLLTKNSLNDLQSVIRIAVAADLAHKESERKALRLRETKGQQREAALSGKPINKILPFWLQRTEAGYAFSDKAGVARQIVQLKQEGKGSNMIAKTLNKLGIAGVRTAQWNHASITKMLKNPALYGAYQTGETTKDRELIKLELVEAYYPALINKEEWLLLQSDQSKSKRGRRSANNPYSGLLRCECGGALVKRQHTVKGKLYVYHGCLNAKDGRCTQNISIKGLDGALTTILGRLEFKKKQTLSQSIHQERQQLEARINDLNSKLQVLDDIPLSVIKSIGTMESRLKEITDQIAKDEREQRGIEAVKSEKLSSITDGLELNLLLKRVLKSITVIRSGRGWAVKVLHLSGHKQNFLMVDGEIKFLSDTIALQKLLAGFRETTENS

SEQ ID NO: 6441 - protein, 507 aa, synthetic construct
MKRVISYIRFSSEKQAKGDSLRRQSKMVTDWLKAHPEYYLDESLTFRDLGVSGFTGKHLKGGLGDFLTAIEKGLVKAGDTLLIESLDRLSRQAVDRASELLRNILRSGVDVVTLSDGEHYTSESLKDPLALIKSILIMQRAHEESLRKSERIQAAWDAKKEAAKAGIKVSKRCPAWLRLNDDRKSFSVIPEKVETVKRCFQLRLEGKSIWEIVRTLNDEGHQSMSQYKPGKFGQTSVQDLLKNRSVIGYFTPKGCEEIAGYFPPIIPETDFYKVQQLSYSRYGRKPASDKPLSVNLFKGVIRCSECGHALIITGFSDTRNGIYRCPLRNENRCSAKGLSRKQTDGTLLTLLSRLDRFDSDTTNTVDMLRLHREHISNNIEKLVQLSLEIEDLSAITSKLKQLKGELSQVDADIEKETQRLKSIDVGCLSDCDLTTKAGRIEAQLIIKSAVKEVVLNAAKRRCKVTFHNGKSITLPITENPSEDVTEAIQSLSEVTERGLIDVDVVAI

SEQ ID NO: 6442 - protein, 561 aa, synthetic construct
MRSAKAYSYVRFSTPKQAQGDSYRRQLQQARDYCTTHNLVLDDKTIEDFGVSAFRGSNRTDGALGRFIDAVKGGEIVRGSYLLVESVDRLSRQAIEEALTQFLEIVREGIVIVTLSDNQVFRSGEVDFTKLIVSIVYMARANDESEMKSRRSRAAWSNGRQQARDNNKVIANSRLPSWLKLEGDKIVPIPERVAIVNEMFQMARSGQGYQQIAKVFTENDYKTFGQGKVWRPAGIQSVIKSRTVIGEFQPHVIVEGKRVPEGEPILDYYPAIVPPSIFAEVQHIVDKRSNHSGSYRKGLYNNLFSGVIRCQCGELLRFHNKGSRGQVRNYLVCPMEGVTGCQLPYLLYNKIEPQLLQAISKLSVVMKQRIPQTEKTSLLKDELAVLRGQLEIETRKSKKAAQAMLELDDDAVFRSLYEECKANCQSLEEKILQIENEIVGLELSTRTLFQLLSPEDLSNTEQRQRFNSQLKLAVKIEFIYEHSGLVVVIKNLEDEPLLEQAFGHKLMNSIVHDFEGHVVVKTISDSPYIDPSWADEEREEYTKGISAEFDQCGDFNIDNFK

SEQ ID NO: 6443 - protein, 507 aa, synthetic construct
MKRAISYIRFSSEKQSRGDSLRRQSKMVNDWLKAHPEYYLDQDLSFRDLGVSGFTGKHLKGGLGDFLTAIEKGLVKAGDTLLIESLDRLSRQDVDQASELLRNILRSGVDVVTLSDGEHYTMESLKDPLALIKSILIMQRAHEESLRKAERIQAAWDAKKEAAKAGIKISRRCPAWLKLNDDRKSFSVIPDKVETVKRCFQLRLEGKSIWEIVRTLNAEGRQTLNQHKAGSFGQTSVQDLLKNRSVIGYFTPKGCEEISGYYPAIIDETTFYKVQQLSYARYGRKPASDKPLSVNLFKGVIRCSECGHALIITGFSDTRSGIYRCPLRNENRCSAKGLSRKQTDGTLLTLLSRLDRFDSDMTNVIDTLKLHREHISSNIEKLVQLSLEIEDLNAITNKLKQLKNELSQVDADIEKETQRLKSIDVGCLSDCDLTTKAGRIEAQLIIKSAVKEVVLNTAKRRCKVTFHNGKAITLPITENPSDNVTEAIQSLSEVTERGLIDVDVVAI

SEQ ID NO: 6444 - protein, 506 aa, synthetic construct
MRTVITYLRFSSAIQGAEGADSTRRQNDLFKQWLKKNSDAQVVASFSDEGLSGYKGKHLTGQFGDMLARIESGEFPEGTILLVESIDRIGRLEHLETEALMNRILGNGLEIHTLQDGLIYTKDALADDLGISIIQRVKAYIAHQESKQKSFRVSQKWEQRAKLALAGEQRLTKMVPGWIDPDTFKLNEHAETVRLIFKLLLSGESLHNIARHLQSNGIKSFSRRKDANGFSVHSVRTILRSETTIGTLPASQRNDRPAIPNYYEAAIDASTFNKAQEILGKNRIGRTPASDNPLTINIFKGLFRCQCGASVHPTGTKNKYQGVYRCNNHLDGRCDVPPLKRKPFDKWMLENFLGMIDVGNDGEAEGKIASLQHEVEIVTTRIKKATALLLEMDDIDELKIQIKELNQRRTELQTTIDNMRRKASLTDKELPQLKDIDLTTKAGRVECQLILSKHLKGLTLGKDSVIVTLQNDTEITIPTNPLPLNDGTSIFEIAEKELLEIDAYQL

SEQ ID NO: 6445 - protein, 615 aa, synthetic construct
MKPYDITATMFGTPTEDATVEVKDAVSLLRVSSKRQMDTAIDIDPDGLSIATQRRVVELKANSVGTRVVKEFLEPGYSAKTIDERPIFKELLHYLNTHPNIGFVIVYMRSRAFRNQYDAAMVQMHLQKRGIRLISAKEDFGEGPYAEAMEGMVDIMNGLTNKLQGLDIQTKMYEKARHGGTNGQARLGYLNVRDVYDGKPFNTVRLDPKRAPLVKKAWELYATGDYTLERVADTMTDLGLTARANRRCPERPVSYKWYHRMFKDIYYLGFITYKGKGEQTQIFPGRHEPLIEQELFDRVQDVLNQRSRKGQRDRIHQHYLKGHLFCARCERHGRTSRLIYTEAKSRNGSYYGYFMCRARQDKLGCDLPLLPVELVEDTITDHYHTLALPADFIDSVRELLSQTLADEQGSVRTMHAQLAKRIKDLDQKEERLIDLAADDSLPQDKIRIRLRRIQSDRASAQAGLLSTTAELNTGADILKSALAALSNPASYYQLADDTTRRFMNQTFYTKFLLDDEGVVDHCLNPPFDDFHQAKAAWNTTKPATLTDYLNAHPPQTQKRLPSRETPSHNLEPTLAGIVSVPGLSTASMVELRGIEPLTFSMRTRRATNCAIAPRR

SEQ ID NO: 6446 - protein, 489 aa, synthetic construct
MPETLRALVGARVSVLRGEQKVSHIAQKETGTKWVLDRGHDIVGTFEDLDVSASVSPFNRPDLGPWLTPEREHEWDVLVFSKIDRMFRSTRDCVRFAEWAEDHKKILVFAEDGMTLNYRDKDTSNSLESMMSELFIYIGSFFAQLELNRFKTRTMDSHRVLRGMDRWAGGTAPLGYRVVDHPSGKGNALDTDPESKAVLHDIAGKLLDGWSIIRITQWLNDNHVLSNRDKARMAKGKEAKERPWAVSTVTRALTSLKTQGYKMHRQKPLLDGNGEMIRMAPPTFDDDTWRRIQETVALRQATKSRTNSSNPMLGIGYCDECGASLAQKILRKNGKEYRYYRCGRSPMQCSGVNYKADDADKLLEESFLARYGHRNVTRRVFVPGEDNSHELEQVRATIERLRRESDAGLVVTPEDEEIYLQRMRSLIDRRTALESTPVRSAGWVTETLNTTYADAWGDQDHHKLLTERGVKFYLSPGHPRMYVPELEGE

SEQ ID NO: 6447 - protein, 506 aa, synthetic construct
MRTVITYLRFSSAIQGAEGADSTRRQNDLFKQWLKKNSDAQVVASFSDEGLSGYKGKHLSGQFGDMLSRIESGEFSKGTILLVEAIDRIGRLEHLETEALMNRIIAHGIEIHTLQDGLIYTRDALSDDLGISIIQRVKSYLAHQESKQKSFRVSEKWKQRAKLALAGEQRLTKMVPGWIDPETFKLNEHAETVRLIFKLLLDGESLHNIARHLQANNISSFSRRKDANGFSVHSVRTILRSETTRGTLPASQRNDRPAIPNYYEAAIDAATFNKAQEILDKNRKGRTPASDNPLTINIFKGLFRCQCGASVHPTGTKNKYQGVYRCNNHLDGRCDVPPLKRKPFDKWMIDNFLGMIDVGNDGEAEGKIAALQHEVEIVTARIKKATALLLEMDDITELKTQVKGLNQKRTELQTTIDNMRRKASLTDKELPLLKDIDLTTKAGRVECQLILSKHLKGLTLGKDSVTVTLQNDTEITIPTDPLPLNDGTSIFEIAEKNLLNIDTFQL

SEQ ID NO: 6448 - protein, 507 aa, synthetic construct
MKRVISYIRFSSEKQAKGDSLRRQSKMVNDWLKAHPEYYLDQDLSFRDLGVSGFTGKHLKGGLGDFLTAIEKGLVKAGDTLLIESLDRLSRQDIDIASELLRNILRSGVDVVTLSDGEHYTKESLKDPLALIKSILIMQRAHEESLRKAERIQAAWDAKKEAAKAGIKVSKRCPAWLKLNDDRKSFSVIPEKVETVKRCFQLRLEGKSIWEIVRTLNDEGHQTLNQYKAGKFGQTSVQDLLKNRSVIGYFTPKGCEEISGYYPAIIDETTFYKVQQLSHYRYGRKPVSDKPLSVNLFKGVIRCSECGHALIITGFSDTRNGIYRCPLRNENRCSAKGLSRKQTDGTLLTLLSRLDRFDSDTTNVIDALKLHREHISNNIEKLVQLSLEIEDLSAITIKLKQLKGELSQVDADIEKETQRLKSIDVGCLSDCDLTTKAGRIEAQLIIKSAVKEVVLNTAKRRCKVTFHNGKVIDLPITENPSEDVTEAIQSLSEVTERGLIDVDEVII

SEQ ID NO: 6449 - protein, 506 aa, synthetic construct
MRSVITYLRYSSAIQGAEGADSTRRQNDLFKQWLKKNGDAQIVASFSDEGLSGYKGKHLTGQFGDMLARIEAGEFPEGTILLVESIDRIGRLEHLETEALMNRILGNGIEIHTLQDGLIYTKDALADDLGISIIQRVKAYIAHQESKQKSFRVSQKWGHRAKLALAGEQRLTKMVPGWIDPETFKLNEHAETVRLIFKLLLDGESLHNIARHLQSNGIRSFSRRKDANGFSVHSVRTILRSETTIGTLPASQRNDRPAIPNYYEAAIDASTFNKAQEILTKNRKGRTPASDNPLSLNLFKGLFKCRCGASVHPTGTKNKYQGVYRCNNHLDGRCDVPPLKRKPFDRWMIDNFLGMIDMGNDGESERKIAALQHEVEIVTSRIKKATALLFEMDDITELKTQVKELNQKRTALQTTIDSMKRKALLTDKKLPQIRDVDLTTKAGRVECQLILSKHLESLTLDEGFVTVKLQNGTKIIIPTDPLPLNDGTSIFEIADKKLLDIDVYRL

SEQ ID NO: 6450 - protein, 558 aa, synthetic construct
MTKLYSYIRFSSMRQSEGSSYERQIRMAKEIADRHGLELVNDYQDLGVSAFKGANSKTGALSRFLDEIGRSIPVGSWLFIENLDRLSRQDIISAQELFLSIIRRGITIVTGMDNKIYSIETVTANPMDLMFSILLFIRGNEESQTKRNRTNSSALLKIKAHQQNPQSPAVAIEEIGKNMWWTDTTSGRVLPHPVYFPVLQKIVKMRQDGHSAGSILDYLNEHHEPPAPTSNKRHGKWSRAMVSRLFNTKALIGVKTVRVDGVEYELRDYYPRVLSDSEFYFLRKNIIKKAWDYGHDKEKVIPLLSGIGVLRCVHCGATMVKQTAANGKREQYRYCCDGRKSGRTDCPYPNWGFRAATLERAVLQLLADKIWIAEDKTNPIPEIQVKIDDISRKIDNLINLSAMMGATKELANQITDLNMQREALHEEIRLFEREMYSVDSQGWEKLAEFDLSDVQNEERLKVRMKIKGALHEIECSRLDSKKNLFVLVYLDGLRQRLVIENNRGLKKGQIIVDLKTINDKQILESAGMVLHPCIDMIVDKNWKAPEEISGLLSEEFGI

SEQ ID NO: 6451 - protein, 510 aa, synthetic construct
MKNAVIYARYSSDNQREESITAQIRAIKEFAKREQYNIINIYKDEAQSATTDDREEFLKMIKDSKSQIFDTVLVHKLDRFARNRYDSAFYKRQLKLNGVRVVSILERLDDSPESIILESVLEGMAEYYSANLSREVKKGHYENAVLAVHNGGIPPLGFDVGPDRRLVINKHEAIAVNIIYKMYSDGYSYGDILSELNSNGFKTKKNKPFGKNSLYEILRQEKYIGTYVYNRRAKNAAGKYNNHKENPKIVRIEGGCPQIIKKELWLKVQERMKKNKRIGGQNKAKVNYLLSGKIYCGKCGASMTGHGTVDSKSKVRYYYYVCNNKKRTKQCDLKGVKKEDIENMVLDHLYKHVFCDSMIEKSIDKIYNYANKKKEGIPDLLKSYQKQLTIIDNEIDKVIDLLMSGYRNNTLKEKLDKLEDEKKEVENLIIKSEIKLNRVDYTREEISEFMYSFKDLKSMSSIRQKKVINIFVYRILIYEDKYDMEIFNNPIDSNKNKKIRQQRVTGHPDQ

SEQ ID NO: 6452 - protein, 547 aa, synthetic construct
MKLLATYIRWSTKEQDSGDSLRRQTNLIDAFYSKHKNDYYLLPAHRYVDKGKSGFHQQHKAQGSDFRRMFENVMSGAIPEGSLIVVENFDRFSRADIDTAIDDVRQILRKGVSILTLGDGELYDKSALTDPVKLIKHIIIAERAHQESLVKQKRIAQVWNHKTQLARELKKPMGKQAPGWLELSEDGSHYIVDEDKASLVNIIYDKRLSGMSMFAICKWLNEQGYPTINQRKVRISKTKKPDGNWSALSVKHILTSRSVLGYLPAKISTEDRKTVLREEIEGFYPQIVTDSKFYAVQQLLEETGKGKTSSGDHWLYVNILKGLIRCKCGLVMTPTGIRKPVYQGTYRCNGNKESRCSYGTVSRKLLDTQLCSRLFSKLSQLHDEATDTAKLDELQRRLNTVDSELEKLTETLIQLPNITQIQEALRVKQEEKDELIVQLSREKARVKSVSSLDLSGLDMESVEGRTEAQIIIKRLVKEIVVSGNEKLVDIYLHNGNMIRGFPLDGKDDHTLTLEEATDEMQSLDDMLIFGEPVTRIYPAGDMEEVDA

SEQ ID NO: 6453 - protein, 506 aa, synthetic construct
MRHVITYLRYSSAIQGAEGADSTRRQNELFKQWLRKNSDAQVVASFSDEGLSGYKGKHLTGQFGDMLARIEAGEFPASTILLVESIDRIGRLEHLETEALMNRILGNGIEIHTLQDGLIYTKDALADDLGISIIQRVKAYIAHQESKQKSFRVSQKWEQRAKLALAGEQRLTKMVPGWIDPDTFKCNEHAETVRLIFKLLLDGESLHNIARHLQANNISSFSRRKDANGFSVHSVRTILRSETTIGTLPASQRNDRPAIPNYYEAAIDVSTFNKAQEILDKNRKGRTPASDNPLTINIFKGLFRCQCGASVHPTGTKNKYQGVYRCNNHLDGRCDVQPLKRKPFDRWMIDNFLGMIDVGNDGESERKIAALQHEVEIVTARIKKATALLLEMDDIDELKIQLKELNQKRTELQTTIDNMRRKASLTDKELPQLKDIDLTTKAGRVECQLILSKHLKGLTLGKDTVTVTLQNDTEITIPTDPLPLNDGTSIFEIAEKNLLNIDTFQL

SEQ ID NO: 6454 - protein, 482 aa, synthetic construct
MRVAAYVRVSTDEQADKGNSLSEQKERLSAYCKAMGWNTPIFFVDDGYSAKDLNRPAIKKLLQSVKSKEYDIVLTSKLDRLTRSLLDLLHVVNMFGEYNCNYVSATESFDTSTAVGRMVLQLLGVFAEFERERISERVSDNMISLAKHTDKALGKVCYGYDVVDGKYIINEIEADFVRLMFDLAEQGNGHRMIAKELNDRGSVTKKGKMWDQTNVRRLIQNESLAGIMIYNKRQTKNGKITMRPKSDWIIKENNHPAIISPERFQAVQEIMQSRSRARKHADSETYLLTGLVVCKHCGKGMKGATSRHKTKYGDYTYYRYICSSYVAGYNCKHHIVHRDDLETLIVEQIKLIAESSAKQLKLDIAASNNQKDELEEIKQQLAKTDKKMQRQIEAFENDLISAADLRTARERVEAEREGLRKRLERLENGDKKEDVQTVISKAKGLLDEIMGVDRVKAKAAIRLLIEQIQVENGEMVSITWKG

SEQ ID NO: 6455 - protein, 559 aa, synthetic construct
MKTKLYSYIRFSSMRQNDGSSYERQIRMAREVAAKYDLELVNDYQDLGVSAFKGANSKTGALSRFLDAIGRSVPVGSWLFIENLDRLSRADIVSAQELFLSIIRRGITIVTGMDNKIYSLDTVTANPMDLMFSILLFIRGNEESQTKRNRTNSSALIKIKAHQENPQNPAVAIEEVGKNMWWTDTTSGYVLPHPTYFPVVQEIVELRKNGRSTAEILDHLNETYAPPPAVSNKKHSKWSRAMVERLFHTRALIGIKEVSVDGVNYELKDYYPRVIDDATFYHLKKNIGARAWNFGDKEEVKPIPLLSGIGLLKCDHCGCAMVKVKGTNKRSDQYRYTCDATRSRRLDCEHPNWSFRGDQLEKAVLQLLADKIWIAEDKANPVPALKVQVDEISRKIDNLIALSAMTGATKELADQITTLNSERETLYNQIKMAEEEMYSVDSQGWEKLAEFDLEDVYNEERLKVRFKIKQALKRIGCSRIDRNKNLFVLEYIDGKTQRVVIENSRGTRKGRIFIDLKTINDRQILESNGLVLHPCLDMLTDKNWKPEEEIPGPLQEFGI

SEQ ID NO: 6456 - protein, 560 aa, synthetic construct
MFSNSLEDFFGPEVDIYARVSSEDQQERETIENQIEYATKYCELNKLTIREWYLDDGITGTIPLRDRPAGAKLIKDAQEGKSKKILIFNMKRLGRVARVTLDAVYELEKHGAKIKSMTEPFDTSTPAGRFILTVLAGQAELDRDTMLETMWHGANRAARKGKWLGGIVPYGYKKNHDGFLEINCDPLPGKEDMSEASVIELLYHLCVNGKMSTIQIADYLNALGIPPSYVKDNRSIKRGRRKEKTAGVWRPARVGNMIKNSTYRGIHVYGKRSNKDRELIERKVPAIISEEMWHQAQIILKANQIEAVKNTKRQYLLRGLIKCGCCGLNYHGTAYRSSPFYVCNGKTAYAGPLMGKCKSRNIPAPWVENLVWEQCVNFINNPGDTVKELVNVDEKVLDHTAAYIDEKELVQKSLLNKDDERQSILELYRKKMISSNDVEIQLTEITNEKKELEDRLRELNILIEGNARKEKRTDDVFQILDGLREVIKEELPFETKRAIVKALVKKIIVHTHFEDGVKRFHNASVHAEFSFDGIKVINGTPVPVVIFPLSMKHKAVPVLH

SEQ ID NO: 6457 - protein, 506 aa, synthetic construct
MRSVITYLRFSSATQGAEGADSTRRQNELFKQWLRKNSDAQVVASFNDEGLSGYKGKHLSGQFGDMLSRIESGEFPEGTILLVEAIDRIGRLEHLETEALMNRIIAHGIEIHTLQDGLIYTRDALSDDLGISIIQRVKSYIAHQESKQKSFRVSEKWKQRAKLALAGKQRLTKMVPGWIDPDTFKLNEHAETVRLIFKLLLDGESLHNIARHLQSNGIKSFSRRKDANGFSVHSVRTILRSETTRGTLPASQRNDRPAIPNYYEAAIDAATFNKAQEILDKNRKGRTPASDNPLTINIFKGLFRCQCGASVHPTGTKNKYAGVYRCNNHLDGRCDVQPLKRKPFDRWMIDNFLGMIDVVSDGETERRLAELQHEVEIVTARIKKATALLLEMDDIDELKIQLKELNQKRTELQTTIDNMRRKASLTDKELPQLKDIDLTTKAGRVECQLILSKHLKGLTLGKDSVIVTLQNDTEITIPTNPLPLNDGTSIFEIADKELLDIDAFRL

SEQ ID NO: 6458 - protein, 507 aa, synthetic construct
MKRVISYIRFSSERQAKGDSLRRQSKMVNDWLKAHPEYYLDQDLSFRDLGVSGFTGKHLKGGLGDFLTAIEKGLVKAGDTLLIESLDRLSRQDIDIASELLRNILRSGVDVVTLSDGEHYTKESLRDPLSLIKSILIMQRAHEESLRKAERIQAAWDAKKEAAKAGIKISRRCPAWLKLNDDRKSFSVIPEKVETVKRCFQLRLEGKSIWEIVRTMNAEGHQTLNQYKAGSFGQTSVQDLLKNRSVIGYFTPKGCEEISGYYPAIIDETTFYKVQQLSYARYGRKPASDKPLSVNLFKGVIRCSECGHALIITGFSDTRSGIYRCPLRNENRCNAKGLSRKQTDSTLLALLSRLDRFDSDMTNTVDTLKLHREHISNNIEKLVQLSLEIEDLSAITSKLKQLKGELSQVDADIEKETQRLKSIDVGCLSDCDLTTKAGRIEAQLIIKSAVKEVVLNTAKRRCKVTFHNGKVIDLPITENPSEDVTEAIQSLSEVTERGLIDVDEVII

SEQ ID NO: 6459 - protein, 507 aa, synthetic construct
MKRAISYIRFSSEKQSRGDSLRRQSKMVTDWLKAHPEYHLDQDLSFRDLGVSGFTGKHLQGGLGDFLTAIEKGLVKAGDTLLIESLDRLSRQDVDQASELLRNILRSGVDVVTLSDGEHYTKESLKDPLALIKSILIMQRSHEESLRKSERIQAAWNRKKELISEGIKISKRCPAWLKLNDDRKSFSVIPEKVETVKRCFQLRLEGKSIWEIVRTLNDEGHQTLNQYKAGKFGQTSVQDLLKNRSVIGYFTPKGCEEIAGYFPSIIPETDFYKVQQLSYSRYGRKPASDKPLSVNLFKGVIRCSECGHALIITGFSDTRSGIYRCPSRNENRCNAKGLSRKQTDGALLALLSRLDRFDSDMTNTLDTLKLHREHISNNIEKLVQLSLEIEDLSAITSKLKQLKGELSQVDADIEKETQRLKSIDVGCLSDCDLTTKAGRIEAQLIIKSAVKEVVLNTAKRRCKVTFHNGKVIDLPITENPSEDVTEAIQSLSEVTERGLIDVDEVIV

SEQ ID NO: 6460 - protein, 547 aa, synthetic construct
MKLLVTYIRWSTKEQDSGDSLRRQTNLIDAFYAKHKDDYYLLPAHRYVDKGKSGFHQQHKNQGSDFRRMFENVMSGVIPEGSLIVVENFDRFSRADIDTAIDDVRQILRKGVSILTLGDGELYDKSALTDPVKLIKHIIIAERAHQESLVKQKRIAQVWNHKTQLARELKKPMGKQAPGWLELSDDGSHYIVDEDKASLVNIIYDKRLSGMSMFAICKWLNEQGYPTINQRKVRISKTKKPDGNWSALSVKHILTSRSVLGYLPAKISTEDRKTVLREEIEGFYPQIVTDSKFYAVQQLLEETGKGKTSSGDHWLYVNILKGLIRCKCGLVMTPTGIRKPVYQGTYRCNGNKESRCSYGTVSRKLLDTQLCSRLFSKLSQLHDEATDTAKLDELQRRLNTVDSELEKLTETLIQLPNITQIQEALRVKQEEKDELIVQLSREKARVKSVSSLDLSGLDMESVEGRTEAQIIIKRLVKEIVVSGNEKLVDIYLHNGNMIRGFPLDGKDDHTLTLEEATDEMQSLDDMLIFGEPVTRIYPAGDMEEVDA

SEQ ID NO: 6461 - protein, 507 aa, synthetic construct
MKRVISYIRFSSEKQAKGDSLRRQSKMVTDWLKAHPEYYLDQDLSFRDLGVSGFTGKHLKGGLGDFLTAIEKGLVKAGDTLLIESLDRLSRQDVDQASELLRNILRSGVDVVTLSDGEHYTRESLKDPLALIKSILIMQRSHEESLRKSERIQAAWNRKKELISEGIKISKRCPAWLKLNDDRKSFSVIPDKVETVKRCFQLRLEGKSIWEIVRTMNAEGHQTLHQHKPGSFGQSSVQDLLKNRSVIGYFTPKGCEEISSYYPSVIDETTFYKVQQLSHSRYGRKPVSDKPLSVNLFKGVIRCSECGHALIITGFSDTRSGIYRCPLRNENRCSAKGLSRKQTDGTLLTLLSRLDRFDSDMTNTIDMLRLHREHISSNIEKLVQLSLEIEDLSAITNKLKQLKNELSQVDADIEKETQRLKSIDVGCLSDCDLTTKAGRIEAQLIIKSAVKEVVLNTAKRRCKVTFHNGRAITLPITENPSEDVTEAIQSLSEVTERGLLDVDEVII

SEQ ID NO: 6462 - protein, 547 aa, synthetic construct
MKLLVTYIRWSTKEQDSGDSLRRQTNLIDAFYSKHKNDYYLLPAHRYVDKGKSGFHQQHKAQGSDFRRMFENVMSGAIPEGSLIVVENFDRFSRADIDTAIDDVRQILRKGVSILTLGDGELYDKSALTDPVKLIKHIIIAERAHQESLVKQKRIAQVWNHKTQLARELKKPMGKQAPGWLELSEDGSHYIVDEDKASLVNIIYDKRLSGMSMFAICKWLNEQGYPTINQRKVRISKTKKPDGNWSALSVKHILTSRSVLGYLPAKISTEDRKTVLREEIEGFYPQIVTDSKFYAVQQLLEETGKGKTSSGEHWLYVNILKGLIRCKCGLVMTPTGIRKPVYQGTYRCNGNKESRCSYGTVSRKLLDTQLCSRLFSKLSQLHDEATDTAKLDELQRRLNTVDSELEKLTETLIQLPNITQIQEALRVKQGEKDELIVQLSREKARVKSVSSLNLSGLDMESVEGRTEAQIIIKRLVKEIVVSGNEKLVDIYLHNGNMIRGFPLDGKDDHTLTLEEATDEMQSLDDMLIFGEPVTRIYPAGDMEEVDA

SEQ ID NO: 6463 - protein, 560 aa, synthetic construct
MTKLYSYIRFSSMRQGEGSSYERQIKMAKEIADRYDLELVNDYQDLGVSAFKGANSKTGALSRFLDEIGRSIPVGSWLFIENLDRLSRQDIISAQELFLSIIRRGITIVTGMDNKIYSIETVTANPMDLMFSILLFIRGNEESQTKRNRTNSSALLKIKAHQQNPQSPAVAIEEIGKNMWWTDTTSGYVLPHPVYFPILQKIVKMKQEGHSTGSVLDYLNEHHEPPAPTSNKQHRKWSIAMVSRLFKTKALIGVKEVNVDGVQYELKDYYPRVLSDSEYYFLKNNLIKKAWSFGHAQEKTIPLLSGIGLLKCAHCGSPMVKRKAANGKVEQYRYTCDGAGSGRTDCLYPNWGFRASSLEGAVLQLLADKVWIAEDKANPIPEIQVQIDEISRKIDNLINLSAMTGATKELANQITDLNTQREALHEEIRLFEREMYSVDSQGWEKLAQFDLSDVQNEERLQIRLKIKGALRSIECARIDRNKNLFTLVYLDGLRQRIVIENNRGIRKGQIFVDLKTINDRQILESAGMVLHDHLDILIDEKAFYDGLPKEEDGPLSKFGI

SEQ ID NO: 6464 - protein, 481 aa, synthetic construct
MITTNKVAIYVRVSTTNQVEEGYSIDEQKDKLSSYCDIKDWNVYKVYTDGGFSGSNTDRPALESLIKDAKKRKFDTVLVYKLDRLSRSQKDTLHLIEDVFIKNGIEFLSLQENFDTSTPFGKAMIGLLSVFAQLEREQIKERMQLGKLGRAKSGKSMMWAKTSYGYDYHKETGTVTINPAQALTIKFIFESYLRGRSITKLRDDLNEKYPKHVPWSYRAVRTILDNPVYCGFNQYKGEIYPGNHEPIISKEEYDKTQSELKIRQRTATENVNPRPFQAKYILSGIAQCGYCGAPLKIMLGVKRKDGSRLKKYECHQRHPRTLRGVTTYNDNKKCDSGFYYKDKLEASVLKEISKLQDDADYLDKIFSGDNAETIDRESYKKQIEELSKKLSRLNDLYIDDRITLEELQSKSAEFISMRATLETELENDPALRKNKRKADMRKLLNAEKVFSMDYESQKVLVRRLINKVKVTAEDIVINWKI

SEQ ID NO: 6465 - protein, 506 aa, synthetic construct
MRSVITYLRYSSAIQGAEGADSTRRQNDLFRQWLKKNIDAQVVASFSDEGLSGYKGKHLSGQFGDMLSRIESGEFPEGTILLVESIDRIGRLEHLETEALMNRIIAHGIEIHTLQDGLIYTRDALSDDLGISIIQRVKSYVAHQESKQKSFRVSQKWKQRAKLALAGEQRLTRNVPGWIDPDTFKCNEHAETVRLIFKLLLDGESLHNIARHLQSNDIKSFSRRKDANGFSVHSVRTVLRSESVIGTLPASQRNDRPAIPNYYEATIDAATFNKAQEILDKNRKGRTPASDNPLTINIFKGLFRCQCGASVHPTGTKNKYAGVYRCNNHLDGRCDVPPLKRKPFDRWMIDNFLGMIDVGNDGESERKIAALQHEVEIVTARIKKATALLLEMDDITELKAQVKGLNQKRTEIQTTIDTLKRKTSLTDKELPQLKDIDLTTKAGRVECQLILSKHLKGLTLGKDSVTVTLQNDTEITIPTNPLPLNDGSPIFEIADKELLDIDAYQL

SEQ ID NO: 6466 - protein, 506 aa, synthetic construct
MRSVITYLRYSSAIQGAEGADSTRRQKDLFRQWLKKNIDAQVVASFSDEGLSGYKGKHLSGQFGDMLSRIESGEFPEGTILLVESIDRIGRLEHLETEALMNRIIAHGIEIHTLQDGLIYTRDALSDDLGISIIQRVKSYVAHQESKQKSFRVSQKWKQRAKLALAGEQRLTRNVPGWIDPDTFKCNEHAETVRLIFKLLLDGESLHNIARHLQSNDIKSFSRRKDANGFSVHSVRTVLRSESVIGTLPASQRNDRPAIPNYYEATIDAATFNKAQEILDKNRKGRTPASDNPLTINIFKGLFRCQCGASVHPTGTKNKYAGVYRCNNHLDGRCDVPPLKRKPFDRWMIDNFLGMIDVGNDGESERKIAALQHEVEIVTARIKKATALLLEMDDITELKAQVKGLNQKRTEIQTTIDTLKRKTSLTDKELPQLKDIDLTTKAGRVECQLILSKHLKGLTLGKDSVTVTLQNDTEITIPTNPLPLNDGSPIFEIADKELLDIDAYQL

SEQ ID NO: 6467 - protein, 515 aa, synthetic construct
MKPCFGYIRVSTQKQGEGVSLEAQKDAITAFASQHNLTVTAWFEEKETAAKRGRPIFNQVLRKLKRGEAQGLIMHKIDRSARNLRDWALVSELPSLGIDIFFATESLDFKSQGGRLAANLQAVIAEHYVHNLREECIKGLNGRLKQGLYPFRAPIGYLDNGRGNPKTPCPQKAPLIKEAFRLYSSGQYSMRSLMPVLEDLGLRNLAGKPISQHGIETILGNPFYTGLIVIKRTGAVYQGIHEPIIDTQMFQRVQDVKAGKAGKKITRHNHLYRGLFRCGHCDGPMTPELQKGRVYYRCQVSSCPTMTIREDRLANAISTAFTRYEISDDQAAQLQKDWMAWIDSDERDEGIRSVELRMDQAMARLSRLTDLLVDNAISQDDFFERKRTLKLELAALKEEQGKSTQFHPTGAQMKKFLELMKNLAELHRSAKPAEKRWMIENCFSNRAVIGRELCLKPYSWLQSRNFSELTPLVNNNGPVIELIEHFDRSEPIPEKSEQWRRNLKNQRPDNLKNAA

SEQ ID NO: 6468 - protein, 520 aa, synthetic construct
MAEKNITVIPARKRVGSTAAKEKVKKLRVAAYCRVSTETEEQNSSYEVQVAHYTEFIKKNAEWEFAGIFADDGISGTNTKKREEFNRMIDECMEGNIDLVITKSISRFARNTLDCLKYIRQLKDKNIAVFFEKENINTMDAKGEVLLTIMASLAQQESQSLSQNVKLGLQYRYQQGKVQVNHNRFMGYSKDEDGNLIIVPEEAEIIKRIYREYLEGKSLAGIGRDLEKDDILTAAGKPRWRPETIKKILLNEKYIGDALLQKTFTVDFLTKKRVKNEGHVPQYYVENSHEAIIPKELFLQAQEELHRRNNIYTGADKNKRLYSSKYALSTITFCGDCGDIYRRVYWNIRGRKEFVWRCVTRIEQGPETCKNRTVKEGDLYNAVMTTINKLLAGGDNMIRTLEENIHAVIGDTTEYKISEINTLLEEKQKELINLANKGKDYEPLADEIDNLRGKRQTLLVEDASLSGENERINELIEFIRNNKYRTQRYDGALVRKLIQNVTVYDDHFVICFKSGIEVEV

SEQ ID NO: 6469 - protein, 587 aa, synthetic construct
MKKQKTPSCSPRTAVAYARYSSAGQRDVSIDQQLSDIRAFALREGYTIVHEYADHAKSGFKDTAARTSFQSMIAAAETGSYDTIIAWKVDRFGRNREDSAIYKGKLRRFGVRVLYAMEPIPEGSAGVLLEGMLEATAEWYSRQLSENVTRGMTDNAMKCLYNGTKVLGYTRGSDDKYAIDPDGASIVRYIFDKYASGVSAVRICADLNSRGLSSSRGKRWKPETIIRVISNERYTGTYIWGDIRIPDGMPAIVDNVLFDEAQRMKRKTARHVDQGAVDYLLTSKAFCGHCGAAMIGDSGTSKSGARHLYYSCQAHKARKGCDKKSVRKDWLEDTVIDFVLDHVLSDEHIDQTADAVLALQQEEMKHSPLAAMEAEHAETLKKIRNINEAIAAGIWNSSTSAMLKDLEDNAESIRVSIETLKYSQSQLLDKDRIIFFLHQFTQGDRSDPALCRHIIETFINAVYLYDDHLKIITNNIEGNQRVPLEALPPCSDNNKNGVQESRKRKVSGFFICSAVCFNKKTAAIKAAALFIHAYAWAGAPTGQVSAQAPHSMQTSGLISYLPSPSLMAETGHSAAHAPQLMHSSEIL

SEQ ID NO: 6470 - protein, 490 aa, synthetic construct
MPRAIGYVRVSTNKQLDNTSIEKQKAEIKRYCVQNNLTLVKIYDEGARSGENMKDRPVFKEMYHHAFDNTEKIDYVVVFKADRISRDNLDALYIFKKMTQADKHLISIADNVNTRDPQAKLLYHIMALVAELEKDLISFRTTTGMEKNAEDGKFNGGKIYGYHSENKELKLVHEEAKVVQYIFEKYTYDQWGYRKIASNLNDQGIKTKNDKHWTITAIKTILNNRIYNGMTKWKGQYKKGKHVKIIDDELWHQTQKMLKLRSSEPIKVHPGNYPLSGLMKCPQCGSPMVQGNSSPKYKYYQCSKNKSGGKSVCSSNLVKKEYAEEFVYTHLFATIKNLDIATPVFSTTNSSLKSEVEPLDEKLKSMKKELKDITLEKKDLIKMKRKGTINPLTFEQEMADTQKEEEQLMQFVKVLERQIEQRKKPNLNESILITFEKFELFFHMMSDEDKKTVLHSFLKDIQINQGKRTKDRTIKKIIYDFSLNNISNIA

SEQ ID NO: 6471 - protein, 569 aa, synthetic construct
MSEIKRVAIYCRVSTEEQASEGYSISAQLQTLRQYTQLYGWQIAEEYVDEGISGKNIKGRPAMTRLVADVEKDKFQAVLVWKISRLSRNMLDTLTLLDKFEDYGVKFISYSENFDTGSPIGRLVVQLMASIAEMERNTLSENVKLGMKQRALEGSWNGGVVFGYDTIEKELVINQDEAKVVQLIYQLYANGKGLKAIANHLNKAGYRTKRNRHFYINGVATILDNVIYNGKISWLKVENWDTKRRRGKNPNPILVEGQHKAIVSDELWSVVQARRKSKSFKQRQSHEPFLLSSLLRCPDCGQGMVPSITTYTRKDGTKRKHRYYVCGDFHNKGSSACKANSIKAYESEDAVINKIDNFLSNKKRLKKTLQDINSNSVDSISQLNKELEQIEDQLPEIALLQNRYLEAFEKNTLPTAILQERLQKVANEKGELEQRKNEITIQLGSTETKIIQPEIIEKLLERFLLIYKETSRDNKKHLLQLLINKITIIQLKERSRTLNKIELDFDFTEVNISKTFTLIHKLYRETDKEDGFSQPLPVSDNKIPPYLQLFLPLFMVRFTAINTKYQSSF

SEQ ID NO: 6472 - protein, 690 aa, synthetic construct
MANPDLLPPSVLKRKAVVYVRQSSPAQVQTNLESKRRQYELVDAAKRRGFLRVEVIDDDLGRSASGTTARPGFERLVASLCAGEIGAVLCLDASRLARNGRDWHHLLELCGLVEARVIDLDGVYDPGRPNDRLLLGMKGSMSEFELGVLRTRMLDAARSKARRGELRISVPIGYVWHREIGLGFDPDLRVQEAIRLVFARFRELGSARQVLLSLAAEGVCFPRPSDGKRLISFDWTPIRYRNVISVLKNPFYAGAYVYGKSQHRTEIVEGRARKSYGHGKPLEEWEVLLKDHHEAYVDWDEFERNQTLLAANAYGRVGGAKSGRGGRALLVGVLNCARCGRRLTVYYRGRSPSQAGYRCDRPNQMLGLPRCLGFGSSRVDEAVAGELLRAVEPMAIEAALEAERRHMEHQTERRRMAELDLQKARYEATLAERRYAACDPDNRLIAAQLEKNWEAALQRVEACEARIASVSAPVPAPAAPDFAGLADDLQAAWNAPGVTTRARQRLLRTLIVNIIADVDEAAREVILTIHWRGGQHSQLRLIKPQTGEHGCRTPEEAMAVIRSMATRWSDADIAAQLNRMGMRTGQGKSWTGHRVSSLRRVHGIRAYRSAEKDGEWLTQYEAAAALGISRHRLVRLINAGLIVAEQVVPGAPYQIRASDLREQRVLTAIGRKGEPCRLASEDQLSMFPDT

SEQ ID NO: 6473 - protein, 507 aa, synthetic construct
MKRAISYIRFSSEKQSRGDSLRRQSKMVNDWLKAHPEYYLDQDLSFRDLGVSGFTGKHLKGGLGDFLTAIEKGLVKAGDTLLIESLDRLSRQDVDQASELLRNILRSGVDVVTLSDGEHYTSESLKDPLALIKSILIMQRAHEESLRKSERIQAAWDAKKEAAKAGIKVSRRCPAWLRLNDDRKSFSVIPEKVETVKRCFQLRLEGKSIWEIVRTLNAEGHRSMNQYKPGKFGQTSVQDLLKNRSVIGYFTPKGCEEISGYFPPIIPETDFYKVQQLSYSRYGKRSVSDKPLSVNLFKGVIRCSECGHALIITGFSDTRNGIYRCPLRNENRCSAKGLSRKQTDGTLLTLLSRLDRFDSNTTNTIDMLRLHREHISNNIEKLVQLSLEIEDLSAITIKLKQLKGELSQVDADIEKETQRLKSIDAGCLSDCDLTTKAGRIEAQLIIKSAVKEVVLNTAKRRCKVTFHNGRAITLPITENPSEDVTEAIQSLSEVTERGLIDVDVVEI

SEQ ID NO: 6474 - protein, 547 aa, synthetic construct
MKLLATYIRWSTREQDSGDSLRRQTNLIDAFYAKHKDDYYLLPAHRYVDKGKSGFHQQHKAQGSDFRRMFENVMSGAIPEGSLIVVENFDRFSRADIDTAIDDVRQILRKGVSILTLGDGELYDKSALTDPVKLIKHIIIAERAHQESLVKQKRIAQVWNHKTQLARELKKPMGKQAPGWLELSEDGSHYIVDEDKASLVNIIYDKRLSGMSMFAICKWLNEQGYPTINQRKVRISKTKKPDGNWSALSVKHILTSRSVLGYLPAKISSEDRKTVLREEIEGFYPQIVTDSKFYAVQQLLEETGKGKTSSGEHWLYVNILKGLIRCRCGLVMTPTGIRKPVYQGTYRCNGNKESRCNYGTVSRKLLDTQLCSRLFSKLSQLHDEATDTAKLDELQRRLNTVDSELEKLTETLIQLPNITQIQEALRVKQGEKDELIVQLSREKARVKSVSSLDLSGLDMESVEGRTEAQIIIKRLVKEIVVSGNEKLVDIYLHNGNMIRGFPLDGKDDHTLTLEEATDEMQSLDDMLIFGEPVTRIYPAGDMEEVDA

SEQ ID NO: 6475 - protein, 597 aa, synthetic construct
MKSNNVEIIKADSLVRRRGVNVERHLKRVAAYCRVSSDSEDQKNSYESQVRHYKDYISQRSDWELAGIYADEGISGTQVGKRQDFQRLINDCVNGEIDYIVTKAIARFARNTLDTLKYVRMLKDMQIGVYFEEENIDTLTMDGELLLTILSSVAQQEVENTSAHVKKGLKMKMQRGELIGFQGCLGYDYDVETKQLSINKKEAKIVRYIFERYLEGIGGKVIARELDELGYKSPRGLDHWNDTTVLGIIKNEKYKGDILMGKTFTVDPISKRRLSNFGEEDKYYIKDNHEPIISKEDFEKAQEIRLRRAGNKKTVANVNGKRERYSKMYAFSSMLECGFCGSILSRRSWHCRSDYRKVVWHCVTSIKKGKKFCKHSKGLEELAIEGAFMEAYRQLYHSNENLMTDLLETIESELNDNSLNKELKRITNKLRTLLKKEENLVNLRLEGKISDTIYNEKYNEISSEKEFLAEEKVNIETTLKSEIDVKKRLTEFKHLLSSQKMLTEFDRAVFESIVEKIIVGGVNSDGEIDPAMLTIIFKTGETQNKDGKQFKSKRKNAKLETDKLCPQNSDEDKKLYSQGTDYTHRVCRSAHSCGTVI

SEQ ID NO: 6476 - protein, 456 aa, synthetic construct
MIVAYVRQSTKKQQSIPTQKELIRKCAAKYDIDVGKINFYSDIGSGRNVNRTNYQRLIQEIKNNQVTTLLIYRISRIGRNLKNALDFVELLQKYQVKLVSVSDGYFDLSKAFDRMKLQLFLSFAENELENIRDNVSKAAREKARQGLLITTNAPFGYRYEDGNFFVHPEESKTVKRIFQLYCDGYGYKAISKLISEDTSYISLTNVRVRNILLNKIYTGIVPSKYGEYQGHHQAIITQEIFEEAERIRLSKGIKRKPINTLLKRKIHCPYCNARLHSHKVKKKNKTYTMYVCRNHAVDYSGLNERCPFTSINADHIEDQVLYALKTFLKDKECAERIEQAVNKVIRIHKKDQRKISQTNVKLINELAEGKISAQEFQSNYVSDEGSVQASKNFSRQKLNNIVSTHVSFLKLQDINHIIEKVIIDEENNLTGLFITDYPLNIVPMKTETKQQHQAIG

SEQ ID NO: 6477 - protein, 449 aa, synthetic construct
MKQAIGYLRQSTIKQQSLSAQKQKIKSLAEKHNIQNITFYSDKQSGRTDKRNGYQQIITLIQQGHCDVLCCYRLNRLHRNLKNALKLMKLCQKYHVHILSVHDGYFDMNKSFDRLKLNIFISLAELESDNISEQVKNGLREKARQGKLITTHAPFGYHYHDGTFTINKDEAPTVKAIFDDYVEGYGYKKISQRLEKSNHLINRKPFQVRCIILNPNYCGRVLNQYGQYDNMFPPIVSVSLYEYAQKVRNQRQVNRRSSDNQLKQKIKCPCCGSTLTNLTIRKKKHALRYYVCPRNMNASRFVCDFKGINAQMLETRVLTTCKDFFQNQQLYSKINQTIQQQLKNQRALETKHTLTQEQLIEKLAQGTITADTFREKSLLLQQQSKTNSSISSTQIQRAFQNVIQQCFTLNMLYPYIDEIHITENKTLTGIYFKNEPLNIVNQDMQSSIA

SEQ ID NO: 6478 - protein, 542 aa, synthetic construct
MTKKRAAIYTRVSSALQRDNFSIAGQKKLLEEVCQRNGWEIYEVYTDNGLTGKNMNRPALLKMNEDAKNGKFDIILIYRLNRLARNTKNVIDMVDFYNKYNVEVYSDTERFDTSTASGRLMLQILASMAEYDRNQILENMFAGLVSRANSGYYNGGQVLGYQQVPGNKRMLAIVEQEALIVKRIFEEYASGKGYRAIANALNKDGYRTKKNNTFDTNAVKYILTNIVYIGKIRYLRYTSWNEKRRRGFNPNPIIADGKHTPIIDQDLWDKVQIRMEKASKNPMLNGKGENLLSGIVRCSECGAAHAASTTTNTLKSGEKKRIRYYSCSQFRNKGASVCSANSIRADVAEAYVFNRIQEVIFNDKVLQQVLENVNSSLEAKPTEMKQRLVNKKQQLEETQVKLNNLNIALSTSPDLIHTLKGTIDEYASTIEALKATIAEMEAHKEDNIKQLTIEEIKPLLQAIFKDMDRLDKKQLKALYLSVVDSIHFKKCKEPGKKHDFFITLKINEDVLKEVYNGIEPEEALLSASSSLFTEHETYYLRI

SEQ ID NO: 6479 - protein, 517 aa, synthetic construct
MTKQKVAVYCRVSTEEQASGFSLESQEAILIEYAEKRGFEIYDVYIDDGYSGKDFNRPEIQRLMRDARQDKFDIVLAWKVDRISRSNRDVLTMIDLELRPRNMKLLISTCDIDSSTTIGYMFISLLGTFAEYERTVIIERVEMGMSKRASKGKWCGGKILGYKNVDGCLEIHQEEKRTVTQIFEMRAEGLGYKAIASRLNELGHTTKNNKAFQINTVKTILSNPTYIGKIRWGQHRQWAKKRRNGKSNNEITVDGIHEPIISQELWEKAVEVGKLQNNKAIAPSNNKGQFLLSGILRCPQCGAGTVMTKRKMRNGDGHHLYYMCQAYHSKGLTACRTNLIDKHLIEEQVLKVIKGVLNNQALVDEILNKAKSESNYDTSELNLQLSVQVKELDRLINRKSETNQSFIVGDIEATAYNEITMALVQKIEGIERSIHNLNVEIEKKSSKYHITEAMIADTLQNFETALEHADNEEKKQLIKALIKKIEVEPDRKHLKSIIFWFSEDDALPLNEARRTLS

SEQ ID NO: 6480 - protein, 402 aa, synthetic construct
MRVAIYARFSTDKQKETSVTDQISVCVRRAESMGDCEIVAHHSDEGVSGKTPVEARAGGKKLMADAMAGRFDMLIVESLDRLSRDQVEQERIMRRLEFRGLRVIGVSDGYDSDSSSRKVQRTVRGLVNELYIDDLRAKTLRGQTGQVERGFVAGGRSYGYELVRTEKGTDYRVDENEAQWVRFIFEKFAAGWSTFRICDELNRRNIPSPRKSTWMRSALYGSPRKGSGILNNSAYIGQYIWNRSQWLKDPDTGKRIRQDRPESEWKVEQRDHYRIVSDEVWQAVRNRMGKDRLNGGTTGIGHPLRTLFGGYLRCSQCGGAMIAINALYYGCATRKERGVHACRGMNISRPQTDEQLLNVLRSELLSENAQADIDAAARRYFAAEMGGCVGIDSAGAGEDRRD

SEQ ID NO: 6481 - protein, 532 aa, synthetic construct
MRVAIYARFSTDKQKETSVTDQISVCVRRAESLGDFEIVARHSDEGVSGKTPVEARVGGKKLMADAMAGRFDMLIVESLDRLSRDQVEQERIMRRLEFRGLRVIGVCDGYDSDSSSRKVQRTVRGLVNELYIDDLRAKTLRGQTGQVERGFVAGGRSYGYELVRTEKGTDYRVDENEAKWVRFIFEKFAAGWSTFRICDELNRRNVPSPRKSTWMRSALYGSPRKGSGILNNSAYIGRYIWNRSQWLKDPDTGKRIRQDRPESEWKVVQRDHYRIVSDEVWQAVRNRMGKDRLNGGTSGIGHPLRTLFGGYLRCAQCGGAMIAINALYYGCATRKERGVHACRGMYISRTQTDEQLLNVLRSELLSDKAQADIDAAARRYFASEMGDASESIRQVRAKIAEREKEIENLTQALASMGVSQAIMDRLKKAESEKAELSQALARTKITAEHFDSIIVKAKAKTIALKDALTREGTDEARQIIGTLMGRIEVERKDDGFFASFDDVSEQLMLYAAGNSRGPVVAGVGFEPTTFGL

SEQ ID NO: 6482 - protein, 559 aa, synthetic construct
MKTKLYSYIRFSSMRQNDGSSYERQIRMAREVAAKYDLELVNDYQDLGVSAFKGANSKTGALSRFLDAIGRSVPVGSWLFIENLDRLSRADIVSAQELFLSIIRRGITIVTGMDNKIYSLDTVTANPMDLMFSILLFIRGNEESQTKRNRTNSSALIKIKAHQENPQNPAVAIEEVGKNMWWADTTSGYVLPHPTYFPVVQEIVELRKNGRSTAEILDHLNETYTPPPAVSNKKHSKWSRAMVERLFHTRALIGIKEVSVDGVNYELKDYYPRVIDDATFYHLKKNIGARAWNFGDKEEVKPIPLLSGIGLLKCDHCGCAMVKVKGTNKRSDQYRYTCDATRSRRLDCEHPNWSFRGDQLEKAVLQLLADKIWIAEDKANPVPALKVQIDEISRKIDNLITLSAMTGATKELADQITTLNSERETLYNQIKMAEEEMYSVDSQGWEKLAEFDLEDVYNEERLKVRFKIKQALKRIGCSRIDRNKNLFVLEYIDGKTQRVVIENSRGTRKGQIFVDLKTINDRQILESNGLVLHPCLDMLTDKDWKPEEEIPGPLQEFGI

SEQ ID NO: 6483 - protein, 507 aa, synthetic construct
MKRVISYIRFSSEKQAKGDSLRRQSKMVTDWLKAHPEYYLDESLTFRDLGVSGFTGKHLKGGLGDFLTAIEKGLVKAGDTLLIESLDRLSRQAVDRASELLRNILRSGVDVVTLSDGEHYTSESLKDPLALIKSILIMQRAHEESLRKSERIQAAWDAKKEAAKAGIKVSKRCPAWLKLNDDRKSFSVIPEKVATVKRCFQLRLEGKSIWEIVRTLNAEGHQTLNQYKAGSFGQSSVQDLLKNRSVIGYFTPKGCEEISGYYPEVIDETTFYKVQQLSYSRYGRKPASDKPLSVNLFKGVIRCSECGHALIITGFSDTRSGIYRCPLRNENRCSAKGLSRKQTDGTLLALLSRLDRFDSDTTNTIDTLKLHREHISSNIEKLVQLSLEIEDLSAITSKLKQLKGELSQVDADIEKETQRLKSIDVGCLSDCDLTTKAGRIEAQLIIKSAVKEVVLNTAKRRCKVTFHNGKSITLPITENPSEDVTEAIQSLSEVTERGLIDVDVVEI

SEQ ID NO: 6484 - protein, 481 aa, synthetic construct
MKTMNKVAIYVRVSTTNQVEEGYSIDEQKDKLSSYCDIKDWNVYKVYTDGGFSGSNTDRPALESLIKDAKKRKFDTVLVYKLDRLSRSQKDTLHLIEDVFIKNGIEFLSLQENFDTSTPFGKAMIGLLSVFAQLEREQIKERMQLGKLGRAKSGKSMMWAKTSYGYDYHKETGTVTINPAQALTIKFIFESYLRGRSITKLRDDLNEKYPKHVPWSYRAVRTILDNPVYCGFNQYKGEIYPGNHEPIISKEEYDKTQSELKIRQRTAAENVNPRPFQAKYILSGIAQCGYCGAPLKIMLGVKRKDGSRLKKYECHQRHPRTLRGVTTYNDNKKCDSGFYYKDKLEAYVLKEISKLQDDADYLDKIFSGDNAETIDRESYKKQIEELSKKLSRLNDLYIDDRITLEELQSKSAEFISMRGTLETELENDPALRKNKRKADMRKLLNAEKVFSMDYENQKVLVRRLINKVKVTAEDIVINWKI

SEQ ID NO: 6485 - protein, 515 aa, synthetic construct
MKRAVIYARYSTDNQSHETIEVQVERCVEYAKQKGFNIIEVLADEAVSGMKSNRPELQKLFNMAEMGSFEVVLIYDQSRFSRDIVDWFSFRRTMQNHDIQIISVTQPYVGGDLNDTAVFATEGINALVNQIHVLQTRQKVVDAMNRIARQGLVCGGSVLLGYDVKDKRYVINEYEAEAVRLIFTLYASGKSYKYLIQTLNEKGYKTKAGRTFGSNSINALLQNERYIGIYVYNKMLPAKNGKRNSHKANPAAIKIPGAVPQIISNDLWDKVQARLRSNKVNARNKAKVDYLLSGKLFCGECGMAMTGTRSNGKYYYYDCSGKKRLKNCDKAPIQKDRVEQMVINYVKETLVTNKQRHEIAQKLFEAQGKLLGSAAGVRIEIEKRIKEIDHQLENINNAIAQGIFSGSTMDKLTELETEQRKLYTQLAATDKTEVSAHKSIDDILQILDYIANVPVDDLEGKQTLLAFVYRVYVYDDKIRIITNPLDENTDNIKQEDLPFSEGVASPAPKENPHES

SEQ ID NO: 6486 - protein, 559 aa, synthetic construct
MKTKLYSYIRFSSMRQSDGSSYERQIRMAREIAAKYDLELVNDYQDLGVSAFKGANSKTGALSRFLDAIGRSVPVGSWLFIENLDRLSRADIVSAQELFLSIIRRGITIVTGMDNKIYSLDTVTANPMDLMFSILLFIRGNEESQTKRNRTNSSALIKIKAHQENPQNPAVAIEEVGKNMWWTDTTSGYVLPHPVYFPVVQEIVELRKNGRSTAEILDHLNETYAPPPAVSNKKHSKWSRAMVERLFHTRALIGIKEVSVDGVNYELKDYYPRVIDDATFYHLKKNIGARAWNFGDKEEVKPIPLLSGIGLLKCDHCGCAMVKVKGTNKRSDQYRYTCDATRSRRLDCEHPNWSFRGDQLEKAVLQLLADKIWIAEDKANPVPALKVQVDEISRKIDNLIALSAMTGATKELADQITTLNSERETLYNQIKMAEEEMYSVDSQGWEKLAEFDLEDVYNEERIKVRFKIKQALKRIGCRRIDRNKNLFVLEYIDGKTQRVVIENSRGTRKGRIFIDLKTINDRQILESNGLVLHPCLDMLTDKNWKPEEEIPGPLQEFGI

SEQ ID NO: 6487 - protein, 413 aa, synthetic construct
MSVKKIRVNRQKHRKRVCAYIRVSTTNGSQLDSLENQKQYFENLYSNRDDIDFMGVYHDRGISGSKDNRPNFQAMIEDCRRGKIDVIHTKSIARFARNTVTVLEISRELKAIGVDIFFEEQNIHTLSSEGEVMLSVLASIAEDELRSMSGNQRWAFQKKFQRGELVINTKRFLGYDVDENGELIINPDEALIVKQIFALYLEGYGTHRIAKQLNEKGVATVTGAKWHDTTIRQMLSNEKYKGSVILQKYFHDGVNGPKKLNKGELEQYLIEDNHEAIISKEEWQAVQEKLNSRIWQQGRNKTYKFSGLLKCQHCGSTLKRQVSYKKKIVWCCSKYIKEGKVACQGMRVPEVDISNWTITSPVTVIERDRDGEKYYSYSSQESSDQRFSSGQEENQGSRILSSVHRPRRTAIKL

SEQ ID NO: 6488 - protein, 541 aa, synthetic construct
MPKAISYIRFSTKIQSVGDSTKRQSKYINDWLKRNPDYYLDESLRFQDLGISGFSGANAKSGAFGEFLAAVESGYIEAGSVLLVESLDRVSRQDIDTAGEQLRKILRSGVEVVTLVDNEWYTKESLKDSLSMIKAMLVMERAHEESAMKSTRLRSMWAGKRERAANGEIMSKRCAAWLKVSEDRSHFEFIHENVKAVQRVFQLRLEGLSHIKIAKKMNDEGFYTLNQHKSIKGGWSQSSVTELLSNRSVIGFKVPSKSMAVKGVSEIPNYYPSIITDEQFYAVQQLKQGSGRKPSSDLPLLTNLFKGVLRCSECGFIVVVAGVSAKRSGIYKCSMKSEGRCNSVGFSRLQTDRALVQGLLYNTNRLALNRDNGSAIGSLQSELEQLQKQRERLIKLAMLADDTESMAKDLKALNSQIKDAEKAVSEVHQREKSSQLETISHLDLTVKKDRVEAQIIIKRIVKEIRINTAGKKCDVLLHNGLKLLNFPLDKVVDGAQWLEILPLIDGDEFDFEGFTTKPRHIALEEAPEWVKEMEEQPSQPL

SEQ ID NO: 6489 - protein, 558 aa, synthetic construct
MLQQSNNTITSIYPIGNQTEELTALYCRLSQDDKQEGDSNSIINQKKILKRYAIEHGYQPYVFFVDDGFSGTNFNRPDFQRMIAEVEAGRIKRVIVKDMSRLGRDYLQVGMYTEIMFPNLDVHFIAVNDGVDSHVGENEFTPFRNIINEWYAKDTSKKIRAVKRSKGMAGEHIGSHAPYGYMKNPDNKKEWLIDEEAAEVVREIFRLCVNGYGPTRIANILTERKILCPTYYALEHGEKPRTVLPPDKYLWSATVVSHILERMDYLGHTVNFKTHVKSYKNRKKIDNSPEQWRIFENTHEAIIDKETFEIVQKIRSGKRRPTKMGDMPMFSGLLYCADCGSKMTFHRQMAQSAEKHNFVCSNYRHNSKSCTMHYIRNVVVEQIVLENLKEVIRYVSDYEDEFVQMVMDTDMRQRNKELSQKKKRLTEIHSRIQELDKIFQRIYEDNISGKLSDERFMKLSKGYEEEQHTLQKEQTSLEKELQKEEKQSVDVKQFLSVVRKYTNLTELTPEIVHEFIDKIIVHAPDKSSGKRLQEIEIIYNHIGVFDHSKVTLWKGKAV

SEQ ID NO: 6490 - protein, 559 aa, synthetic construct
MKTKLYSYIRFSSMRQNDGSSYERQIRMAREVAAKYDLELVNDYQDLGVSAFKGANSKTGALSRFLDAIGRSVPVGSWLFIENLDRLSRADIVSAQELFLSIIRRGITIVTGMDNKIYSLDTVTANPMDLMFSILLFIRGNEESQTKRNRTNSSALIKIKAHQENPQNPAVAIEEVGKNMWWTDTTSGYVLPHPVFFPIVQEVVELRKNGRSTAEILDHLNETYTPPPAVSNKKHSKWSRAMVERLFHTRALIGIKEVSVDGVNYELNNYYPRVIDDATFYHLKKNIGARAWNFGDKEEVKPIPLLSGIGLLKCDHCGCAMVKVKGTNKRSDQYRYTCDATRSRRLDCEHPNWSFRGDQLEKAVLQLLADKIWIAEDKANPVPALKVQIDEISRKIDNLIALSAMTGATKELADQITALNSERETLYNQIKMAEEEMYSVDSQGWEKLAEFDLEDVYNEERLKVRFKIKQALKRIGCSRIDRNKNLFVLEYIDGKTQRVVIENSRGTRKGRIFIDLKTINDRQILESNGLVLHPCLDMLTDKNWKPEEEQAGPLQEFGI

SEQ ID NO: 6491 - protein, 354 aa, synthetic construct
MLRVALYIRVSTEEQALNGDSIRTQIEALEQYSKENDFNIVGKYIDEGCSATNLKRPNLQRLLRDVEKDKVDLVLMTKIDRLSRGVKNYYKIMETFEKHKCDWKTILENYDSSTAAGRLHINIMLSVAENEAAQTSERIKFVFQDKLRRKEVISGTIPIGYKIENKHLVIDKEKKYIVKAIFDEYEKSGSVRTLIETINNLHGELYSYNKIKNILRNELYIGIYNKRGFYVEDYCEPIISKKQFKQIQRILEKNKKTTPNKNIHYHIFSGLLKCKECGYTLKGNSSNVGEKLYLSYRCSTFYLNKNCVHNVTHNEKHIENYLLTNLKPQLHKHMVKLEAQNEKIRQNKKSNKKR

SEQ ID NO: 6492 - protein, 533 aa, synthetic construct
MLKQQANNKEKVALYSRLSRYDGLDKESNSIANQREMLKRYAKENKFYVYDEYIDDGFSGTTFNRPALNRMFEDIEAGKVNVVLVKDMSRLGRNNALFMYYVEEVFPDLDVRFIAINDMVDTAQDDNEIMPFKSVLNEYYARDISKKIRSSIRTTALTGGFTGAFAPYGYLVDPENKKKLIVDPETAPIVKRIFELSQQGTSTHQIARILCKDGILVPRAYRAKKKGILEQSKGFTFPTDWVGKNVKMILENQVYLGHMVSHKSQTKSFKNKKIVPVPKEDWIVVENTHEAIIDKETFEIVQKFISVKKQPNKTGKPNIFVGLVKCPDCGRNLAYSNPNGNEPRFRCRTYARNTELCTTHAISYKALYEIVQNDIKNHVNSMEELGDHFIKEMRELSETSGSQKIHQFNQELVSLEKRIDEIDSIFTKLIEQNALGKITDERFSKMSMNYETEQAEVVQSYRELKSKIKSEEEKVQGTDRFLETISKYKDVTELNRSMLCELIDSIYVYQAEGIGKERTQKVEINYRFLAVSH

SEQ ID NO: 6493 - protein, 450 aa, synthetic construct
MKAALYIRVSTKEQIENYSIPTQKERLEAYCKSKGWDIHDFYIDGGYSGSNTDRPELQRMLREINNIDVVIVYKLDRLSRSQRDTMELIEDSFLKNDVEFVSITETLDTSTPFGRAMIGILSVFAQLERENIAERMRNGHIKRAQEGYAAMGGDYDPAGYKREDGKLIIKPDEKDHIQKAFDLYEQYHSISKVQKELKLIGYPVWRFRRYRDILSNKLYIGYVSFAGEHFKGVHEPIITEEQFNRVQALLGRHKGHNAHKAKESLLSGLITCACCGESYLTYAVSGKSGNNKGKKYRYYICRARRFPSEYPEKCMNKTWNGSKLENIIFEELQHLTLGKEKEEKAKPAINYKAQLSKVNEKIERIIGLYAIGKFEREALDKQIDILNAEKERLLLRQKEESAEEEISAEELHDLVIQIKDANFNTRQATIQKLVKQIIINGEDIEIEWAF

SEQ ID NO: 6494 - protein, 426 aa, synthetic construct
MKIRILEPVFQVSQKNKRVCAYARVSSDSRRQEDSLENQTDTYERLITSNPEYEFAGVYADQGISGYCESRPQFQKMLGKARAGEIDLIITKSISRFARNTVTVLKVARELKELGVGIFFEEQNINTLSGDGEMMLAVLASFAQEESRSMSENNKWTIKKKFEQGEIMINTERFLGYDKDEYGGLVINQKEAFVVDFLYDMTLFGLGNSRLKSLMNFLGVKTVTYVEWNESTINGVLTNEKYKGDYHLQKYFTPENKRNQSRLNRGEVQSYYITDNHPAIVSEEKWNQVQTERERRKKNRNIAADGVEKYQNRYPLSGMLICPYCGKNLRRRMVYKGKIQWLCSTYIKQGKQACRGVRVDDTEVIKRNITEPTVVEEMNAHGKKHNRYTRKADFFSGREYEPECPEVKGGGVLQGINRPRRTVIKL

SEQ ID NO: 6495 - protein, 423 aa, synthetic construct
MNYYTKFINENPLYEYAGTYADEGISATNTKKRDEFKRMIADCRVGKIDMIITKSISRFARNTLDCLNYVRELKELGIGIIFEKENINTLDAKGEVLLTILSSLAQDESRSISENSTWGIRRRFEKGQHKMSTKRFLGYDTDEDGKLVVNRKQAQIVARLYSEFLNGKTVDYIKRIFEREGVKNWDGETKWQTTTLQSMLENEKYKGDAILQKSYTTDFLTKKRVQNNGELQKFHIEDDHEAIIEPWIWECVQLEVQRRKEYLEEHGTNSYSHRPETNPFASKIVCGCCNKVFARKGWRSSTGVARKVWQCCERYKVKGVMGCANRHVEESTLEKAFVMAWNAVFENKEYFWRKWERQKQSENFLEVYRAKDFQELTKDKKLIEKMDADFILRILNHIKVFEDGMLMVVFLDGSEIECKNEEE

SEQ ID NO: 6496 - protein, 555 aa, synthetic construct
MDRLTQAAYEKKNVFTKASVCYKAALYMRLSKDDDGTGESSSIGTQRKMLRSYAIENDFEIYGEYVDDGYSGTNFDRPAWSRLLKDIDARKVNLVITKDLSRLGRDYIMTGQLTEIYFPSKGIRYIAVNDGYDSDSPWSDIAPFKNIVNEMYARDTSKKIRSAFQTKINEGAFIGNFAPYGYQKDPQNKNHLLVDPVAASIVREIFEWAEQGAAPSQIAVSLNERQVLTPAMYRCAGRPYLNLDDYSRRKEWTSGTVCKLLSNPVYLGHIVQGKTVKVSFKSSLTLRKPRNEWVVVEDKHEPLISGETFERVRRRSVSRKNTAATDFTNIFSGLAKCGDCGRNMSSTGAGGRTGSRKLVCGGYKLYGKKECTNHFMDYELLYHVVLQEMRSLLSFTENEKEEIEKALREPVCPGEMQGEEKAVFSLKRREIELGCIIEKLYEDRVNGRIGEDRFYKMLDSCEKEERKIAESLALMEKSCSLAQEREPAFEGLLSSLLDDISRGKGLSSDLLGKFIDRIEIFQSCEGGEGKTGCKCQTIRICYKVIAPDEEGNGLA

SEQ ID NO: 6497 - protein, 490 aa, synthetic construct
MLKGVTYNRFSSTMQREESIDAQIRFNREYAKRNNIEIIKDYCDEAMSGKTDDRPAFQQMLKDAKMGLFDVVICHKVDRFARNRIESAINKYSLRKCNIKVVFSGQAIDDSPEGQLMEGILESFAEYYSLNLAKETMKGLRENAYKCRFNGGYVPFGYSVDPVTKAYIINDKEAPYVQLIFKMYNDGAKYPLIISTLKQLGIKTRHGKDFTYASIHDLLCNEKYAGVYTFNRRASRNIDGKRNNRSYKDESEIIRIPDGIPQIIDTETFLITQELMVPKKRSTRKAKEVYLLSGLVFCGECEKPYCGSRKHNGSGKVYTMYRCNGRCSNTEVDKEILEEIVFQKLIENIFSRNALTYLSKKLNSYLKGKKQQENKQLEFLKSRINEITFEQNNIISAIAKGYDQPIFNQKLTSLDEELKKIRYDYEITKLKLDTKEITPGEIEKNLLSQREHVLNRNIIEVKNFISSYVNSVIIYKDDIEVNLKYDSMPI

SEQ ID NO: 6498 - protein, 452 aa, synthetic construct
MKAAIYIRVSTQEQTENYSISAQTEKLKALCLSKGWDIYDIFIDGGFTGSNINRPALQDMLSKLDKIDAVVVYRLDRLSRSQRDTLLLIEEYFLKNDVEFVSLSETLDTSSPFGRAMIGILSVFAQLERETIRDRLVMGKIKRIEDGLPLVTARGRTFGYDVIDTKLFINKEEAEHLQLIYNLFEETQSILQVQKRMKELGYEVFNRRRYKNLLTNDIYIGYVSYADKVHKKGIHEAIIKEEQFNRVQQIFKRVADLPNVNQESQSLLSGLVVCGKCGMPYSHTSKSTSYKGKKMKYRYYQCKSKRRLYQYDDCENIIIRADKLEEIVLNRITKYSSSSKIKQEENKLIKLQNKLNDLQNKKARLLELYLNSNYKKEELDSMTLKIDTQISTILSEKKVQQEKMQREDFKSILEATKFKDIKKLDFKDKQKLLRAIIDMVIINKEDIEIKWL

SEQ ID NO: 6499 - protein, 521 aa, synthetic construct
MAKTVRVIPASPKIFRSEVTAEPRRRRTAGYARVSTDHEEQASSYEMQMAHYKNYIESRADWDFVGMYSDEGISGTNTKKRDGFNQMIEDALAGKIDLIITKSVSRFARNTVDSLQNVRKLKENGVEIYFEKENIWTFDSRGELLITIMSSLAQEESRSISENTTWGKRKQFAEGKTSVGYSAFLGYDKDFKINEEQAQVVKLIYKLFVGGRSFYAITKELEKRGLKSPSGKDKWYISTVRSILTNEKYRGDALIQKEYTADFLDKTRRKNTGEIPQYYVEEHHEAIIPPDLFDFVQSEIKRREQNGKHSGVSIFANKIKCGSCGGYYGAKVWHSTDKYRRVIYRCNKKYAHKGKPCSTRHLTEEEIKRIFVKALNSLVEVKENVIAELQALIDSVWQTEEMIEERGRVEQELAVLAERLETLIRENARVAQDQTVYLKQENEIRARYMEKQAYLERLDDQIAERESKRNILEGMIQAVCGISGEQVEFDEELWCGLLDHIVVKEGGAAVVVFKGGIETAV

SEQ ID NO: 6500 - protein, 499 aa, synthetic construct
MKIRRVQPSTVLQKKLRVAAYARVSVDTLHHSLAAQVSYYSALIQNNPAWEYAGVYADEGITGTSTTHRDEFKRLIADCNAGKIDLVLVKSISRFARDTVDCLHTVRRLKEKGIAVRFERENIDSTSEDGELLLTLLASFAQEESRSIGDNIRWGVRRRFAEGIPNGHKAPYGYTWDGEMFRIVPAEGKVVKEIYRRYLAGESAYAIANSLAEHGIMGRQGRPIEQTTVKDILSNCSYTGTMALQKNYITEGHIRKRNKGELPMYLVEGTFEPLVSKTDFDKAQEIRKRRAERAVNRNPVRMPFSGIVKCGCCGGGFSRRTAGKYRRWGCNTRERKGSTACDSRPIKEEELVAAVRTVMEKDDFDTAELRRKVSKIVIHNDCVEFHLINGHIKKTARIYNGQRGSNPFTNKVYCASCGSKCERDTWTKGAKVWSCSQPRTKCQLRRLPESKLKEAAESLLGDGYEGKIVQNVERIVISDDEVIFQLKEGGAYRWQRQCG

SEQ ID NO: 6501 - protein, 523 aa, synthetic construct
MAKTVRVIPASPKIFRSEVTAEPRRRRTAGYARVSTDHEEQASSYEMQMAHYKNYIESRADWDFVGMYSDEGISGTNTKKRDGFNQMIEDALAGKIDLIITKSVSRFARNTVDSLQNVRKLKENGVEIYFEKENIWTFDTKGELLITIMSSLAQEESRSISENTTWGKRKQFAEGKTSVGYSVFLGYDKDFQINEEQAKIVRLIYKLFLGGRSFYAITKELEKRGIKSPSGKDKWYISTVRSILTNEKYRGDALIQKEYTADFLDKTRRKNTGEIPQYYVEEHHEAIIPPDLFDFVQAEIKRREQNGKHSGVSIFANKIKCGCCGGWYGAKVWHSTDKYRRVIYRCNKKYAHKGKPCSTKHLTEEEIKQTFVKALNSLVEVKENVIAELRTLIDSICQTEEVPEERDKVEQELGVLAERLETLIRENARVAQNQNAYLKQENEIRARYLDKQGHLEKLDEQIAEREGKRKTLEGMIQVVCGINGEQVEFDEELWSGLLEHIVVKEGGAAVVVFKGGIEIGVYG

SEQ ID NO: 6502 - protein, 497 aa, synthetic construct
MKIRRVQPSPILQKKLRVAAYARVSVDTLHHSLAAQVSYYSSLIQKNPAWEYAGVYADEGITGTSTTHRTEFKRLIADCNAGKIDLVLVKSISRFARDTVDCLHTVRRLKEKGIAVRFERENIDSTSEDGELLLTLLASFAQEESRSIGDNIRWGVRRRFAEGIPNGHKAPYGYTWDGEMFRIIQAEGEIVKEIYQRYLAGESAYAIAKSLAGRGITGRQGRPIEQTTVKDILSNISYTGTMALQKNYINEGRVRKRNKGELPMYLVDGVFEPLVSKTDFDKAQEMRRLRAKRAVNRNPVLLPFSGMVKCGCCGGGFSRRTAGKYRRWACNTRERKGRESCDSRPIKEEELVAAVRAVMEKDDFDAAELRHKVSKIVIHGDRIDFHLVNGRIKKTARIYTGQRGSNPFTSKVYCASCGSKCERDTWTKGTKVWACSQPCTKCGLKRLPESELKEAAESLFGDCYEGKIVQNVERIVISDDEVIFQLKEGGAYRWQRQ

SEQ ID NO: 6503 - protein, 497 aa, synthetic construct
MYALYARQSVEKPDSISIESQLEYCRYETKGQPYKTYVDRGFSGKDTHRPAFEQMLSDIRAGQIQTVVVYKLDRVSRSVLDFGRLMEEFEKSKVAFVSATEKFDTQTPMGRAMLNIAMVFAQLERETIQKRVADSYLARSRHGFYMGGRVPYGYRLEPAEINGVRTSVYVPEEKEAQQVKLIYSMYVNSDYSLGKILQFFEEHQIRHLRGGRWNTARLSELLRNPAYVKADAGIYRYYQSQGVEIINDLSDFQGGNGCYLYRQRKNDKKCAAFPKDTLVLAPHEGLVSSGLWLACRNKCGERPYPAAVGKTKNTWLAGKVKCGKCGYALTVKKSDTKMGRYFVCSAKYTAKGCTGAGTVYVLAVEDCLSEQIKKRLEQFQNAGFPEDNRDSQTSTYRQRIEKLEESIDRLVDRVGHSTDAAMEEINRRINRLCCQKRELQEQLNVLTQETVKQSFRKDIPLAAIWEETEPVEKKQITDSLIQSVQVADDRIDIVWKI

SEQ ID NO: 6504 - protein, 526 aa, synthetic construct
MYNPNLASAEPPKITVISAKSQEIAKLRVAAYARVSSDSDDQQNSYIAQVDYYTKNIAAHEGWELADIYADEGITGLVASKRDDFNRMIQDCRDGKIDRILVKSISRFARNTKEYIQYVRELLRLGVSIHFEKENIDTGKMTSEQIATIYGAFSQMESQNHSNNMRISVRIRMEKGDYVSPTTPYGYKLEERTLVIIPEQAEVVRRIFTAYLSGQGKEDIANELNRLGIPRTKDRKMWYSTTIGYILTNISYTGDMVWQKSFATNDIPFRQVRNKGEKPKYFVENCHEPIISKDEFQRVQALLETRRLQIAGTVSSALLKKKLHCGNCGTLFRRKIVNEKVYWACRRHDSHKDLCPISQVPEEQIITAILRMYHKLKRHREQILSPLLSQLTELREKELRSNRKINDIDKEIAQLTEQNLVLVRLKSKGYVDSALYLSQTGDIDFKLRELRRLRRRIMETTGEDGQIKATETMLDYLESSPEHLGELTEELFEALVENITISSETEMNLTLYNGLTLKETMERTVR

SEQ ID NO: 6505 - protein, 539 aa, synthetic construct
MPATATRKVTVIPADPIYAQKDIRKKALRVAPYCRVSTSSEEQLDSYQAQIEYYTERIAAQPEWTMVDMFADEGKTATSTKKRKDFLRMIKACEKGKVDLVITKSVSRFCRNTLDGLDYVRKLKRMGVGVFFEKENVNTLYMDNEMILTFMMSQAQAESESMSGNIRWGHRKNFKDGKVYYHYAGFLGYRKGEDDLPEIDPEEAEIVRRVFSRYLVGHSVAKIIADLEADGIKTVRGKEKWNDGVIRGMLKNEKYIGDALLQKTFIADLFTRQSKKNNGELPQYYVENCHPAIIDKLTFQRVQEEMARRSSLRKVSANAKTELAKYSGKYVLTELLSCGNCGSPYRRVTWTRPEGKKIVWRCINRLENGKKFCKDAPTLEESRIHAAVVSAMNEMFSLKTMKSLLQDSILSALSGNSGETSIAAIDSRLSELRARQYELLQFAASVGADSTQYDEDLNEVSMEFSALVSKRSELEKNQQGIAQADKRAEQIAAELDKVDTGITCFDELTVRQLIGAIKVLGEDKLLIRFKDGTEIEQIM

SEQ ID NO: 6506 - protein, 549 aa, synthetic construct
MNIQSPHVAQRAALYLRVSTPRQAEHNVSIPDQQRQGEAYCETRGYQLVETFVEPGNSATNDRRPEFQRMIEAATTKPPAFDVVVVHSFSRFFRDEFEMEFYYRKLAKNGVKLISMTQELGDDPIHDMMRRIMSLFDEYQSKENAKHVLRALKENARQGFWNGSLPPIGYRVIDAEQRGSKIKKKLEIDPLHADTVRMIFRLALEGDGTSGPMGVKAIVNYLNKNRMFTRSGGRWGIGQLHRILTRRTYIGEHQFNKRTKTKELKPVEEVVTVEVPPLIDRETFDAIQQRLQANNPKVTPPRVVSGPNLLTGICYCGNCGGAMTLRTGKNGRYRYYACSIRARQGETGCKGRAIRMDKLDRVVVGHIEERLLDPERIEEVLASLLDRRQEGVERRSKHIAELNQRAAEADMRLKRLYDAIESGSLDPAESALGERITGLTALRDQARADAARTEAMLASASHHSLSGAAVREMASEARRRLRQEKGGYRREHVRAFAQRVEVADDAIRIMGTKSTLLRTLVAAKGGKSAGIGVPGFIPKWRMGWDSNPR

SEQ ID NO: 6507 - protein, 481 aa, synthetic construct
MITTNKVAIYVRVSTTNQVEEGYSIDEQKDKLSSYCDIKDWNVYKVYTDGGFSGSNTDRPALESLIKDAKKRKFDTVLVYKLDRLSRSQKDTLHLIEDVFIKNGIEFLSLQENFDTSTPFGKAMIGLLSVFAQLEREQIKERMQLGKLGRAKSGKSMMWAKTSYGYDYHKETSTVTINPAQALTIKFIFESYLRGRSITKLRDDLNEKYPKHVPWSYRAVRTILDNPVYCGFNQYKGEIYPGNHEPIISKEEYDKTQSELKIRQRTAAENVNPRPFQAKYILSGIAQCGYCGAPLKIMLGVKRKDGSRLKKYECHQRHPRTLRGVTTYNDNKKCDSGFYYKDKLEAYVLKEISKLQDDADYLDKIFSGDNAETIDRESYKKQIEELSKKLSRLNDLYIDDRITLEELQSKSAEFISMRGTLETELENDPALRKNKRKADMRKLLNAEKVFSMDYESQKVLVRRLINKVKVTAEDIVINWKI

SEQ ID NO: 6508 - protein, 508 aa, synthetic construct
MKKAIAYMRFSSPGQMSGDSLNRQRKLIAEWLKVNSDYYLDTITYEDLGLSAFKGKHAQSGAFSEFLDAIEHGYILPGTTLLVESLDRLSREKVGEAIERLKLILNHGIDVITLCDNTVYNIDSLNEPYSLIKAILIAQRANEESEIKSSRVKLSWKKKRQDALESGTIMTASCPRWLSLDDKRTAFVPDPDRVKTIELIFKLRMERRSLNAIAKYLNDHAVKNFSGKESAWGPSVIEKLLANKALIGICVPSYRARGKGISEIAGYYPRVISDDLFYAVQEIRLAPFGVSNSSKNPMLINLLRTVMKCEACGNTMIVHAVSGSLHGYYVCPMRRLHRCDRPSIKRDLVDYNIINELLFNCSKIQPVENKKDANETLELKIIELQMKINNLIVALSVAPEVTAIAEKIRLLDKELRRASVSLKTLKSKGVNSFSDFYAIDLTSKNGRELCRTLAYKTFEKIIINTDNKTCDIYFMNGIVFKHYPLMKVISAQQAISALKYMVDGEIYF

SEQ ID NO: 6509 - protein, 452 aa, synthetic construct
MKAAIYIRVSTQEQTENYSIQAQTEKLTALCRSKDWDVYDTFIDGGYSGSNMKRPALNEMLSKLHEIDAVVVYRLDRLSRSQRDTITLIEEYFLKNNVEFVSLSETLDTSSPFGRAMIGILSVFAQLERETIRDRMVMGKIKRIESGLPLTTAKGRTFGYDVVDTKLYINEEEAKQLQMIYDIFEEEKSITFLQKRLKKLGFKVRTYNRYNNWLTNDLYCGYVSYKDKVHVKGIHEPIISEEQFYRVQEIFSRMGKNPNMNKESASLLNNLVVCSKCGLGFVHRRKDTVSRGKKYHYRYYSCKTYKHTHELEKCGNKIWRADKLEELIIDRVNNYSFASRNIDKEDELDSLNEKLKIEHAKKKRLFDLYINGSYEVSELDSMMNDIDAQINYYEAQIEANEELKKNKKIQENLADLATVDFNSLEFREKQLYLKSLINKIYIDDEQVTIEWL

SEQ ID NO: 6510 - protein, 559 aa, synthetic construct
MKTKLYSYIRFSSMRQNDGSSYERQIRMAREIAVKYDLELVNDYQDLGVSAFKGANSKTGALSRFLDAIGRSVPVGSWLFIENLDRLSRADIVSAQELFLSIIRRGITIVTGMDNKIYSLDTVTANPMDLMFSILLFIRGNEESQTKRNRTNSSALIKIKAHQENPQNPAVAIEEIGKNMWWTDTTSGYVLPHPVFFPIVQEVVELRRNGRSTAEILDHLNATYTPPPAASHKRHSNWSRAMIERLFHTRALIGIKEISVDGVKYELKDYYPRVLDDAEFYHLKKSIGVRACNFGDKEEVKPVPLLSGVGLLKCEHCGSAMVKVKGTNRRPNQYRYSCDAMRSSRIECVHTNWSFRGDQLEKAVLQLLADKIWIAEDKANPVPALKVQIDEISRKIDNLITLSAMTGATKELADQITTLNSERETLYNQIKMAEEEMYSVDSQGWEKLAEFDLEDVYNEDRIKVRFKIKQALKRIGCSRIDKYKNLFVLEYIDGKTQRVVIENSRGPRKGRIFVDLKTINDRQILESNGLVLHPCLDMLTDKNWKPEEEIPGPLQEFGI

SEQ ID NO: 6511 - protein, 559 aa, synthetic construct
MKTKLYSYIRFSSMRQNDGSSYERQIRMAREVAAKYDLELVNDYQDLGVSAFKGANSKTGALSRFLDAIGRSVPVGSWLFIENLDRLSRADIVSAQELFLSIIRRGITIVTGMDNKIYSLDTVTANPMDLMFSILLFIRGNEESQTKRNRTNSSALIKIKAHQENPQNPAVAIEEVGKNMWWTDTTSGYVCPDPVFFPIVQEVVELRRNGRSTAEILDHLNATYTPPPAASHKRHSNWSRAMIERLFHTRALIGIKEISVDGVKYELKDYYPRVLDDAEFYHLKKSIGVRACNYGDKEEAKPIPLLSGVNLLKCEHCGSAMVKVKGTNKRPNQYRYSCDAMRSSRIACVHTNWSFRGDQLEKAVLQLLADKIWIAEDKANPVPALKVQIDEISRKIDNLITLSAMTGATKELADQITTLNSERETLYNQIKMAEEEMYSVDSQGWEKLAEFDLEDVYNEDRIKVRFKIKQALKRIGCSRIDKYKNLFVLEYIDGKTQRVVIENSRGPRKGQIFVDLKTINDRQILESNGLVLHPCLDMLTDKNWKPEEEIPGPLQEFGI

SEQ ID NO: 6512 - protein, 587 aa, synthetic construct
MRGAIYSRVSTEIQDYGKQTDELKDYAARNNIEVKYIFEEKVSGFKDDRTEFKKLEKLTKNDIDIILVWELSRLSRRSIFIQQTVKNFANKGICIFTKKEGLYTLNDDGTENKNAMFTIGVISMIAEQEIETLKERTISSKRRYILKEGHSYTPIAPYGYNYNSTTKQLTVNEDEAEVVRRMYQLSIDGVSTNRISKILTSEGVKTKKGNPNWSLATVRDILHNPVYKGVPKYTMTIRNKKVVELVSAPPIVSEEVFEQSEKELTERRNRSKSEMVNKPLLRALIFCTDCGRRYICNSGRNIYACQTRFDNIRANYVADCHSAGISATNIEPIIWNLVERLFKSTIASSKAQERIEPYQEQLSKLSESKNNFEMQRDKINKDAAKLFDTLLLIRDTNPTVFTSKMEDFNKMSTEANDYQKEIDIIESKKQAIQRRIKAIEEIKDIDITDESEKYDILHKVIEAIKIYSVKTNQKVFTVLFASGLEYNVLYNVNKPKFRIEYAFASDETITFNKKDKLLINKLHSSVRDILPDFSITAGNNDMFDNDVCGDYSFQEVWDLLEKYNKTEVLREWKPDYTKRTINRRSKK

SEQ ID NO: 6513 - protein, 481 aa, synthetic construct
MKTMNKVAIYVRVSTTNQVEEGYSIDEQKDKLSSYCDIKDWNVYKVYTDGGFSGSNTDRPALESLIKDAKKRKFDTVLVYKLDRLSRSQKDTLHLIEDVFIKNGIEFLSLQENFDTSTPFGKAMIGLLSVFAQLEREQIKERMQLGKLGRAKSGKSMMWAKTSYGYDYHKETGTVTINPAQALTIKFIFESYLRGRSITKLRDDLNEKYPKHVPWSYRAVRTILDNPVYCGFNQYKGEIYPGNHEPIISKEEYDKAQSELKIRQRTAAENVNPRPFQAKYILSGIAQCGYCGAPLKIMLGVKRKDGSRLKKYECHQRHPRTLRGVTTYNDNKKCDSGFYYKDKLEAYVLKEISKLQDDADYLDKIFSGDNAETIDRESYKKQIEELSKKLSRLNDLYIDDRITLEELQSKSAEFISMRGTLETELENDPALRKNKRKADMRKLLNAEKVFSMDYENQKVLVRRLINKVKVTAEDIVINWKI

SEQ ID NO: 6514 - protein, 547 aa, synthetic construct
MKLLVTYIRWSTKEQDSGDSLRRQTNLIDAFYSKHKNDYYLLPAHRYVDKGKSGFHQQHKNQGSDFRRMFENVMSGAIPEGSLIVVENFDRFSRADIDTAIDDVRQILRKGVSILTLGDGELYDKSALTDPVKLIKHIIIAERAHQESLVKQKRIAQVWNHKTQLARELKKPMGKQAPGWLELSEDGSHYIVDEDKASLVNIIYDKRLSGMSMFAICKWLNEQGYPTINQRKVRISKTKKPDGNWSALSVKHILTSRSVLGYLPAKVSSEDRKTVLREEIEGFYPQIVTDSKFYAVQQLLEETGKGKTSSGEHWLYVNILKGLIRCKCGLVMTPTGIRKPVYQGTYRCNGNKESRCSYGTVSRKLLDTQLCSRLFSKLSQLHDEATDTARLDELQRRLNTVDSELEKLTETLIQLPNITQIQEALRVKQEEKDELIVQLSREKARVKSVSSLDLSGLDMESVEGRTEAQIIIKRLVKEIVVSGNEKLVDIYLHNGNMIRGFPLDGKDDHTLTLEEATDEMQSLDDMLIFGEPVTRIYPAGDMEEVDA

SEQ ID NO: 6515 - protein, 638 aa, synthetic construct
MKAAFLIRCSTKNQDLSRQTRDLARLAKSMGYEYDLDNLVYGEKITGKDDVTKKNRDSIDRLLKAAKEQRFDVVLVAEVSRMSRDPASGRVYVRLLINMGIPVYFKDIDTWTIDPETGKKIRDAETVIGGAFDAAWKYLKSMKTQIASARRNQLDNNCISVGKPYIGYKWLGGKDKTTKTQWIVDEIAAEAVIATFNEYLKEGATLKSTALVINALYGEKVKTKFTVSRMEQILSYDTYYTGIKKINLTDPDTEEIEVFDVKVPILITKELFEAAAVKRSTNRVKGEPYPKQTVHLLSKLIKCSYCGYSMTPRAKGSDKTQDGRGANGAYRIINGKKAMSWLCMSGINNATICPNRTSIANEKLEPIIWELVKKELIAFANLNNDERLQKVEELESKIEYQNLNIQNYEKEIQKLRKRLSTAYQFSLNAAEMAGDDEDIKAMTMEEFNKTAKVIRKEITTFENSIEQAKADIYKLTNLKTFYSQPTLPKDVIEKAEANPTEQRNLVKELIEKIIPYKITTFRKKQRESGRKACNQWITVKNGAVLLEIYTINGIYYIFYNANGREATRYAYYMSGVFARYQNSIKKFEAYEEGEYFVISNANMVMETEEIDELVTVNEFVKIAKANEWVLEYPYKPES

SEQ ID NO: 6516 - protein, 568 aa, synthetic construct
MEKRVIGYARVSTEKQDLERQKNLIKEYCTDRGYELTKIISEKVSGIKKNRQSISELLSMDSSVADMVVVSELSRISRQKELMSVLYTINEILDNGLDVLFLDDTSKVYSAHAELKLVDIITLTVKAHSAAEERDKIATRMRTGKLTKVNSNPYAYAGGIVPYGFKVIDNPNYSGQKNNIPAKKLMVIDELKVKDIHLIYQLVLNGTTLRDAAKKMNSMGLVTQHNKPFCETSISKIIKNPIYNGRRRFKRLDLQLEKIISDEDWNRAQVCVSENQLFKEKSTKNFNPLKGLVFCPCGYALMLHKMVRRDGSSYFVLACCKKNDKAYRLKCRNTGIISDILFKSVWACVKSTLLLSEYEVRNKTEITRIAGIIDTLNNKIESYLDEIDTYRADMGKLAKTITLVSAKGLIEQYQSEYIGLESKVNQLQDNIKSVKKDIALYNSEIKLISDVEKNSVLAGLTDRGKSEVYKKVLSRVVYYSEDIFRGFIVISYKNGLENIVAVKKTRMGYASFLPSTFSFDIKKRKILVPIHQLEMDLKSISISNVINSEYSFKELERVYDLIQWDIAK

SEQ ID NO: 6517 - protein, 481 aa, synthetic construct
MITTNKVAIYVRVSTTNQVEEGYSIDEQKDKLSSYCDIKDWNVYKVYTDGGFSGSNTDRPALESLIKDAKKRKFDTVLVYKLDRLSRSQKDTLHLIEDVFIKNGIEFLSLQENFDTSTPFGKAMIGLLSVFAQLEREQIKERMQLGKLGRAKSGKSMMWAKTSYGYDYHKETGTVTINPAQALAIKFIFESYLRGRSITKLRDDLNEKYPKHVPWSYRAVRTILDNPVYCGFNQYKGEIYPGNHEPIISKEEYDKTQSELKIRQRTAAENVNPRPFQAKYILSGIAQCGYCGAPLKIMLGVKRKDGSRLKKYECHQRHPRTLRGVTTYNDNKKCDSGFYYKDKLEASVLKEISKLQDDADYLDKIFSGDNAETIDRESYKKQIEELSKKLSRLNDLYIDDRITLEELQSKSAEFISMRGTLETELENDPALRKNKRKADMRKLLNAEKVFSMDYENQKVLVRRLINKVKVTAEDIVINWKI

SEQ ID NO: 6518 - protein, 547 aa, synthetic construct
MKLLVTYIRWSTKEQDSGDSLRRQTNLIDAFYSKHKNDYYLLPAHRYVDKGKSGFHQQHKNQGSDFRRMFENVMSGVIPEGSLIVVENFDRFSRADIDTAIDDVRQILRKGVSILTLGDGELYDKSALTDPVKLIKHIIIAERAHQESLVKQKRIAQVWNHKTQLARELKKPMGKQAPGWLELSDDGSHYIVDEDKASLVNIIYDKRLSGMSMFAICKWLNEQGYPTINQRKVRISKTKKPDGNWSALSVKHILTSRSVLGYLPAKISTEDRKTVLREEIEGFYPQIVTDSKFYAVQQLLEETGKGKTSSGEHWLYVNILKGLIRCKCGLVMTPTGIRKPVYQGTYRCNGNKESRCSYGTVSRKLLDTQLCSRLFSKLSQLHDEATDTAKLDELQRRLNTVDSELEKLTETLIQLPNITQIQEALRVKQEEKDELIVQLSREKARVKSVSSLNLSGLDMESVEGRTEAQIIIKRLVKEIVVSGNEKLVDIYLHNGNMIRGFPLDGKDDHTLTLEEATDEMQSLDDMLIFGEPVTRIYPAGDMEEVDA

SEQ ID NO: 6519 - protein, 547 aa, synthetic construct
MKLLVTYIRWSTREQDSGDSLRRQTNLIDAFYAKHKDDYYLLPAHRYVDKGKSGFHQQHKAQGSDFRRMFENVMSGVIPEGSLIVVENFDRFSRADIDTAIDDVRQILRKGVSILTLGDGELYDKSALTDPVKLIKHIIIAERAHQESLVKQKRIAQVWNHKTQLARELKKPMGKQAPGWLELSEDGSHYIVDEDKASLVNIIYDKRLSGMSMFAICKWLNEQGYPTINQRKVRISKTKKPDGNWSALSVKHILTSRSVLGYLPAKISTEDRKTVLREEIEGFYPQIVTDSKFYAVQQLLEETGKGKTSSGEHWLYVNILKGLIRCKCGLVMTPTGIRKPVYQGTYRCNGNKESRCSYGTVSRKLLDTQLCSRLFSKLSQLHDEATDTAKLDELQRRLNTVDSELEKLTETLIQLPNITQIQEALRVKQEEKDELIVQLSREKARVKSVSSLDLSGLDMESVEGRTEAQIIIKRLVKEIVVSGNEKLVDIYLHNGNMIRGFPLDGKDDHTLTLEEATDEMQSLDDMLIFGEPVTRIYPAGDMEEVDA

SEQ ID NO: 6520 - protein, 507 aa, synthetic construct
MKRAISYIRFSSEKQSRGDSLRRQSKMVNDWLKAHPEYYLDQDLSFRDLGVSGFTGKHLKGGLGDFLTAIEKGLVKAGDTLLIESLDRLSRQAVDRASELLRNILRSGVDVVTLSDGEHYTSESLKDPLALIKSILIMQRAHEESLRKSERIQAAWDAKKEAAKAGIKVSKRCPAWLRLNDDRKSFSVIPEKVETVKRCFQLRLEGKSIWEIVRTLNDEGHQTLNQYKAGKFGQSSVQDLLKNRSVIGYFTPKGCEEIAGYYPAIIDETTFYKVQQLSHSRYGKRSVSDKPLSVNLFKGVIRCSECGHALIITGFSDTRSGIYRCPLRNENRCSAKGLSRKQTDGTLLTLLSRLDRFDSDTTNIIDMLRLHREHISSNIEKLVQLSLEIEDLNAITSKLKQLKGELSQVDADIEKETQRLKSIDVGCLSDCDLTTKAGRIEAQLIIKSAVKEVVLNTAKRRCKVTFHNGKVIDLPITENPSEDVTEAIQSLSEVTERGLIDVDEVII

SEQ ID NO: 6521 - protein, 509 aa, synthetic construct
MRRAISYIRFSSERQLKGDSVRRQSKLVTDWLDKNPEFYLDSSLSFKDLGKSAFSGKHLKGGLGDFLTAIEKGLVKAGDTLLIESLDRLSRQDIDIASELLRRILRAGVDVVTLSDGEHYTKESLKDPLALIKSILIMQRAHEESLRKSERVQAAWNRKKELISEGIKISRRCPAWLKLNDDRRTFTIIPDKVEVVKRAFDLRLQGLSFWAITRTLNDEGHLSLNQYTPKQKGWSDTAVKKLLRNRAVIGCFTPAGREEVQGYYPAIISESLFYRVQQLNTGQYGRASVSSNPLSVNLFRGIIKCSECGATIVLGGYALKRFGMYRCPNRSANRCSAKAISRKQTDATILYMLALCDRFETENTDTIDSLKLQREDLQRKISKMAELAIELDDMTIITEKLRDMKNALSKLNHDIEEETKRIKAITTGSLKDIDRTTKEGMIETQLLIKGVLKEIVIDAAKRRCKVTFHNGRSIILPITENPSDNVTEAIQSLSEVTERGLIDVDEVII

SEQ ID NO: 6522 - protein, 559 aa, synthetic construct
MKTKLYSYIRFSSMRQSDGSSYERQIRMAREIAAKYDLELVNDYQDLGVSAFKGANSKTGALSRFLDAIGRSVPVGSWLFIENLDRLSRADIVSAQELFLSIIRRGITIVTGMDNKIYSLDTVTANPMDLMFSILLFIRGNEESQTKRNRTNSSALIKIKAHQENPQNPAVAIEEVGKNMWWTDTTSGYVLPHPVFFPVVQEIVELRKNGRSTAEILDHLNETYAPPPAVSNKKHSKWSRAMVERLFHTRALIGIKEVSVDGVNYELKDYYPRVIDDATFYHLKKNIGARAWNFGDKEEAKPIPLLSGIGLLKCDHCGCAMVKVKGTNKRSDQYRYTCDATRSRRLDCEHPNWSFRGDQLEKAVLQLLADKIWIAEDKANPVPALKVQVDEISRKIDNLIALSAMTGATKELADQITTLNSERETLYNQIKMAEEEMYSVDSQGWEKLAEFDLEDVYNEERLKVRFKIKQALKRIGCSRIDRNKNLFVLEYIDGKTQRVVIENSRGTRKGQIFVDLKTINDRQILESNGLVLHPCLDMLTDKNWKPEEEIPGPLQEFGI

SEQ ID NO: 6523 - protein, 481 aa, synthetic construct
MKTMNKVAIYVRVSTTNQVEEGYSIDEQKDKLSSYCDIKDWNVYKVYTDGGFSGSNTDRPALESLIKDAKKRKFDTVLVYKLDRLSRSQKDTLHLIEDVFIKNGIEFLSLQENFDTSTPFGKAMIGLLSVFAQLEREQIKERMQLGKIGRAKAGKSMMWAKTSYGYDYHRETGTITINPAQALAIKFIFESYLRGRSITKLRDDLNEKYPKHVPWSYRAVRTILDNPVYCGFNQYKGEIYPGNHEPIISKEEYDKTQSELKIRQRTAAENVNPRPFQAKYILSGIAQCGYCGAPLKIMLGVKRKDGSRLKKYECHQRHPRTLRGVTTYNDNKKCDSGFYYKDKLEASVLKEISKLQDDDDYLDKIFSGDNAETIDRESYKKQIEELSKKLSRLNDLYIDDRITLEELQSKSAEFISMRATLETELENDPALRKNKRKADMRKLLNAEKVFSMDYEGQKVLVRGLINKVKVTAEDIVINWKI

SEQ ID NO: 6524 - protein, 449 aa, synthetic construct
MKQVIGYLRQSTMKQQSLAAQKQAIEAIAEKHHIQHINFYSDKQSGRKDNRSGYRQITQLIQQGQCDILCCYRLNRLHRNLKNALKLIKLCQTYHVHILSVHDGYFDMDQAFDRLKLNIFISLAELESDNIGEQVKNGLQEKAKQGQLITTHAPFGYDYHNGTFIINQNESPTVKAVFNYYIKGHGYKKIAQLLEEDNTYINRQPYQVRNIIMNPNYCGRVINQYGQFDNMFPSIVSANVYEQAQRLRLQKQTKQTSSDNQLKQKIKCPCCNATLTNMTVRKKNHILRYYVCPKNMNASRFVCDFKGINAQTLEDKVLEVCRDFYQNQRIYTKIKGAIDKRIKRQRNIEKHHILTQEQLIEKLAQGIIDAETFREQTQSLRQQPQRTTSINGHQIQHTIQNIIQKRFTLNILYPYIETIHITKDKNLIGIYFKNEPLNIVNQTMQSSIA

SEQ ID NO: 6525 - protein, 515 aa, synthetic construct
MKTVIYLRKSRADLEAEARGEGETLAKHRSTLLKIAKEMNLNVLAVREEIVSGESLVKRPEMLALLEEIEDNKYDVVLCMDVDRLGRGGMKEQGIILEAFKRSNTKIMTPRKTYDLNDEWDEEYSEFEAFMARKELKIITRRMQRGRVASVEAGNYLGTHAPFGYDIHRLNKRERTLTINPEEASVVRMIFDWYANEDMGANAIRSKLNDLGYKSKLGNEWNPYSILDILKNNVYIGKVTWQKRKEVKRPDAVKRSCARQDKSDWIIADGKHEPIIPESLFEQVQEKLNSRYHIPYNTNGIKNPLAGIIKCAKCGYSMVQRYPKNRKETMDCKHRGCENKSSYTELIEKRLLEALKEWYINYKADFEKHKQNDKLKETQVIQMNEAALRKLEKELVDVQKQKNNLHDLLERGVYTVDMFLERSNVVSDRITEITSTMENLKKEIKTEIKKEKVKKDTIPQVEHVLDLYFKTDDPKKKNSLLKSVLEKAVYKKEKWQRLDDFELVLYPKLPQDGGI

SEQ ID NO: 6526 - protein, 507 aa, synthetic construct
MKRVISYIRFSSERQAKGDSLRRQSKMVNDWLKAHPEYYLDQDLSFRDLGVSGFTGKHLKGGLGDFLTAIEKGLVKAGDTLLIESLDRLSRQDVDQASELLRNILRSGVDVVTLSDGEHYTRESLKDPLALIKSILIMQRSHEESLRKSERIQAAWDAKKEAAKAGIKISRRCPAWLKLNDDRKSFSIIPEKVETVKRCFQLRLEGKSIWEIVRTLNDEGHQTLNQYKAGKFGQTSVQDLLKNRSVIGYFTPKGREEIAGYFPPIIPETDFYKVQQLSYSRYGRKPASDKPMAVNLFKGVIRCSECGHALIITGFSDTRNGIYRCPLRNENRCSAKGLSRKQTDGTLLALLSRLDRFDSDTTNTIDTLKLHREHISSNIEKLVQLSLEIEDLSAITSKLKQLKGELSQVDADIEKETQRLKSIDVGCLSDCDLTTKAGRIEAQLIIKSAVKEVVLNTAKRRCKVTFHNGKAITLPITENPSDNVTEAIQSLSEVTERGLIDVDEVII

SEQ ID NO: 6527 - protein, 506 aa, synthetic construct
MRSVITYLRYSSAIQGAEGADSTRRQNDLFKQWLKKNSDAQVVASFSDEGLSGYKGKHLTGQFGDMLARIESGEFSKGTILLVESIDRIGRLEHLETEALMNRILGNGLEIHTLQDGLIYTKDALVDDLGISIIQRVKAYIAHQESKQKSFRVSEKWKQRAKLALAGEQRLTKMVPGWIDPDTLKLNEHAETVRLIFKLLLSGESLHNIARHLQSNGIKSFSRRKDANGFSVHSVRTILRSETTIGTLPASQRNDRPAIPNYYEAAIDAATFNKAQEILDKNRKGRTPASDNPLTINIFKGLFRCQCGASVHPTGTKNKYAGVYRCNNNPDGRCDVPPLKRKPFDRWMLENFLGMIDVGNDGEAEGKIASLQHEVEIVTARIKKATALLLEMDDITELKAQVKGLNQKRTEIQTTIDTLKRKTSLTDKELPQLKDIDLTTKAGRVECQLILSKHLKGLTLGKDSVTVTLQNDTEITIPTNPLPLNDGTSIFEIAEKELLEIDAYQL

SEQ ID NO: 6528 - protein, 507 aa, synthetic construct
MKRVISYIRFSSERQAKGDSLRRQSKMVNDWLKAHPEYYLDQDLSFRDLGVSGFTGKHLKGGLGDFLTAIEKGLVKAGDTLLIESLDRLSRQDVDQASELLRNILRSGVDVVTLSDGEHYTKESLRDPLSLIKSILIMQRAHEESLRKAERIQAAWDAKKEAAKAGIKISRRCPAWLKLNDDRKSFSVIPEKVETVKRCFQLRLEGKSIWEIVRTLNAEGHQTLNQYKAGKFGQTSVQDLLKNRSVIGYFTPKGCEEISGYYPAIIDETTFYKVQQLSYARYGRKPASDKPMAVNLFKGVIRCSECGHALIITGFSDTRNGIYRCPLRNENRCSAKGLSRKQTDGTLLALLSRLDRFDSDMTNTIDTLKLHREHISSNIEKLVQLSLEIEDLSAITSKLKQLKGELSQVDADIEKETQRLKSIDVGCLSDCDLTTKAGRIEAQLIIKSAVKEVVLNTAKRRCKVTFHNGKAITLPITENPSDNVTEAIQSLSEVTERSLIDVDEVII

SEQ ID NO: 6529 - protein, 547 aa, synthetic construct
MKLLVTYIRWSTKEQDSGDSLRRQTNLIDAFYSKHKNDYYLLPAHRYVDKGKSGFHQQHKAQGSDFRRMFENVMSGAIPEGSLIVVENFDRFSRADIDTAIDDVRQILRKGVSILTLGDGELYDKSALTDPVKLIKHIIIAERAHQESLVKQKRIAQVWNHKTQLARELKKPMGKQAPGWLELSEDGSHYIVDEDKASLVNIIYDKRLSGMSMFAICKWLNEQGYPTINQRKVRISKTKKPDGNWSALSVKHILTSRSVLGYLPAKISSEDRKTVLREEIEGFYPQIVTDSKFYAVQQLLEETGKGKTSSGDHWLYVNILKGLIRCKCGLVMTPTGIRKPVYQGTYRCNGNKESRCSYGTVSRKLLDTQLCSRLFSKLSQLHDEATDTAKLDELQRRLNTVDGELEKLTETLIQLPNITQIQEALRVKQEEKDELIVQLSREKARVKSVSSLDLSGLDMESVEGRTEAQIIIKRLVKEIVVSGNEKLVDIYLHNGNMIRGFPLDGKDDHTLTLEEATDEMQSLDDMLIFGEPVTRIYPAGDMEEVDA

SEQ ID NO: 6530 - protein, 528 aa, synthetic construct
MERKNKGYVRVSTMHDSQKDSPEHQMEFIKKTASGEGIILTDDDFYEDRDTATSIVEREDVQRMIDDAKRGKISSIWFASLSRFSRDVIDAITLKRTLVNALKIRVVSIEDGYDSAKKDDELLFGIKAVINQNTSGDIGKSSRRGIEQSAEKGNYIGSIPPLGYKKVTIDDPRMKSGKRKTLEVIPDKAEIVRKIFDLYVNHGKGEKSIVNYLNGDNENGELIPSYKGGVWGLTSVQRILQNEVYTGYNVYGRHTNEVHYNDLGNMLDRRKKLVQKHKSEWKKTKYQTHEAIISKELFDAAQEMRLKRGGGERGGRREFVNAFAKMIFCAECGSAMVTMKSKSRNGTDEYRYLLCSKRRRSGDRGCRNGKWIPYYSMRDELVGEILRRLKSRLSLIDSNDINASLPINRDNDKEKKQLEKRITDNRKWLFEIRRQNMQGELDKAQYDFEREQYEKEIEAAEKRMSVISANEQRVIDLERIKKEVRVAIKRLSDMSSYDDIEKLRPLLMDSVQRIDVHADGNIDIKTYI

SEQ ID NO: 6531 - protein, 623 aa, synthetic construct
MFNLMESKKFEDAVLYARVSSDDQQERETIGMQIEYGDKYADLYNINIKDYYKDDGVSGHSHSLEDRPDGKRLIEDAKAGKIKLVLIYNMKRLGRKARFILDAIYQLEQYGVAIRSMTEPFDTSTPTGRFIITLLAGQAEFDRDTLVETLWHGANRHARLGKWLGGIVPYGYRVDQEGFLEVNEDPLPGKEDLSEAGVIRLIYHLIADQKMTTIQVADYLNALSIPPSYAISKIKKKNRGKRKINTAGIWYPGRIGSVIRNTTYKGIHDYGKRSNRDREIIRREVVSIVSEEIWDRAQEVIRSNQLEATRNTKRPNLLRGLIKCGFCGHTYMGTAFSTGPRRTDGSVRKVKAYYVCNTKAGYKGSTWPKCQSKNVPSEWIEEVVWNECVNFILNPGDAIKELQNEMGNKRSQKEEYEKEIHLASKSIEEKEIGRQNILSLYRQKLITASDVEKQLQEIMDETINLEKRIKHLNQMIDEDRLVTTHFDSAEKLLLDFRSKIEGDLSFEIRRQIVKTLVKEIIVHTVLPPDGNPKKKKADIKVKFNFERPQDNSRTGARAAFLAMSPHSSSARALLIELRSIERKSRGHCLTGSICMWRFQDRRNGSTILSRDLLVRCEWRSRKL

SEQ ID NO: 6532 - protein, 498 aa, synthetic construct
MVVRAKEERVEEVEGIGYIRQSDEREDKEDISERTQLSKIQSYCDYNGIKLVKVFKDIDYSGFRIPYTKRPGIMDALDYAESNPRLKKFVIFNLSRLTRRKNDFHKIKSKLNDLEIDLCSAMEQLDFGTATGRLVADVLVNFNEYYSDNLSDVVNDNKKTNAEKGRWNGGPAPYGLVKIPDKNFDRDGDKAVIIETMFVMALDGKGPHLIEKWTEKEGILTETGVPWTARRIRYVLQNATYAAMQKWKGVYYPLTNSATLVSWDDFQYLQKTRFGKENVWRGKERQLLSSVLRCPICGSRMHSKMTTNKKNRKYVCSNKNSTGRCPCANFEATTLNSAVVSLISKMAQKRFSPNDILPEISKEKNNDLSSLRTLQNEMRTLEDAKQKVFDDYYLHAKLSEDQFGVLMLRYEKRQKEIASLLEKIPLPQSRGYGDFDDLLGEISNAFNMLPDDKKRKSVELLVDKIVPGSPTIVKFKWGEEKQIFPTNTNKYNKKLVFF

SEQ ID NO: 6533 - protein, 492 aa, synthetic construct
MKVAIYIRVSTEDQARDGYSIRGQKKDLTEYCKANELEIANVYIDDGYSAKDTNRPKLKELLSAAEAGEFKAILVYKLDRFTRSVRDLYDLLEKLNKHGIGFISKQEKFDTTSAMGRAMIGILGVFAQFERETIAERVRMGMVQKAREGKKPGGKHPYGYDKQGQSVPEEFSILRKLRELYMDGLSYQAIAAHFTRLGVKRRKNNWTASSVALTLENPFYAGIIRFGGKMANGKYPQRKREERVEVLESDGDHEAVWTKEEFKEHIELMRRRSTGGFGRVNTYWFNGVLRCGRCGAAMYGRLTTKRSLKDGSIVRSSYYWCSNRKANKSCDMPMFRQSHVELLVLDHINQIVADQELAKANQDRIKTKELRTKEEIDEIESDIRKVNSRIDKWQYAFAEEIISAEDLRKRMDEEKKSLELLNSKLEKLKGEKKQQLPDVIMNLHDIWKVADDEEKQNLVCTIFKKITLNTEMTNVKGKKNSFFPATAEIEYR

SEQ ID NO: 6534 - protein, 555 aa, synthetic construct
MNRQSFNKIRKKTPAPNEALFTALYCRLSRDDELSGDSNSIVNQKAILKKYAEDNGFRNIHFYVDDGVSGTTFDRPDFNRMIADVESGMVGTIIIKDMSRFGRDYLKVGYYTEIMFPEAGVRFIAINNSIDSANQQDSDFTPFLNIINEWYAKDTSKKIRAVFKSKGESGKPLCTNPPYGYVKDPEDKLKWIIDEEAAEVVREIFRLCMAGFGPSQIARQLESRCVNVPTVHLRSKGINTPARPPENPYAWQSRSVADILAKMEFLGHTVNFKTFKKSYKNKTKMQNNPEDWLIFKNTHEAIIDEGTWETVQKIRDGKRRPSRMGEMGMLSGMMFCADCGAKLYQVRANGWTHDKEYFVCATYRKVKGGCSSHQIRNVVVEQLVAEDLRKVLAFAKEREAEFIRIVTNNSEKELAKELRLSQKEYDQARVRISAIDKIIQKLYEDKVLGNITEERFHKISADYEAEQKALEARNTVLKKALDTAKEQTLNTDRFLALVRKYMEIPELDAEIIREFIDRIIVFKTEKVNGRRMQRIRIIYNCIGEINIPEEDEKTA

SEQ ID NO: 6535 - protein, 570 aa, synthetic construct
MTTRRPHVYTRISKTTQTEGSGLDEQTARIEQYLKDKRHLFEGDVTYWQDIGVSAYRDMNIQHGQLSEFIKQVDEGRIGQGDALIIYSLDRLSRRSSWDETTIQHLVKKGVEIHDVSTPVVLNREDSMSKIIMELIVTRGNNESKIKSERSTAGWEKRLNDTLKDGRVFTNKLPRWLGSNDDQYVVLKNEAEIIKRIFREYTNGMSSPMIARRLNEEGTGKSLWRPNTITKLIKDERLRGNLVREKITLIPNVFPKVIDDELFVLANRILSTNAVCKKGRPRENNKTREVNNIITGLVRCGKCGSKVTTTKNGRGMRYITCLNRLNYKICGQKSIRLEEVERIVITHVKQVDLSKVLSISNADTSNEALLQAELIELKIEEQSCRVKIDERKRLKQRASLPLANALTDIQDRIEEIQSEILNLQVQEPLPDISSDSISALLDASNVELRMSLRKYLVQVVDKLTFINIGDYNIIEVQYNNNVYCHALITDKKLKVLHEVDITVSGDNTTYNSGGFSIVESESEGVCTFEGIDNVSYTDYFLLANYIGSLPEKQWIVDVIYLQQNMDAVLK

SEQ ID NO: 6536 - protein, 529 aa, synthetic construct
MARKKSKLNDNNLAIAYYRYSSHSQNEASIEQQRELAHEWADAHGLKIVREYEDAAISGTKEDRPGFQLMLSEVAKIRPNTLIAWKTDRLGRDKYVLAMAKKTIRDAGCEIHLLAENIPTDTAEGILIEGLMEALAEYYSRNLSVHIQRGMDFNAEHANFNGHKVFGFKTEKVDKKRKYVIDPDTAPFVQLMFTKYAEGEPMQSICDEFNEAGLRTSRGNPFGVKTMHRMLKNRAYIGEYRHGEFVVPGGMPALVDGETFDRAQKRLAENKRKGSQRARGMDEDGAPRYWLTGKLYCGECGETMQGVSGTSKTGRTYYYYYCSAQRKKLCTKKKVKKDWIEDLVTDVLRYIIDDSENLMSLAVDAAVYYKEHYKETGYLEGLEAKRKEVEKGIANLMKAIEGGALSDTLIERLNQLEAQKASLNDAIQAENVKVSLCEDEHSIKAYFEKFLHADFDNPETRDKILEYFVDKIYLYDEKLVVTSWYSEDKTEITWDMLKGADGDPFVKGEAAEFDCFPLGSTIGELGEHL

SEQ ID NO: 6537 - protein, 524 aa, synthetic construct
MTNKCFPYVRFSSIRQEDGSTRERQNALIDAFVSKHGLEVDRALEDAGTSAFRGLNASADGVLGGFLNQVRKGEVEKGSYLLIENFDRLSRDKIVRSNKIFTDILSAGIKIVILDRDKIFDIEHLDIGDWITALIEFERANKESERKSDFSTKAWNINRNKMRSGQIVTKKVPKWLKVEDNQFIVDLEQVNRIEQLFKLSLKYGLLEATKQYNQLYDDKLAPHQVQYILGNRKLIGEHQPKKLFWADGGKRKLKDEGMAIPNYYPQVIEPTLFYKVQEIINDRKPFTGNYNKQQYNIFRGLIYCRWCGGTIRYMNKGERDYFICTNSMGHKCILQGQQSIRGKKLFSLFFQFTYKLNIQSLIEENKDYSKIKTELLSVDNQRKKLKSSIEGFKNRLMNMIVENQSIPKSMNEVLTELESNLTALDIKHKALEEQYETATKSYNALLEVEHIDIQSIIYERTEEAIEKRVAYNLTLKSIFNGIAIDYLNDRLELEFKDGTVRYLKEGQRTPLDIPDDFDEALDIE

SEQ ID NO: 6538 - protein, 507 aa, synthetic construct
MKRVISYIRFSSEKQAKGDSLRRQSKMVTDWLKAHPEYYLDQDLSFRDLGVSGFTGKHLKGGLGDFLTAIEKGLVKAGDTLLIESLDRLSRQDVDQASELLRNILRSGVDVVTLSDGEHYTKESLRDPLSLIKSILIMQRAHEESLRKAERIQAAWDAKKEAAKAGIKISRRCPAWLKLNDDRKSFSVIPEKVETVKRCFQLRLEGKSIWEIVRTLNAEGHQTLNQYKAGKFGQTSVQDLLKNRSVIGYFTPKGCEEISGYYPAIIDETTFYKVQQLSYARYGRKPASDKPMAVNLFKGVIRCSECGHALIITGFSDTRSGIYRCPSRNENRCNAKGLSRKQTDGTLLALLSRLDRFDSDMTNTIDTLKLHREHISSNIEKLVQLSLEIEDLNAITNKLKQLKNELSQVDADIEKETQRLKSIDVGCLSDCDLTIKAGRIEAQLIIKSAVKEVVLNTAKRRCKVTFHNGKVIDLSITENPSEDVTEAIQSLSEVTERGLIDVDEVII

SEQ ID NO: 6539 - protein, 525 aa, synthetic construct
MPSAFSYVRFSSGKQAKGSSEQRQRSMLGQWLEQHPSFTLSDLRFEDLGRSGFSGEHLDHGLGQLLAAIDSGAIKSGDVILVEAVDRIGRLEPLEMLPLFSRIVRAGVSVITLEDGHVYSKDSVNETSLFLLVAKVQQAHDYSNRLSRRINASYTARREKARAGLGVKRETPVWLTTDGQLVPHVAPHIAQAFQDYADGLGERRICRKLRESGLEEFSKTNATTVRRWLKNKTAIGYWNDIPDVYPHVVDPALFYRVQQRLDAPKVDRAKPSAHYLTGLVKCAVCGRNYNFKQRKHTDPAMLCTSRARLAGEGCSNSKTYPVIVLDQVRKLTSLPFLQHAMESASSQADPSSQRLAVIDGEIGELSRKISEATKALLVLGFTPEIQESLEQLKTAREALEEERAALLLPQAEKLTAAQLEAFSNGLLDDEPMKLNHVLQTAGYSMVVHPDGSIDVDGKRFVYEGASRKEKVYKLRLLGEDKRWNLPILTPQMATYKSLFMAAVRLPGDPSEEELRRFEEAKHSER

SEQ ID NO: 6540 - protein, 506 aa, synthetic construct
MRSVITYLRFSSATQGAEGADSTRRQNELFKQWLRKNSDAQVVASFSDEGLSGYKGKHLTGQFGDMLARIESGEFPAGTILLVESIDRIGRLEHLETEALMNRILGNGIEIHTLQDGLIYTKDALADDLGISIIQRVKAYIAHQESKQKSFRVSQKWEQRAKLALAGEQRLTKMVPGWIDPDTFKCNEHAETVRLIFKLLLDGESLHNIARHLQANNISSFSRRKDANGFSVHSVRTILRSETTRGTLPASQRNDRPAIPNYYEAAIDAATFNKAQEILDKNRKGRTPASDNPLTINIFKGLFRCQCGASVHPTGTKNKYQGVYRCNNHLDGRCDVQPLKRKPFDRWMIDNFLGMIDVGNDGESERKIAALQHEVEIVTARIKKATALLLEMDDIDELKIQLKELNQKRTELQTTIDNMRRKASLTDKELPQLKDIDLTTKAGRVECQLILSKHLKGLTLGKDSVIVTLQNDTEITIPTDPLPLNDGTSIFEIAEKNLLNIDTFQL

SEQ ID NO: 6541 - protein, 507 aa, synthetic construct
MKRVISYIRFSSERQAKGDSLRRQSKMVNDWLKAHPEYYLDQDLSFRDLGVSGFTGKHLKGGLGDFLTAIEKGLVKAGDTLLIESLDRLSRQDVDQASELLRNILRSGVDVVTLSDGEHYTKESLRDPLSLIKSILIMQRAHEESLRKAERIQAAWDAKKEAAKAGIKISKRCPAWLKLNDDRKSFSVIPEKVETVKRCFQLRLEGKSIWEIVRTLNAEGHRSMNQYKPGKFGQTSVQDLLKNRSVIGYFTPKGCEEIAGYFPPIIPETDFYKVQQLSYSRYGRKPASDKPMAVNLFKGVIRCSECGHALIITGFSDTRNGIYRCPLRNENRCSAKGLSRKQTDGTLLTLLSRLDRFDSDTTNTIDMLRLHREHISSNIEKLVQLSLEIEDLSAITSKLKQLKGELSQVDADIEKETQRLKSIDVGCLSDCDLTTKAGRIEAQLIIKSAVKEVVLNTAKRRCKVTFHNGKVIDLSITENPSEDVTEAIQSLSEVTERGLIDVDEVII

SEQ ID NO: 6542 - protein, 547 aa, synthetic construct
MKLLVTYIRWSTREQDSGDSLRRQTNLIDAFYAKHKDDYYLLPAHRYVDKGKSGFHQQHKNQGSDFRRMFENVMSGVIPEGSLIVVENFDRFSRADIDTAIDDVRQILRKGVSILTLGDGELYDKSALTDPVKLIKHIIIAERAHQESLVKQKRIAQVWNHKTQLARELKKPMGKQAPGWLELSEDGSHYIVDEDKASLVNIIYDKRLSGMSMFAICKWLNEQGYPTINQRKVRISKTKKPDGNWSALSVKHILTSRSVLGYLPAKISTEDRKTVLREEIEGFYPQIVTDSKFYAVQQLLEETGKGKTSSGEHWLYVNILKGLIRCKCGLVMTPTGIRKPVYQGTYRCNGNKESRCSYGTVSRKLLDTQLCSRLFSKLSQLHDEATDTAKLDELQRRLNTVDGELEKLTETLIQLPNITQIQEALRVKQEEKDELIVQLSREKARVKSVSSLDLSGLDMESVEGRTEAQIIIKRLVKEIVVSGNEKLVDIYLHNGNMIRGFPLDGKDDHTLTLEEATDEMQSLDDMLIFGEPVTRIYPAGDMEEVDA

SEQ ID NO: 6543 - protein, 506 aa, synthetic construct
MRSVITYLRYSSAIQGAEGADSTRRQNDLFRQWLKKNIDAQVVASFSDEGLSGYKGKHLSGQFGDMLSRIESGEFPEGTILLVESIDRIGRLEHLETEALMNRILGNGLEIHTLQDGLIYTKDALADDLGISIIQRVKAYIAHQESKQKSFRVSQKWGQRAKLALAGEQRLTKMVPGWIDPETFKLNEHAETVRLIFKLLLDGESLHNIARHLQSNGIKSFSRRKDANGFSVHSVRTILRSETTIGTLPASQRNDRPAIPNYYEAAIDASTFNKAQEILDKNRKGRTPASDNPLTINIFKGLFRCQCGASVHPTGTKNKYAGVYRCNNHLDGRCDVQPLKRKPFDKWVLENFLGMIDVGNDGESERKIAALQHEVEIVTARIKKATALLLEMDDITELKTQVKGLNQKRTEIQTTIDTLKRKTSLSDKGLPQLKDIDLMTKAGRVECQLILSKHLKGLTLGKDSVTVTLQNDTEITIPTNPLPLNDGSPIFEIADKELLDVDIYRL

SEQ ID NO: 6544 - protein, 438 aa, synthetic construct
MVRREGFWLLRLFLMDEMGWGVVKKIYYIPVKKENMEPLRVAAYCRVSTKKETQLASLAHQIMAYTEQISDHPGWVFSGVFWDCVRSGLRKKGRNGLKHMLESATEGKFDYIITKSAKRVSRNTVELLQIMRYLKERGIQMYFEFENVNSFDPDAEAAITLSGAMGQEESRNLSENIQWGIQRKFEEGLFSYYKHFMGYRCVEGELVIVPEQAKKVRLIFELYLKGYTFSQIKKYLEDNGIKTVTGKEVWSANVIQQMLKNEKYKGDIMLQKTFTEDYLNGIRKKNVGQRTRYYVKGSHPAIISSEIFDKVQAEMLNRARLLRIADDNQISSGNRYSSKYLLSNLLVCGDCGGGFRRRTERGKIVWRCGTRMEKGKAECKNSSTLNDQYVRDILREVVCNGEYGENVVKDRVKRIDVYEKQLIICYAEKEKYQKCEFE

SEQ ID NO: 6545 - protein, 507 aa, synthetic construct
MKRVISYIRFSSERQAKGDSLRRQSKMVNDWLKAHPEYYLDQDLSFRDLGVSGFTGKHLKGGLGDFLTAIEKGLVKAGDTLLIESLDRLSRQDIDIASELLRRILRAGVDVVTLSDGEHYTRESLKDPLSLIKSILIMQRSHEESLRKSERIQAAWDAKKEAAKAGIKISRRCPAWLKLNDDRKSFSVIPEKVETVKRCFQLRLEGKSIWEIVRTLNDEGHQSMSQYKPGKFGQTSVQDLLKNRSVIGYFTPKGCEEISGYYPAIIDETTFYKVQQLSYARHGRKPASDKPLSVNLFKGVIRCSECGHALIITGFSDTRSGIYRCPLRNENRCSAKGLSRKQTDGTLLTLLSRLDRFDSDMTNTLDTLKLHREHISSNIEKLVQLSLEIEDLSAITIKLKQLKNELSQVDADIEKETQRLKSIDVGCLSDCDLTTKAGRIEAQLIIKSAVKEVVLNTAKRRCKVTFHNGKVIDLSITENPSEDVTEAIQSLSEVTERGLIDVDEVII

SEQ ID NO: 6546 - protein, 559 aa, synthetic construct
MKTKLYSYIRFSSMRQNDGSSYERQIRMAREVAAKYDLELVNDYQDLGVSAFKGANSKTGALSRFLDAIGRSVPVGSWLFIENLDRLSRADIVSAQELFLSIIRRGITIVTGMDNKIYSLDTVTANPMDLMFSILLFIRGNEESQTKRNRTNSSALIKIKAHQENPQNPAVAIEEVGKNMWWTDTTSGYVLPHPTYFPVVQEIVELRKNGRSTAEILDHLNETYAPPPAVSNKKHSKWSRAMVERLFHTRALIGIKEISVDGVNYELKDYYPRVIDDPTFYHLKKNIGARAWNFGDKEEVKPIPLLSGIGLLKCDHCGCAMVKVKGTNKRSDQYRYTCDATRSRRLDCEHPNWSFRGDQLEKAVLQLLADKIWIAEDKANPVPALKVQVDEISRKIDNLIALSAMTGATKELADQITTLNSERETLYNQIKMAEEEMYSVDSQGWEKLAEFDLEDVYNEERLKVRFKIKQALKRIGCSRIDRNKNLFVLEYIDGKTQRVVIENSRGTRKGQIFVDLKTINDRQILESNGLVLHPCLDMLTDKNWKPEEEIPGPLQEFGI

SEQ ID NO: 6547 - protein, 559 aa, synthetic construct
MKTKLYSYIRFSSMRQNDGSSYERQIRMAREVAAKYDLELVNDYQDLGVSAFKGANSKTGALSRFLDAIGRSVPVGSWLFIENLDRLSRADIVSAQELFLSIIRRGITIVTGMDNKIYSLDTVTANPMDLMFSILLFIRGNEESQTKRNRTNSSALIKIKAHQENPQNPAVAIEEVGKNMWWTDTTSGYVLPHPTYFPVVQEIVELRKNGRSTAEILDHLNETYAPPPAVSNKKHSKWSRAMVERLFHTRALIGIKEVSVDGVNYELKDYYPRVIDDATFYHLKKNIGARAWNFGDKEEAKPIPLLSGIGLLKCDHCGCAMVKVKGTNKRSDQYRYTCDATRSRRLDCEHPNWSFRGDQLEKAVLQLLADKIWIAEDKANPVPALKVQVDEISRKIDNLITLSAMTGATKELADQITTLNSERETLYNQIKMAEEEMYSVDSQGWEKLAEFDLEDVYNEERLKVRFKIKQALKRIGCSRIDRNKNLFVLEYIDGKTQRVVIENSRGTRKGRIFIDLKTINDRQILESNGLVLHPCLDMLTDKNWKPEEEIPGPLQEFGI

SEQ ID NO: 6548 - protein, 547 aa, synthetic construct
MKLLVPYIRWSTKEQDSGDSLRRQTNLIDAFYSKHKEEYYLLPAHRYVDKGKSGFHQQHKAQGSDFRRMFENVMSGAIPEGSLIVVENFDRFSRADIDTAIDDVRQILRKGVSILTLGDGELYDKSALTDPVKLIKHIIIAERAHQESLVKQKRIAQVWNHKTQLARELKKPMGKQAPGWLELSEDGSHYIVDEDKASLVNIIYDKRLSGMSMFAICKWLNEQGYPTINQRKVRISKTKKPDGNWSALSVKHILTSRSVLGYLPAKISTEDRKTVLREEIESFYPQIVTDSKFYAVQQLLEETGKGKTSSGEHWLYVNILKGLIRCKCGLVMTPTGIRKPVYQGTYRCNGNKESRCSYGTVSRKLLDTQLCSRLFSKLSQLHDEATDTAKLDELQRRLNTVDGELEKLTETLIQLPNITQIQEALRVKQEEKDELIVQLSREKARVKSVSSLDLSGLDMESVEGRTEAQIIIKRLVKEIVVSGNEKLVDIYLHNGNMIRGFPLDGKDDHTLTLEEATDEMQSLDDMLIFGEPVTRIYPAGDMEEVDA

SEQ ID NO: 6549 - protein, 629 aa, synthetic construct
MVKQIEVIRAQENVRRYNGKVEISQKRVAAYCRVSTDSEDQKNSYESQVKHYKEYILQHPDWQLVDIYADEGITGTQVGKRQDFQRLITDCLNGDIDYIVTKAIARFARNTLDTLKYVRLLKDKQIGVYFEEENIDTLTMDGELLLTILSSVAQQEVENISAHVKKGLKMKMQRGELVGGPRCLGYDFDWGTRQITVNQEEAKVVRYIFERYLEGMGGRVIARELEEMGVPSPRGNKSWAETTVLGIIKNEKYKGDVLQGKTFTVDPINKRRLDNYGEEDQYYIKDNHEPIITEEEFDKAQEIRLKRSGRRGRIGTTSGKQQRFSRMYAFSSMLECGFCKSILSRRSWHSGTIYHKVIWHCQVAIKKGKRHCQHSKGISESAIERAFLESFRLLYQNNDKIIDIFLQTVEEEISDNTLEIELQHIEKELAKLKKQERDIFQMKFDGRISDDLYDEKFHAIMKKKEKLLDSKINLEVSLRSDSGVKERLESFRRFLKSKQLITEFDRTVFESLVEKVIIGGVYEDGTVDPAKITFIYKSGDETSLNCKDFKDKRKNEHKPDTNNSIELYSNDANYDEKLSPQLMDNKDRGCSEVGKERGLEWIFGKKCMKKPRSSMIRMRYRPLCTLIML

SEQ ID NO: 6550 - protein, 567 aa, synthetic construct
MSRSPKAYSYIRFSTPKQAQGDSYRRQLELATEYCQKHQLQLSDKALEDFGVSAYRGSNRTNGALGRFIDAVKDGKIKEGSYLLVESVDRLSRQAIEDALRQFLEMIGLGIVIVTLIDGRVYKSGAVDITSLLVSIVSMARANDESKTKSKRSSEAWENGRKHARENNQVMKNSRLPSWLKLEEGKIIAIPERVKVVNEMFELAKSGCGYEQIAKIFLEKGYKTFGKKADWRPAGIQAVIKSESVIGVFHPHQIKDGKRIPEGDPIWGYYPAIVEPMLFNEVKHLINQRNNHSGSYRKGTYNNLFSGILRCQCGESLRYQNKGRAGSPRNYLVCPKQNITGCNLPNMLYDKVEPQLLQAVSILSEVMQRRVGENEKFLSLQEQLATLRAQLDVESRKKDKAAQSILDFDDDATFRNAFVKSKASCKVLEEKIRELENELMSLELSEKTILNLLKPEELISTEQRQLFNSQLKAVLKEIKFSYDGYDLAAVFKGLDDQFMLEQAFKPKLAGSSVRDLSGEELLRTTSEAPYIDAAWVKGEIEEYALHRKDVSSGLDDEFEDLSLQESK

SEQ ID NO: 6551 - protein, 535 aa, synthetic construct
MELKHIVNSYNVTKIIGYLRRSRQDVEREKRTGEDTLTEQKELMNKILTGIEIPYETRTEIGSGESIEGRPVFKSCLADLKSGKFQAIAVKEITRLSRGSYSDAGEIVNLLNEKRIIIITPYKIYDPRNPVDARQIRFELFMAREEFEMTRERMNGAKFTYAAQGKWISGLAPFGYKLNKRTSRLEPVDEDKVVVQLIFDIFLNGLDGKDLSYTAIATHLTKLQFTTPRGGKRWSKDSVRNILQNEAYMGRVRYKARETTKDGKKVFRPESEHIIVDDAHEPIINKEDFEAVQAKIKNKVPLLPVVTSYEPNELAGICVCSVCGKSLQKFESEYNRKNKDGTSSYFHVKLLICKINRCTSVRYEYVEEAILEYLEQLISLENNKLKAIIEKSMEAAETNNSEKTSEQMLVQANQKQKELENKLTFIFEKFESGIYTDEMFLQRKAAIEKEIADIKKLKQELSMTFEVKEKDVNEFRVNISDVVKFYKESKSRGLKNEKLRSIFDFIVLEMTEKRRGPIPAKFNIYPVLRIPSVVN

SEQ ID NO: 6552 - protein, 681 aa, synthetic construct
MNNSNNNVAIYCRVSTQMQSTDRQEEELLKYAEQKGFKITPNHIYKDVISGFSIAETRPEYDRLFACIKSGEIKKVLFWELTRLGRNSVELLKEIEKLKELDVELYFKSQNLTINSKQDLGSRILLAVLAVTATYEIELFAERSVSGKINKILMGGGVGGDNNAYGYCNDRNKKMIIKDSEAKIIKRIFTEYASGKSTIKICDGLNADKIPTSYATRTKEFRTRRNEKGLKEKEYKNFNPDTLIWKPNMISKILCKELYTGKRHVVFHKPKLMRQNSDVTEKKEHEIIFEYNKQCEDLRIISDELFTLVQQRLSEAKYNKNNAIKHENLLKDKIICGECGANFSVGNSMSNATSYVNGERTYKCYGRINRSDKPATCTNGSSIRQWRLDGLILTLSLKMFAEINLEENNNKRIDTLEIENVQARKIILQKEDILKKVKEDYKLAMKNYSKVNNEIVESLIVEATNKYEKESADLQLSIEKQRKLITTNNITIQQLKNFNQGLNINIKMDQIRNDKGLVKSMIAEYIKKIYVYRINKLWNLIVVRYTNDVEFWGTIKAARYKQEEMFYDETLCKYGIEFHTWIINNSEKCFEYDKENHLFVYNGNSSIYTDLNKGIYTYEEFNEMLYKAGWIGSYSLFDYEFGSTNIKVEKEKLTDNENMYVDWNSHNEKVLRKLKSRTRNE

SEQ ID NO: 6553 - protein, 451 aa, synthetic construct
MTKAAIYIRVSTQDQVENYSIEVQKERLEAFCKAKNWEIHNIYIDGGYSGASLDRPDLQRLLKDLKAIDAVVVYKLDRLSRSQKDTLELIEEHFLKNKVDFVSITETLDTSTPFGKAMIGILSVFAQLERETIAERMRMGHIKRAENGLRGMGGDYDPAGYLRKDGNLIINKEEAAHIQRAYDLYEQSHSITQVQEMLKLEGYKVWRFRRYRDILSNPLYIGLVSFAGNLYEGQHESIISKDQFERVQRLLERHKGNNAHKAKESLLSGLIKCEHCGESFVSYSTGISKKNPKKYYYYMCRARRFPSEYDEKCNNQNWSRPKLEALVINELKNLTIEKSRSNKKDRIVNYEKQIKDINKKIERLIELYTTNLDMDKDILNKQMNKLNEEKKKVLEKQKEATPAAEEITDDMLKDIQVAFDELDFKGKQIVINKFIKEIKIDDKNVIIEWRF

SEQ ID NO: 6554 - protein, 387 aa, synthetic construct
MTLAPPAPPTSIDRLGETTTLAVSYLRVSTKEQAERGGRDEGFSIPAQRDANLRKARDLNAIVVEEFIDAGESARKADRPELMRMIEYVTTHQVAYCIVHKVDRLARNRADDVAIHLALKDAGVILVSATENIDETPSGMLLHGIMSTIAEFYSRNLANEVAKGMTQKAATGGTVGRAPIGYLNVHKRDELGRDVPTVIPDPDRAALVRSAFEAYATGNYSTSMLHSELVDRGLTTVPTPKRPAKAPGLSTIQQMLSNPYYKGDVIFRGARYDGLHEPLVSAELWYRVQNVLTARQVSGEKTQTHEHYLKGSVYCGDCGSRLMVTHAKNGKGVVYPYFICAGRHSKRTNCVRQAMPIEHIERQVEDYYRRVQIPEHVVTALRHMLVR

SEQ ID NO: 6555 - protein, 503 aa, synthetic construct
MNNRIDAIYARQSVDKKDSISIESQIEFCKYELKGGNCKEYTDKGYSGKNTDRPKFQELVRDIKRGLIAKVVVYKLDRISRSILDFANMMELFQQYNVEFVSSTEKFDTSTPMGRAMLNICIVFAQLERETIQKRVTDAYYSRSQRGFKMGGKAPYGFHTEPIKMDGINTKKLVVNPDEAANIRLMFEMYAQPTTSYGDITRYFAEQGILFNGKELIRPTLAQMLRNPVYVQADLDVYEFFKSQGTVIVNDAADFTGMNGCYLYQGRDVKPSKKNDLKDQMLVLAPHEGIVPSDIWLTCRKKLMNNMKIQSARKATHTWLAGKIKCGNCGYALMSIFNPSGKQYLRCTKRLDNKSCPGCGKIITSELEAVVYQQMIKKLASYKTLTGRKKAAKANPKIAALQVELLHVDSEIEKLVDSLTGANNVLLSYVNVKIAELDGRKQELVKQIAELTVEAISPEQVNQISGYLDTWDNVSFDDKRRVVDLMITTVAATSDSLNITWKI

SEQ ID NO: 6556 - protein, 555 aa, synthetic construct
MNGVIYARYSSDNQREESIEGQLRECKEYAQRNGITILGTYIDRALSAKTDNRPEFQHMIKDSAKGLFDVALVWKLDRFARNRYDSARYKNMLKKNGVKVISARENISEGSEGIILEAMLEGYAEYYSAELSEKVIRGLTDNALKCKYNGGTVPLGYYIDEQQYYQIDPKTAPVVLEMFTRYSEGSTMQELVNLLNDRGMRSIRGGKITLNIMNHLLKNRRYMGEYSYRDVIKEDGIPAIVPKELFERVQEQLAKNKKAPARHKAEDDYLLSTKLYCGKCNSFMVGESGTSHTLKVHHYYRCVNTKKKKLCTKKAVKKDWIEDLVINYTMKAIMNDEVMERLVDTLMELQKKESTNLPLLKKQLAETEKGINNMLNAIQAGIFTPSTKQRLDELEETKGQLEVSILQEEMQKPMLTREQIAFFIYRFRKFDTTKREQRQRLIDSFVNAVYLYEDKVIMTFNYKDGSKTVTLAEVEGSDLSCFGAVLKDVKKHRDSLYLLGFPVLSIFLPVFSNSFSRSIPLSAKVPCIFSSNDTETTADRRYDHGKSRNEKAQSL

SEQ ID NO: 6557 - protein, 706 aa, synthetic construct
MSRTSKITALYERLSRDDDLNGESNSITNQKKYLEDYARRNGFTNIRHFTDDGFSGVNFNRPSFQELIKEVEAGNVATIIVKDMSRLGRNYLQVGFYTEVLFPQKDVRFLAINNSIDSNNASDNDFAPFLNIMNEWYAKDTSNKIKAVFDARMKDGKRCSGSIPYGYNRLATDKQTLVVDPVASEVVKRIFLLANEGKSPRAIAELLTEEKVLIPAAHAKEYHPEQYNGIKFTDPYLWGMSTIRAILSRQEYLGHTVLRKSVSTNFKLHKRKNTDEDEQYVFYNTHEPIISQELWDSVQKRKKRANRTAAKGTHSNRLSGYLYCADCGRRMTLQTHYSKKDRSVQYSYRCGGYASRVNACTAHSISADSVEALILSAVKRLSRFVLNDEEAFAKELQALWNEKQIEKPKQNKSELHRFQKRYDELSKLSRGLYENLVSGLLPERQYKQLMKQYDDEQAELETKIEETEKELTEEKANTVDIKHFISLIRKCKEPTEISDLMFAELIDKIVVYEAEGVGKARTQKVDIYFNYVGQVDIAYTEEELAEIKAQEEQIEMERLAKQREREKAYREKRKAKKLAENGGEIVKTKICPHCQKEFVPTSNRQIFCSKDCCYQARQDKTKADREAEKGNHYYRQRVCAVCGSTYWPAHSQQKFCSEECQNQNHNEKSLEFYHKKRKEKSECKDLLQTKEPVSSTNSSEIITIPA

SEQ ID NO: 6558 - protein, 557 aa, synthetic construct
MSATMIPAVIYARYSTDMQSASSVEDQIRLCAERAAREGMAVTQHYADHGISGASLMRPGIQQLLQDAMAGKFQVVFAEALDRISRDQEDIAAVFKRLSFAGVQIITLSEGAVSELHIGLKGTMNALFLKDLSDKTRRGLRGRVEAGKSGGGNSYGYDVVRKVDANGEPVRGDRKINEDQADVIRRIFNEYAAGTSPRVIAKTLNAEHVPGPTGRTWGPSTIHGNKDRGTGILNNELYIGRLVWNRLRYVKDPETGKRLSRLNPPDQWIVQDVPHLRIIDDDLWQKVKARQDATALGKHDRPKAEGFWNRRRPRFLLSGLIKCGCCGSTFVKISQQHFGCASARNKGTCENKRTIRRDVLEASVLNGLQHHLMDDELLAVFCEEYTRHLNALRMAESGNRAKDEARLTKIIRELDRMIDAICDGVPAERVKDRMIALEAERAEVEERLKAKPKEEKPLLHPSMGARYRKAVSELRATLADQSTQHEAVEILRGLIDRIVLHPDANEDSGFVMDIEGDLAGILSLCQTSKKAVGLSPDDLMQIKLVAGVGFEPTTFRL

SEQ ID NO: 6559 - protein, 616 aa, synthetic construct
MSNYNKITALYSRLSVGDEDRDGGESNSIQNQKIFLENYAKGQHLTNIRHYIDDDESGRFFDRSAYSRMIEDVESGKIGVCIMKDLTRWGRDYLQVGNAMEIFRRNNVRFIAVNNGIDSENPDTLEFAPFINIMSEWYAKDISKKVKTGIKTKGMSGKPVATEAPYGYIKDPDNKDFWIIDKEAAEVVRLIFRLFLDGKNRNQIAVYLTQEQIPTPTFYMKDRGRGTCKNKTLNENNRYKWNKATLTHILTRQEYCGDVVNFKTAKHFRDKRNHYVDRSQWHITENVHEPIIDRTDFENVQRILENAPVKRPNGDGEIHPLSGLLFCKDCGAKMHIRIDYRNGGKRHVAYCSEYHKGKAKNPKCSSPHIMDADLLMQTVADVLKKIAEYSISNRAEFEALVKKSLAMQQTDKVKKQQKRIPQITTRLEQIDKVLNKLYEDNVLGTIPQDRYEQMSQKYSEEYYSLKAELEQLREQLSAFENAGGRAQKFVKLIDRYADFTDLTPTVLNEFISRIEVHERDKKRAKQAIQHIGIYFNHIGRFENELTQLAEPTEQEIRQMREEIEEARKEKSRAYHRNYSREYRARNLEKQREYDRIKAREYRAKKKAQAAAALSAP

SEQ ID NO: 6560 - protein, 548 aa, synthetic construct
MLDQQKITILYCRLSNEDAQEGESNSIANQREYLTRYARDHGYTNLKILVDDGYTGTNFNRPGVQEGFELVKQGLVGCWLVKDLSRFGRDYLTVGQYTDIIFPSYDVRFIAINDGVDSNRGDSEGFAAIRNLFNEWYPRDTSKKVRVSLRQRGTSGKHMGKPPYGYRCDPEDKDHWILDEEAAPVVKLIFDLCIDGKGPEQIARILEEKQILTAKALYAKRKKKPMPERPYHWGNQSIVGILERQEYTGCTCNFKTYSKSYKLKKRIPNEPENMFYLPDTQEAIVSQAQFDRVQELRKNKRRPAKAERQGLFSGLLFCADCGGKLHFATSKSFEGKQDHYVCNNYKSNRGTCTAHYIREDVLREIVLERIRAVNEYIRSDVDGFQEEWLQCRRTDQERSIRDDKKKLEQAKKRLADLDVIIARLYEDYVLGNLNQDRYRKMSADYEAEQERLKLEIEVIEEWVEQREEMNDGLDAFIALTQKYVDVEELTQTIVNEYIKKIIVYAPDKSSGKRKQKVKIFFNFVDDVDIPVISEPIITQTTYEHRKTA

SEQ ID NO: 6561 - protein, 442 aa, synthetic construct
MAAYCRVSTDQEEQLLSYENQVRYYTDYINDNPLYEFAGIYADEGISATNTKKRDEFKRMIADCHARKIDMIITKSISRFARNTLDCLNYVRELKELGIGIIFEKEAINTLDAKGEVLLTILSSLAQDESRSISENSTWGIRRRFEVGQHKMSTKRFLGYDTDEDGTLIINRKQAKIVVRLFEEYLSGKTVDYIKRIFEREGVQTWNGSTKWQASTLQSMLENEKYKGDAILQKSYTTDFLTKKRAVNQGEIQKFYIEDDHEPIIESWIWECVQLEMARRKKYMEDHDTNSYSHYTEQNPFASRIVCGNCNRVFARKGWQSRNGDIRRVWQCSERYKVKGVMGCSNRHVEEATLRKVFIQAWNALLENREQAVPEWEEAMKGDDLLARYRAKKFLEWTENAQPIEELDTDLMLRVLDHIKVYEEGMLVVVFQDGTEIEYRVE

SEQ ID NO: 6562 - protein, 421 aa, synthetic construct
MKIRIMEPMQEVKQKKKRVCAYARVSTDNQKQEESLENQTASYERLIRGNPEYEFAGVYADQGISGYCESRPQFQKMLDAARAGKLDLIITKSISRFARNTVTVLKFARELKELGVGIFFEEQNINTLSGDGEMMLAVLASFAQEESRSASENNKWSIRKKFERGEAQVNTARFLGYGKAENGGLAINQKEAAVVRLVFGLTVQGVGSSRIANLLNFLGAETVMGGDWHDGTIRQMVSNEKYKGDCHLQKTYTPPGKRGKTIKNDGAVQSYYVEDNHPAIVSRELWEQAQEEVKGRYRRNDRGQKRTKDPLSGMLVCPLCGKNLRRHTEYKGTITWVCGTRMDKGVAKCKGIRVADEQVKKRGITEPTVVEEVERNGKKYYCYTSKAEWDRGGRTEGRGSETEDGGILQGINRPRRTVIKL

SEQ ID NO: 6563 - protein, 510 aa, synthetic construct
MQKTDNKMRAVIYARYSSDRQREESIEGQLRVCEDFAKTNNLLVVDTYIDRALTARTDRRPAFQKMIADCKKRQFEYILVYKLNRFSRNRYDSAVYKHKIAQYGVKVLSAMERITDDPSGILLESLIEGIAEYYSVELAENVLRGMKENALEGKANGRLPLGYQKAPDGKVIIDPSTASAVKFIFKGTAVGKRMKAIAEELNAAGYKNASGRPYNPNSFAALIRNKKYIGTYQWADTELEGVIPALIDKATWEKANGVLNSRKHKSNRVRSDRYLLTGRLVCGSCGAAYVGKSGTSHMGTTYQYYCCSNRIKRAGCKGKNFRQDQLEAWLAAKTVKTLNHPDIIRQLSNQILAVQKILENEKDPLVDGISAELKDYQKRLANSIKAIESGIVSDTISANIQQYEEKIKVLEKQLARAKLKQQPFALTASHVEFFLSALLNGDPKDQGYRTKLLDILVSHVLQCRKSAIKQIFSQIFFDLVSHIIKLQYVNDSVSDFNPFTHGHSSYCKLH

SEQ ID NO: 6564 - protein, 559 aa, synthetic construct
MSKIVAIYVRVSTGKQADRDSIPFQIQECSNYVKHFLKTENFEVFKDAGRSGKNTQRPEYQRMIEKVKSGMVSHVVVYKIDRISRNLVDFSIMYNDFKEHKVAFISLNEQFDTSSAIGEAVLKIILVFAELERKLTGERVHDIMMNRALEGKWNGARVPYGWDWDTKNRCPVHSETEAEYARMMYRLYDESHSTCVVRDYCNAHDIPTKRGGEWTSKTVADLLRNPMNVGDYRYNYRKSARGKRNDPSEVIYVKDVFPPLIDRELYERVTHQMDLNTLGLGKDGRKVVSKKTHVFGGLIVCGLCGAFYHSDSDTPRADGFLPSQYRCGAHNRKIHCKAKGTSDVKLGPFIFNYISNLVKASKSRKLLHSVSDLEQILLTGPEFEQVAGIADVGLDVTFDTIMHGFKPKRYTAAPYTVIRSGDSDALTAKRDKTIRALERLKKLFLFEDDAMSEKEYLMSKRELEGTLSDIENELSALEADTADTKYDDMSFISTASGFLIAHQIASGEHINYRELACAVDAKVLKDFVNSVIERIVLLDGRVASIEFKNGLVHEFLYRE

SEQ ID NO: 6565 - protein, 593 aa, synthetic construct
MLKAAAYLRVSTKDQNEDTQFPDIKQQAQRDNAELIEKYIFRDRISGLKDKNHRDGLNELLKLTNKDIDIVYIWEVSRLSRDPLYFDELLNTFKRKRINICFLKPMCLYLYDKDTKEEDVVSSLALNIFSKFALFEIRQKTQRTQRGKKEAILTRNESYTYKPSYGYKIENKKLVINDSDIISEKEGYKTEKEVIESIFKLYVSGKTITQIKEILNQYKIPTRSHTFLKKDTLQISDKIELPKDKIEWNRRSIHNILINSVYCGYKDSKINIKIGKDENNFDIVRTEINRINTPIIVSEEIFLSAQKQMINNKVVADKSYKNEFLIRGVIKCGYCENQYLGSGSKGKNYYLCADKTHRRSNTFIGCKNINLNTDNIDIVIWNIVKDSYISLKSTKEIDNSKNKINNNIVELGKEIEYKLNYITQIETELNTIAKRMVIADDIVFDNLNNEAKDRRRLKEKIEKEILVCKDKIAIETARISSLEKVKMNNLIIGQISNSFDLKKEAIREFIEYINVFKYDTIAILQIKYITGFINNVIYKPLTKEYLILSDMFYPFDKSNSTFLVQSYRAGEYPISHNPEYFLNTYKKEIKSIL

SEQ ID NO: 6566 - protein, 565 aa, synthetic construct
MGFKKLVNDIKIGKRRKIIAIYCRVSTDEQAEFGYSIDEQKRLLEEWCKANDYIIYKCYSDRGISGKNIKDRPALKELLSDAKEGKFDMVISWKINRVSRKLEDVLKIVNILEKNNITFKSYSEPFETDTPAGRMQFQMMALIGEFERGTIAQNVKMGMIAKAKSGNWCGGRVLGYDLVPNNSPEEEKKGKNKLEINEKEAEIVRFIFNEYSKGKGYKAITNKMNKLGYKTKKGNNFSVGSIRDILTNPVYIGEIRYNVRQNWSEKRRRNINPNPIRVKGKHEAIIDRELWDKVQLILESKKGKPSRIYDGEYLLTGILRCPKCGAGMVISRTTNTLADGTKKRIAYYCCGNWKNKGTSVCNSNTIRVDKANEYVFKKIEELVSNEAMIKAVVKNINKERKDKVKPAKRLLGDIDKELEKLDKRKRKIFEAYEDDILTKEEFQTRKDELNEKIRILEEEKKPLLNTISEDVSEEIPYEFIKDILMNFSKILNSSVSREQQKKLLHMIISEITMNESREIDSIKLNINDKLVEYLVKEGGVPIKGIPSSFMLINIGIRILNLDIVI

SEQ ID NO: 6567 - protein, 502 aa, synthetic construct
MNNKICIYLRKSRADEELEKSLGDGETLSKHRNALLKFAKEKQLNIIEIKEEIVSGDSLFFRPKMLELLKEVENNMYDGVLVMDIDRLGRGGMKDQGIILDAFKESKTKIITPLKTYDLENEMDEELTEFKTFFSRRELKTINRRMQGGRVRSVEEGNYIATNPPYGYDISFIKKSRTLKKNEFESNAVKLIFKLYIEGNGASFIANELNTLGYKTKLANNFSPSSVLTIIKNPVYIGKIAWKRKDIKKSKTPGKVKDTKLRDKSEWIIADGKHEAIIDIKTWNLAQEILKGRYHIPYQLANAPVNPFAGLITCGICGKKMVMRNVRGINRLMCTYKCGNKSYKFKPIEEECLKSLKSYLTNYTATIKNETSEDDIDIYSNQISMLKKELTTLNNQKLKLFDLLERNIYDENTFLERSKNINSRIDSINNSLCTLEKILKKKSSSTNEDDIKYFKSVLDAYDLTKDIGKKNNLLKSILYKIEYTKNNKGNDYEIKLFPKLRK

SEQ ID NO: 6568 - protein, 530 aa, synthetic construct
MIAAIYSRKSKFTGKGESIENQIQLCIDYAKNLGVNEFLVYEDEGFSGKSMDRPKFKEMLKDAKDKKFDYLICYRLDRISRNVSDFSTLIEDLNKLNISFVSIKEQFDTSTPMGRAMMYISSVFAQLERETIAERVRDNMYELARTGRWLGGMPPYGFISTQINYYDENMNQRKMYKLKVDEDTIEIVKLIFDKYLELRSLSKLYKYMYENGIKGTRGGNLDPSALSLILKNPAYVKADKSVVDYLRKFNIDVMGDIDNIHGILTYAKNTDSPIAAVAKHKGVIDSDKWIEAQRLLNANKAKAPRAGTGSKALLSGLLKCSKCGSNMRITYKNSKSGTIYYYICGTKKSLGVSACDCRNIRSDKAESKVIDELKNKSIKSIMSSYKDSKLENSKNSKNIKTEINSINNQIKEKETYIDNLVMQLAKVTESSASTFIINKLESLNNDLSNLKSQLESLNTMSIENKQVDININMLIDNLNKFNKEIDTSDINKKRLLLSTVVDYMTWDSDTDTIKVNLIGINSSNTIASGK

SEQ ID NO: 6569 - protein, 506 aa, synthetic construct
MRSVITYLRYSSAIQGAEGADSTRRQNDLFKQWLKKNSDAQVVASFSDEGLSGYKGKHLTGQFGDMLARIESGEFPEGTILLVESIDRIGRLEHLETEALMNRILGNGIEIHTLQDGLIYTKDALADDLGISIIQRVKAYIAHQESKQKSFRVSQKWKQRAKLALAGEQRLTKMVPGWIDPETFKLNEHAETVRLIFKLLLDGESLHNIARHLQSNGIRSFSRRKDANGFSVHSVRTILRSETAIGTLPASQRNDRPAIPNYYEAAIDASTFNKAQEILGKNRIGRTPASDNPLMINIFKGLFRCQCGASVHPTGTKNKYQGVYRCNNHLDGRCDVPPLKRKPFDRWMIDNFLGMIDVVSDGETERRIAALQHEVETVTARIKKATALLLEMDDITELKAQVKELNQKRTELQTTIDTLKRKTSLTDKELPQLKDIDLMTKAGRVECQLILSKHLKGLTLGKDSVTVTLQNDTEITIPTNPLPLNDGSPIFEIADKELLDIDAYQL

SEQ ID NO: 6570 - protein, 520 aa, synthetic construct
MTEKNIMVIPARKRVGSTAAKEKIKKLRVAAYCRVSTETEEQNSSYEVQVAHYTEFIKKNNEWEFAGIFADDGISGTNTKKRDEFNRMIAECMDGNIDMVITKSISRFARNTLDCLQYIRQLKDKNISVYFEKENINTMDAKGEVLLTIMASLAQQESQSLSQNVKLGLQYRYQQGKVQVNHKRFMGYTKDEDGNLIIVPEEAEIIKRIYREYLEGQSLVGIGRGLEKDSIFTAAGKPRWRPETVKKILQNEKYIGDALLQKTVTVDFLTKKRVKNEGHVPQYYVENSHEAIIPKELYLQVQEEIHRRSNIYTGEGKNKRIYSSKYALSAITFCGDCGDIYRRTYWNIHGRKEFVWRCVTRIEQGPEVCKNRTVKEDELYGAVMTAINKLLAGGNNMIKTLEENIHAVIGETTEYQISEINNLLEEKQKELIKLANKGKDYEHLADEIDELRDKRQILLVEDASLSGENERINELIEFIRKNKFRTLEYDDKLVRKIIQNVTVYEDHFVIAFKSGFEMEI

SEQ ID NO: 6571 - protein, 520 aa, synthetic construct
MKKITKIDELPKGQLPNTKLRVAAYARVSTDSDEQLESLKAQREHYERYIKSNPEWEFAGLYYDEGISGTKMEKRTELLRMIRDCKQGRIDFIITKSISRFARNTVDCLELVRKLIDIGVYIYFEKENLNTGDMESELMLSILSGFAAEESASISQNSTWSIQKRFQNGSYVGTPPYGYTNIDSEMVIVPEEAEIIKRIFAECLSGKGGGTIARGLNKDKIPTRRGNHWSAGTVIDMLRNEKYMGDVLLQKTYTDSNYNRHPNTGEKDQYYYKDNHEPIISREDFAKAQDLIDERAKMKCKGVKKNVYLNRYALSGKIVCGECGRNFRRKTNYSAGRSYIAWSCIGHIEDKESCSMLFLRDGEIKATFTTMMNKLAFSNKLILEPLFKSISQIDEESDRERMDAIDKRMEQLMEERNTLITLMAKGFLEPALFNQERNVLDSEMKNLSTEKTNLVSNSASGILRANEIKDLIDYVSADNFNGDYTEELFEEFVENIIVNSRDELTFNLKCGLSLKEKVVR

SEQ ID NO: 6572 - protein, 507 aa, synthetic construct
MKRVISYFRFSSEKQAKGDSLRRQSKLVTDWLKAHPEYYLDESLTFRDLGVSGFTGKHLKGGLGDFLTAIEKGLVKAGDTLLIESLDRLSRQAIDIASELLRRILRAGVDVVTLSDGEHYTRESLKDPLALIKSILIMQRSHEESLRKSERIQAAWDAKKEAAKAGIKISRRCPAWLKLNDDRKSFSVIPEKVETVRRCFQLRLEGKSIWEIVRTLNDEGHQTLNQYKAGKFGQTSVQDLLKNRSVIGYFTPKGCEEISGYYPAIIDETTFYKVQQLSYSRYGRKPASDKPMAVNLFKGVIRCSECGHALIITGFSDTRNGIYRCPLRNENRCSAKGLSRKQTDGTLLTLLSRLDRFDSDTTNTIDTLKLHREHISSNIEKLVQLSLEIEDLSAITSKLKQLKGELSQVDADIEKETQRLKSIDVGCLSDCDLTTKAGRIEAQLIIKSAVKEVVLNTAKRRCKVTFHNGKSITLPITENPSEDVTEAIQSLSEVTERGLIDVDEVII

SEQ ID NO: 6573 - protein, 505 aa, synthetic construct
MIAKWLLDHQDYELSKLNYSDLGKSGFHGEHVKEGGNFGKLLKAVMDGYIKRDDVVLVEAIDRTGRLPALQMLSDVIAPILRAGVSIITLDDNTTYTEASVGGPHLFMLVAKIQAAHEYSRTLSRRVEDSYKKRRKDAKEKGVAPKRMTPVWLNSDGTIREDVAPWIKTAFELYVSGVGKSTIAKRLRESGVERLAKASGPGVEGWLRNKAVIGKWETLIGTPEHHVIDDVYPLIIEPSLFYKAQVHAEKMKTQRPVKTANHFLVGLVRCGECEKNYIVQNLHGKPHSMRCRTRQSQNDCTNSHCVPKPVLDAIYRYTSVTAAVDAVQQQQMGVNEKEIVTREAELLTLAKRVEGLAEAVKQAGPMPELIEALKQSRIAREAAENALVILRSTVICPAGTGWNEMGKVWKLEADDAQRLAAMLRMVGYHITVQTTGEITSSHSDVLYRYIGVDRALDKYKLLVNGKLTLIPKGYVDDYPYHEPFQEVEGEMTWNEADYENLRLQY

SEQ ID NO: 6574 - protein, 506 aa, synthetic construct
MIAKWLLDHQDYELSKLNYSDLGKSGFHGEHVKEGGNFGKLLKAVMDGYIERGDVVLVEAIDRTGRLPALQMLSDVIAPILRAGVSIITLDDNTTYTEASVGGPHLFMLVAKIQAAHEYSRTLSRRVEDSYKKRRKDAKEKGVAPKRMTPVWLNSDGTVREDVAPWIKTAFELYVSGVGKSTIAKRLRESGVERLAKTSGPSVEGWLRNKAVIGKWETLIGTPEHTVIDDVYPPIIEPSLFYKAQVHAEKMRTQRPVKTAKHFLVGLVRCSECGKNYVMQNLHGKPHSMRCRTRQSQNNCANSYVVPKPVLDAIYRYTSVTAAIEAVKQQQLGVNEKEIVTREAELLTITKRVEGFVEAVKEAGPMPELLTALKQARIDRENAENALVILRSTVVTPSANQWREMGKVWSLEAEDAQRLAAMLRMVGYHMTVSLGGIITSSHSNTVYQYMGVDRMKDMYKMTVDGKLQLIHKAHIDDYPYHEPFQAVEGEVAWHEADYDNLRLQYQ

SEQ ID NO: 6575 - protein, 521 aa, synthetic construct
MRPKNQKENCQPNPQQTPFTPTTVRARRKVAAYARVSTDLEEQQSSYQAQIDYYTNYIQGRADWEFVGMYADEGISGTSTKHRQGFQTMITDALAGRIDLIVTKSVSRFARNTVDSLTSVRALKEAGVEVYFEKENIWTLDSKGELLITIMSSLAQEESRSISENVTWGHRRRFAEGKVMVPYASLLGYKKGDDGGLAVDEDQARIVRRIYREYLAGHSPKTIAAHLTTDGIPTPLGKKTWSVSTINSILRNEKYKGDALLQKTFTVDFLTKTTKRNDGEIPQYYVTGNHEAIIAPTVWDQVQSELARRSGRSRSFSHPFASKIECGCCGGWFGPKTWHAGSRYERRIWRCNRKYDPADDQPCATKHVTEEELIAAFEQATSQLAPPPSAEVLEAVLDQLGDTHALEAELAQAITARDAVVDEINALIRSAANTDFNPDAFEADHARLEADYQHHLSTVETIEGQLRELEAKRAAITAFHQYRSENPAISYTPEAWRALVDHATIHPDGKITITVNDGTTI

SEQ ID NO: 6576 - protein, 547 aa, synthetic construct
MKLLATYIRWSTREQDSGDSLRRQTNLIDAFYSKHKNDYYLLPAHRYVDKGKSGFHQQHKAQGSDFRRMFENVMSGAIPEGSLIVVENFDRFSRADIDTAIDDVRQILRKGVSILTLGDGELYDKSALTDPVKLIKHIIIAERAHQESLVKQKRIAQVWNHKTQLARELKKPMGKQAPGWLELSEDGSHYIVDEDKASLVNIIYDKRLSGMSMFAICKWLNEQGYPTINQRKVRISKTKKPDGNWSALSVKHILTSRSVLGYLPAKISTEDRKTVLREEIESLYPQIVTDSKFYAVQQLLEETGKGKTSSGEHWLYVNILKGLIRCKCGLVMTPTGIRKPVYQGTYRCNGNKESRCSYGTVSRKLLDTQLCSRLFSKLSQLHDEATDTAKLDELQRRLNTVDSELEKLTETLIQLPNITQIQEALRVKQEEKDELIVQLSREKARVKSVSSLDLSGLDMESVEGRTEAQIIIKRLVKEIVVSGNEKLVDIYLHNGNMIRGFQIDGKDDHTLTLEEATDEMQSLDDMLIFGEPVTRIYPAGDMEEVDA

SEQ ID NO: 6577 - protein, 547 aa, synthetic construct
MKLLVTYIRWSTKEQDSGDSLRRQTNLIDAFYSKHKNDYYLLPAHRYVDKGKSGFHQQHKAQGSDFRRMFENVMSGAIPEGSLIVVENFDRFSRADIDTAIDDVRQILRKGVSILTLGDGELYDKSALTDPVKLIKHIIIAERAHQESLVKQKRIAQVWNHKTQLARELKKPMGKQAPGWLELSEDGSHYIVDEDKASLVNIIYDKRLSGMSMFAICKWLNEQGYPTINQRKVRISKTKKPDGNWSALSVKHILTSRSVLGYLPAKISTEDRKTVLREEIESFYPQIVTDSKFYAVQQLLEETGKGKTSSGEHWLYVNILKGLIRCKCGLVMTPTGIRKPVYQGTYRCNGNKESRCSYGTVSRKLLDTQLCSRLFSKLSQLHDEATDTAKLDELQRRLNTVDSELEKLTETLIQLPNITQIQEALRIKQEEKDELIVQLSREKARVKSVSSLDLSGLDMESVEGRTEAQIIIKRLVKEIVVSGNEKLVDIYLHNGNMIRGFPLDGKDDHTLTLEEATDEMQSLDDMLIFGEPVTRIYPAGDMEEVDA

SEQ ID NO: 6578 - protein, 559 aa, synthetic construct
MKTKLYSYIRFSSMRQNDGSSYERQIRMAREVAAKYDLELVNDYQDLGVSAFKGANSKTGALSRFLDAIGRSVPVGSWLFIENLDRLSRADIVSAQELFLSIIRRGITIVTGMDNKIYSLDTVTANPMDLMFSILLFIRGNEESQTKRNRTNSSALIKIKSHQENPQNPAVAIEEVGKNMWWTDTTSGYVLPHPTYFPVVQEIVELRKNGRSTAEILDHLNETYAPPPAVSNKKHSKWSRAMVERLFHTRALIGIKEVSVDGVNYELKDYYPRVIDDATFYHLKKNIGARAWNFGDKEEVKPIPLLSGIGLLKCDHCGCAMVKVKGTNKRSDQYRYTCDATRSRRLDCEHPNWSFRGDQLEKAVLQLLADKIWIAEDKANPVPALKVQVDEISRKIDNLIALSAMTGATKELADQITTLNSERETLYNQIKMAEEEMYSVDSQGWEKLAEFDLEDVYNEERLKVRFKIKQALKRIGCSRIDRNKNLFVLEYIDGKTQRVVIENSRGTRKGRIFIDLKTINDRQILESNGLVLHPCLDMLTDKNWKPEEEIPGPLQEFGI

SEQ ID NO: 6579 - protein, 507 aa, synthetic construct
MKRVISYIRFSSERQAKGDSLRRQSKMVNDWLKAHPEYYLDQDLSFRDLGVSGFTGKHLKGGLGDFLTAIEKGLVKAGDTLLIESLDRLSRQDIDIASELLRRILRAGVDVVTLSDGEHYTKESLRDPLALIKSILIMQRAHEESLRKAERIQAAWDAKKEAAKAGIKVSKRCPAWLKLNDDRKSFSVIPDKVETVKRCFQLRLEGKSIWEIVRTLNAEGHRSMNQYKPGKFGQTSVQDLLKNRSVIGYFTPKGCEEISGYYPAIIDETTFYKVQQLSHSRYGKRSVSDKPLSVNLFKGVIRCSECGHALIITGFSDTRNGIYRCPLRNENRCNAKGLSRKQTDGTLLALLSRLDRFDSDMTNVIDALKLHREHISNNIEKLVQLSLEIEDLSAITIKLKQLKGELSQVDADIEKETQRLKSIDVGCLSDCDLTTKAGRIEAQLIIKSAVKEVVLNAAKRRCKVTFHNSKSITLPITENPSEDVTEAIQSLSEVTERGLIDVDEVII

SEQ ID NO: 6580 - protein, 507 aa, synthetic construct
MKRVISYIRFSSERQAKGDSLRRQSKMVNDWLKAHPDYYLDQDLSFRDLGVSGFTGKHLKGGLGDFLTAIEKGLVKAGDTLLIESLDRLSRQDIDIASELLRRILRAGVDVVTLSDGEHYTKESLRDPLSLIKSILIMQRAHEESLRKAERIQAAWDAKKEAAKAGIKISRRCPAWLRLNDDRKSFSVIPEKVETVKRCFQLRLEGKSIWEIVRTLNDEGHQSMSQYKPGKFGQTSVQDLLKNRSVIGYFTPKGCEEIAGYFPPIIPETDFYKVQQLSYSRYGRKPASDKPLSVNLFKGVIRCSECGHALIITGFSDTRNGIYRCPLRNENRCNAKGLSRKQTDGTLLALLSRLDRFDSDTTNTIDTLKLHREHISNNIEKLVQLSLEIEDLSAITSKLKQLKGELSQVDADIEKETQRLKSIDVGCLSDCDLTTKAGRIEAQLIIKSAVKEVVLNTAKRRCKVTFHNGKVIDLPITENPSEDVTEAIQSLSEVTERGLIDVDVVAI

SEQ ID NO: 6581 - protein, 514 aa, synthetic construct
MKKVYSYIRFSSTKQAFGDSHRRQSKAIQDWLANHPDHILDESLSFEDLGRSAFHGDHLKEGGALRAFLEAVKQGLIPPDSVLLVESLDRVSRQSISHAQETIRGILEQGITVVTLSDGETYNRQSLDDSLALIRMIILQERSHNESVIKSDRIKMAWSHKRQQFEQDGTKITGNCPGWLKLNSDKKSFSLIPHHIETIHRIFDEKLSGKSLHAIARDLNLENIPTITNKRVDTGWTPTRVRDLLLKESLIGVAYGVSDYFPPAISKEKFHAVQMIRGQGKGKKPTSRQPSSIDILKGICKCAECGSTLRQRNTKKTPEGRYPRGYLECRNRQLGRCNSKAFNRSLIEDILIQKVFPTLQYLSLKSNGDNISVTTLKADITSLEKGINNLISLAEKGLGDLDTLAQRITNNRVELESKKKNLRQAEAILSLRSDNDIQDSDRKTVEGRIKLQLAIKSFVKEIIFDYDKQEITIRLLNGKSFSGISVAREDKDFDHSSMFEVLQKSLLDVDGVCL

SEQ ID NO: 6582 - protein, 507 aa, synthetic construct
MKRVISYIRFSSERQAKGDSLRRQSKMVNDWLKAHPEYYLDQDLSFRDLGVSGFTGKHLKGGLGDFLTAIEKGLVKAGDTLLIESLDRLSRQAVDRASELLRNILRSGVDVVTLSDGEHYTSESLKDPLALIKSILIMQRAHEESLRKSERIQAAWNRKKELISEGIKISKRCPAWLRLNDDRKSFSVIPDKVETVKRCFQLRLEGKSIWEIVRTLNDEGHQTLNQYKAGKFGQTSVQDLLKNRSVIGYFTPKGCEEISGYYPAIIDETTFYKVQQLSYARYGRKPASDKPLSVNLFKGVIRCSECGHALIITGFSDTRSGIYRCPLRNENRCNAKGLSRKQTDSTLLALLSRLDRFDSDMTNTVDTLKLHREHISNNIEKLVQLSLEIEDLSAITSKLKQLKGELSQVDADIEKETQRLKSIDVGCLSDCDLTTKAGRIEAQLIIKSAVKEVVLNTAKRRCKVTFHNGKVIDLPITENPSEDVTEAIQSLSEVTERGLIDVDEVII

SEQ ID NO: 6583 - protein, 506 aa, synthetic construct
MRSVITYLRFSSATQGAEGADSTRRQNDLFKQWLKKNSDAQVVASFSDEGLSGYKGKHLTGQFGDMLARIESGEFPEGTLLLVEAIDRIGRLEHLETESLMNRIIAHGIEIHTLQDGLIYTRDALSDDLGISIIQRVKSYIAHQESKQKSFRVSQKWEQRAKLALAGEQRLTKMVPGWIDPDTFKLNEHAETVRLIFKLLLDGESLHNIARHLQSNDIKSFSRRKDANGFSVHSVRTVLRSVSAIGTLPASQRNDRPAIPNYYEAAIDAATFNKAQEILDKNRKGRTPASDNPLTINIFKGLFRCQCGASVHPTGTKNKYQGVYRCNNHLDGRCDVPPLKRKPFDKWMIDNFLGMIDVGNDGEAEGKIAALQHEVEIVTARIKKATALLLEMDDITELKTQVKGLNQKRTELQTTIDNMRRKASLTDKELPQLKDIDLTTKAGRVECQLILSKHLKGLTLGKDSVIVTLQNDTEITIPTNPLPLNDGTSIFEIAEKNLLNIDTFQL

SEQ ID NO: 6584 - protein, 506 aa, synthetic construct
MRTAITYLRYSSAIQGVEGADSTRRQNDLFKQWLKKNSDAQIVASFSDEGLSGYKGKHLTGQFGDMLARIEAGEFPEGTILLVESIDRIGRLEHLETEALMNRILGNGLEIHTLQDGLIYTKDALADDLGISIIQRVKAYIAHQESKQKSFRVSQKWEQRAKLALAGKQRLTKMVPGWIDPETFKLNEHAETVRLIFKLLLDGESLHNIARHLQSNGIKSFSRRKDANGFSVHSVRTILRSETTIGTLPASQRNDRPAIPNYYEAAIDAATFNKAQEILDKNRTGRTPASDNPLTINIFKGLFRCQCGASVHPTGTKNKYAGVYRCNNHLDGRCDVQPLKRKPFDKWVLENFLGMIDVGNDGESERKIAALQHEVEIVTARIKKATALLLEMDDIDELKIQLKELNQKRTELQTTIDSMRRKASLTDKELPQLKDIDLTTKAGRVECQLILSKHLESLTLGRGQVTVKLSNGTEIIVPTDPLPLTDGAAIFEIAEKNLLNIDTFQL

SEQ ID NO: 6585 - protein, 545 aa, synthetic construct
METTPTKRVALYIRVSTQEQALEGHSIQAQEQNGRQFAERMGYEVVEVYADEGISGKSTKNRFAYQRMMNDARNHRFDLLVIWKLTRLGRNMLDVLQTVEELLRYDVGLHSISEQFDVTTSTGKLMLQLLGSFGEFERNQIAENVQMSMQSLVKDKKRYAGGRRLGYVSGIDTNGQKQLVIEPEEAKIVRLIYAKYLGGAGYRAIANFLNRQGYQTVKKNAFSTTAVKDILRNKIYAGYLEYARYINWETKRRKGKNPKPILVKGTHEPIISEEDYQKVQERLALEGKQPKWNHTGENVLTGLLRCPECGSPMAASNVTNTLKDGTKKRIRYYSCSVFRNKGASVCHANSIRAEQAETFVADRLKEIVQLPEVLPRLVAMLNEEMVQQSQPLEQELVVLLERKEELKTKIEKWEAALEDSPELFPMLKDRLDELTEKRRQLHIRENEILGIFQQQGEPIQVKDVQRILTSLDRFLAHSEKKQIKALYRTFIEKITFDPNHKEMLEITMKFTHAVVQQLNEQYQIAVSKTKDTAIFVLKTPFTLTI

SEQ ID NO: 6586 - protein, 561 aa, synthetic construct
MVHTLTDQEEKKLYEQYKNEFFSLVTQQKLEMDEEFCIYLRKSRADIEAEARGEGETFIRHLRNLLDLALRQKIYVAEIYKELVSGETIEARPVIQHVISEVEDGKWQGVLVMEIERLARGDTIDQGTIAQTFKYSGTKIITPTKTYDPNNEFDEEYFEFGLYMSRREYKTINRRQQRGRMDSAKEGKYTGNISPFGYKRVKLEKTKGYTLEIVPEEARIVRLIYEWYTKGEPDQDGVYHRLGTALIARKLNDLGIPSAKGGVWTVPTVRDILRNPVYNGKIKFKSRPLIKKKQNGKIIKSRPRAKKEDMILVDGLHPAIVDETTWNLAQEIMSKNPRKPVSVRSKISNPLAGLVVCGVCGRKMIRRPHKGRPDTLMCQLPSCGNVSSFLDLVEQRILAGLKEWLKNYKAEWDKNVPVNNDAKNKVMELKIESKINQEKKLAELEQQLENAFDLVEQKVYDVDTFRIRSQQLKSKINDCKEALSKIEQEIALEKERTTARVRVIPQVEHVLDAYYKTDDPEIKNELLKSVLETSIYLKTKKARWNGSLDDFKVTLFPKLPQ

SEQ ID NO: 6587 - protein, 588 aa, synthetic construct
MARIKAALYARVSTEEQAKEGYSIAAQIAEIRRYADQNGFEIVDEYVDEGASGKSIAGRPQMKRLLRDANQHKFGVVIIYKIDRLARKLKDALEISETLERNNVNLISLNEKFDTTTAFGRTAFQMICSFAELERNNIVERVKLGMEQRAKEGKFNGGRVLGYDNIDKELVINENEAVIVRKIFDYANQGLGFKAITRRLNEAGFRSKKDKPFNVCGIKTILNNPVYIGKIRYKQLENWSEKRRKGKNPDYLIVDGTHEPIIAPELWESVHQKLGHRSYKPSRSHQPYILSGLLKCPVCGHGMVPARSKGAGGKSYRYYVCGQFHNKGKAVCRSNMMRADVAEEQVLQKLIKVASRPDIVRQLVDKINALRSNAEAPIMEEKKALLTELSSNSRKLQKIKDNILSDPDLAVIFKDDLKETHAKLEQLQKRLEAIEAELDGQNKKPVDPDSLHNLLSLIKDALLKADADEQKALLRLMVESIRITKDAPKRVGRQITQINLLFDFTIETLQKDSSILLTRLAAIQECDFISPLEPYVLDNLNSTHTESLRDLMKSLNILPLAMIRFPPINLHRAVNLLGQDEAHKLIFS

SEQ ID NO: 6588 - protein, 476 aa, synthetic construct
MKVAAYLRVSTDEQVESGHSLLEQRERLKAYAKVMGWDKPTFYIDDGYSAGSLKRPQLQKLIKDIESRKVNILMTTKLDRLSRNLLDLLQVIKFMETHDCNYVSATESFDTSTAAGRMVLHLLGVFAEFERGRTSERVKDNMTSLARNTNMALSGPCFGFDIIDKQYVLNKKEAKYGLKMVEMTEAGHGTRSIAQWLNSMNVKTKRGKQWDSTAVRRLLRTETICGTRIMNKRKKANGKTVMRPKEEWIIKENNHEGFISPERFKNLQNILDSRKINKQHENETYLLTGILKCGYCGGTMKGSSARVSRGDKKYEYYRYICSSYVKGSGCKHHAAHREDIENAVITQIESVTNSSDKELQLKVVASNENEDVVELKRALESLDKQMMRQIEAYGKGLIEEEDLERSNKYVKEQRQLLRNQLDSLEQINTPQALKEKAKTLLPDIKSLDRKKAKTTIAQLIDSLVLTDGELDIVWRI

SEQ ID NO: 6589 - protein, 507 aa, synthetic construct
MKRVISYIRFSSERQAKGDSLRRQSKMVNDWLKAHPEYYLDQDLSFRDLGVSGFTGKHLKGGLGDFLTAIEKGLVKAGDTLLIESLDRLSRQDIDIASELLRRILRAGVDVVTLSDGEHYTKESLRDPLALIKSILIMQRAHEESLRKAERIQAAWDAKKEAAKAGIKVSKRCPAWLKLNDDRKSFSVIPDKVETVKRCFQLRLEGKSIWEIVRTLNAEGHRSMNQYKPGKFGQTSVQDLLKNRSVIGYFTPKGCGEISGYYPAIIDETTFYKVQQLSYARYGRKPASDKPMAVNLFKGVIRCSECGHALIITGFSDTRNGIYRCPLRNENRCSAKGLSRKQTDGTLLALLSRLDRFDSDMTNTVDTLKLHREHISSNIEKLVQLSLEIEDLSAITSKLKQLKGELSQVDADIEKETQRLKSIDVGCLSDCDLTIKAGRIEAQLIIKSAVKEVVLNTAKRRCKVTFHNGKVIDLPITENPSDNVTEAIQSLSEVTERGLIDVDVVEI

SEQ ID NO: 6590 - protein, 507 aa, synthetic construct
MKRVISYIRFSSERQAKGDSLRRQSKMVNDWLKAHPEYYLDQDLSFRDLGVSGFTGKHLKGGLGDFLTAIEKGLVKAGDTLLIESLDRLSRQHIDIASELLRNILRSGVDVVTLSDGEHYTRESLKDPLALIKSILIMQRSHEESLRKSERIQAAWDAKKEAAKAGIKVSKRCPAWLKLNDDRKSFSVIPEKVETVKRCFQLRLEGKSIWEIVRTLNDEGHQTLNQYKAGKFGQTSVQDLLKNRSVIGYFTPKGCEEIAGYFPPIIPETDFYKVQQLSYSRYGRKPASDKPLSVNLFKGVIRCSECGHALIITGFSDTRSGIYRCPLRNENRCSAKGLSRKQTDGTLLALLSRLDRFDSDTTNTIDTLKLHREHISNNIEKLVQLSLEIEDLSAITSKLKQLKNELSQVDADIEKETQRLKSIDVGCLSDCDLTTKAGRIEAQLIIKSAVKEVVLNTAKRRCKVTFHNSKVIDLPITENPSEDVTEAIQSLSEVTERGLIDVDEVII

SEQ ID NO: 6591 - protein, 452 aa, synthetic construct
MKAAIYIRVSTQEQVENYSIQAQTEKLTALCRSKDWDVYDIFIDGGYSGSNMNRPALNEMLSKLHEIDAVVVYRLDRLSRSQRDTITLIEEYFLKNNVEFVSLSETLDTSSPFGRAMIGILSVFAQLERETIRDRMVMGKIKRIEAGLPLTTAKGRTFGYDVIDTKLYINEEEAKQLQLIYDIFEEEQSITFLQKRLKKLGFKVRTYNRYNNWLTNDLYCGYVSYKDKVHVKGIHEPIISEEQFYRVQEIFTRMGKNPNMNKESASLLNNLVVCSKCGLGFVHRRKDTVSRGKKYHYRYYSCKTYKHTHELEKCGNKIWRADKLEELIIDRVNNYSFASRNVDKEDELDYLNEKLKIEHAKKKRLFDLYINGSYEVSELDSMMNDIDAQINYYESQIEANEELKKNKKIQENLADLATVDFDSLEFREKQLYLKSLINKIYIDGEQVTIEWL

SEQ ID NO: 6592 - protein, 541 aa, synthetic construct
MDKMKKKLVGGYIRVSTEGQVEGYSIEGQITQIEQYCQFNGYELVDIYADRGISGKSMNRPELQRMLNDAKNGKLDCVMVYKTNRLARNTSDLLTIVEELHRQNVEFFSLSERMEVKNSTGKLMLQILASFSEFERNTILENIYTGQRQRALEGYYQGNLPLGYNNIPDNKKELMINQHEANIVKYIFESYAKGHGYRKIANALNHKGYVTKKGNPFSISAVTYILSNPFYIGKIQFAKYKDWNDKRRKGLNDKPVIAEGKHTPIISQDLWDKVQARKKQVSKKPQVHGKGTNLLTGIIVCEKCGAAYAASNTTNTLKDGTKKRIRYYSCSNFRNKGSKVCSANSVRADVIEKYVMDQILEIVKSDKVIKQVVERVNQENQVDVAALNHDIAYKQQQFDEINTKLKNLVQTIEDNPDLTSALKPTIHQYETQLNDITNQMNQLKHQQNQEKPSYDTKQIAALLQRIFQNIEFMDKSQLKALYLTVIDRIDIRKDENHKKQFYVTLKLNNEIIKQLFNNNNLDEVLLSTSSLFLPQTLYFQI

SEQ ID NO: 6593 - protein, 644 aa, synthetic construct
MLRPICYERVSSIQQIEGGGGLDDQRSALEGYLDRNSDKFSNDRIFIQDRGVSAFKNSNISSESQLGIFLQDVQNRKYGEGDALIVMSLDRISRRSSWAEDTIRFMVNSGIEVHDISASTVLRKDDPHSKLIMELIQMRSHNESLMKSVRAKAAWDRKIIEAVQNGTVISNKMPMWLKNVDNRYQVIQEKADLIIRCFEWYRDGFSTGEIVKRIADPKWQMVTVSRLVRDRRLLGEHKRYNDEIIHNVYPKVIDDDLFLTANRMMDRVMLEKNKPAEDLLLESDVVQEIFQLYESGLGSGAIVKRLPKGWSTVNVLRVLRDKNVVTQKIIDNLTFERVNQKLSMNGVANRIRKDITIAQDDYITNLFPKILKCGCCGGNIAIHYNHVRTKYVICRNREERKICDAKSIQYIRIEKNILKCVKNVDFQKLMIESTGSETSVLDGLREELSSLRREESSYNDKINERKLAGKRVGIHLNDGLTEVQDRIEEIEKEIISAQTVREIPKFDFDMDEVLDPMNIELRAKVRKQLRLVLKAVKYWMFDKRIFIQLEYFNDVLSHMLVIDNKRGGGEVMYEMSIEEKKGERIYTVHENGYAVFIASVTIGTELWSLALSRTRTIDSVGNYLSLLAREGFEIFVNEDQIDWF

SEQ ID NO: 6594 - protein, 449 aa, synthetic construct
MKQVIGYLRQSTMKQQSLAAQKQAIEAIAEKHHIQHINFYSDKQSGRKDNRSGYRQITQLIQQGQCDILCCYRLNRLHRNLKNALKLIKLCQTYHVHILSVHDGYFDMDQAFDRLKLNIFISLAELESDNIGEQVRNGLQEKAKQGRLITTHAPFGYEYHNGTFIINQNESPTVKAVFNYYIKGHGYKKIAQLLEEDNTYINRQPYQVRNIIINPNYCGRVNNQYGQFDNMFPSIVSTSIYKQAQRLRLQKQTKQTPSDNQLKQKIKCPCCNATLTNMTIRKKNHTLRYYVCPKNMNASRFVCDFKGINAQTLEDKVLEVCRDFYQNQRIYTKIKSAIDKRIKRQRNIEKHHTLTQEQLIEKLAQGIIDAETFREQTQSLRQQPQRTTSINGHQIQHIIQNIIQKRFTLNILYPYIETIHITKDKNLIGIYFKNEPLNIVNQTMQSSIA

SEQ ID NO: 6595 - protein, 548 aa, synthetic construct
MELKNIVNSYNITNILGYLRRSRQDMEREKRTGEDTLTEQKELMNKILTAIEIPYELKMEIGSGESIEGRPVFKECLKDLEEGKYQAIAVKEITRLSRGSYSDAGQIVNLLQSKRLIIITPYKVYDPRNPVDMRQIRFELFMAREEFEMTRERMTGAKYTYAAQGKWISGLAPYGYQLNKKTSKLDPVEDEAKVVELIFDLFLNGLNGKDYSYNAIATHLTNLQIPSPAGKKKWNRFTVKAILENEVYIGTVKYKVREKEKDGKRTIRPENEQIIVPDAHTPIIDKDQFEEANKKIENKIPLLPNRSDYKLNELAGVCICADCGGPLSKYEAKRKRQNKNGTESLYHVKVLRCLNNKCMNVRYNDVEEAILDYFRLFQSLNDKELTNLIEDMVHSHENKNNIKSQKQINEQFDQREKELQNKLNFIFDKYESGIYSDEIFLQRKATLDKEMKELKKAKDELNGLTDIKSGIDISKVRSQMKNLIQIYETSNDKEEKNNLLRIALEKVIVKMTAKRKGPVPAQFEITPILRFGLLTGDTLTDTKESSFS

SEQ ID NO: 6596 - protein, 520 aa, synthetic construct
MTEKNIMVIPARKRVGSTAAKEKIKKLRVAAYCRVSTETEEQNSSYEVQVSHYTEFIKKNNEWEFAGIFADDGISGTNTKKRDEFNRMIAECMDGNIDMVITKSISRFARNTLDCLQYIRQLKDKNISVYFEKENINTTDAKGEVLLTIMASLAQQESQSLSQNVKLGLQYRYQQGKVQVNHKRFMGYTKDEDGNLTIVPEEAEIIKRIYREYLEGQSLVGIGRALEKDGILTAAGKPRWRPESVKKILQNEKYIGDALLQKTVTVDFLTKKRVKNEGHVPQYYVENSHEAIIPKELFLQAQEEIHRRSNIYTGEGKNKRIYSSKYALSAITFCGDCGDIYRRVYWNIHGRKEFVWRCVTRIEQGPEVCKNRTVKEDELYGAVMTAINKLLAGGNNMIKTLEENIHAVIGETTEYQISEITNSLEEKQKELIKLANKGQDYDHLADEIDELRDKRQILLVEDASLSGENERINELIEFIRKNKFRTLEYDDKLVRKIIQSVTVYEGHFVIAFKSGIEMEI

SEQ ID NO: 6597 - protein, 479 aa, synthetic construct
MNKVAIYVRVSTKGQAEEGYSIDEQIAMLTSYCSIHKWTVYETYVDAGFSGATIDRPALSKLSRDAQKKRFNTVLVYDLKRLGRSQRNNIAFIEDILEKNDIGFISLTENFDTSTPLGKAMVGILSAFGQLDRDTIRERMMMGKIGRAKSGKPMMTSTIAFGYTYDRLTSTLNINQAEAIVVKTIFKEYLGGRSLTKLRDHLNENNILRNGKLWNYQGISRILRNPVYMGMIRFKGEVYQGNHEPIIDAETFETTQVELKKRQIETYQFNKNSRPFRAKYMLSGMIRCGYCGAPLEIILGTKRKDGSRYRRYQCVNRFPRTTKGITVYNDGKKCNSKYYEKEDIEVFVLGQVRLLQLNQAKLDKMFETINEIDVEGIEKQIDQLNNKLKRLNDLYLNDMIYLDELKRQSYALLTQKELLEKELENNPDIQKKIDKENFQRLLDTKDVTTLDYDSQKHILNRLINKVFVKDGHVKIEWKI

SEQ ID NO: 6598 - protein, 479 aa, synthetic construct
MNKVAIYVRVSTTSQAEEGYSIDEQIDKLSSYCKIKDWTVYDVYKDGGFSGGNIERPAMERLISDAKRKRFDTVLVYKLDRLSRSQKDTLFLIEEVFIKNNISFLSLNESFDTSTPFGKAMIGILSVFAQLEREQIKERLMLGKVGRAKSGKPMMFSSISFGYTYDKHAKELHINQAEAVIVKKIFLEYLSGRSLTNLRDFLNDNGFTRNGKYWDYQGLKRIMKNPVYIGMIRYNGVIYPGNHQAIIDAETFDRVQIELKRRQLQAAELQNNPRPFRTKYMLSGLLRCGYCKAPLTVVLSGKTKNGSRNIFYECYNRHPKIKKGRTIYNDGKKCNSGTYNKSYLEECVLNELRLLQQNLERIDTIYDTHPTIDVNSIENQIVSINKKLDKLNDLYLNDMLDMDMLKKQTNVLRQQKKVLENELENNNLDEIKNSKRVFKETLNISDITKLDYNIQKNIVNTLIKEIIVKSGEITIQWRI

SEQ ID NO: 6599 - protein, 430 aa, synthetic construct
MSTDQDEQLSSYENQVNYYRDYISKHEDYELVDIYADEGISATNTKKRDAFNRLIQDCRAGKVDRILVKSISRFARNTLDCIKYVRELKELGVGVTFEKENIDSLDSKGEVLLTILSSLAQDESRSISENATWGIRKKFERGEVRVNTTKFMGYDKDDNGRLIINPQQAETVKFIYEKFLDGYSPESIAKYLNDNEISGWTGKANWYPSAIQKMLQNEKYKGDALLQKTFTVDFLTKKRVQNDGQVDQYYVENSHEAIIDKDIWELVQLELARRKAYREEHQLKSYIMQNDDNPFTTKVFCKECGSAFGRKNWTTSRGKRKVWQCNNRYRVKGQIGCQNNHIDEETLEKAVVMAVELLSENVDLLHGKWNKIIEENRPLEKHYSTKLADIINKPSWEFDSYEMCQALDSITIVEDGQITVRFLEGTEVDL

SEQ ID NO: 6600 - protein, 430 aa, synthetic construct
MSTDQEEQLSSYENQVNYYREYISKHEDYELVDIYADEGISATNTKKRDAFNRLIQDCRAGKVDRILVKSISRFARNTLDCIKYVRELKELGVGVTFEKENIDSLDSKGEVLLTILSSLAQDESRSISENATWGIRKKFERGEVRVNTTKFMGYDKDDNGRLIINPQQAETVKFIYEKFLNGYSPESIAKYLNDNEISGWTGKANWYPSAIQKMLQNEKYKGDALLQKTFTVDFLTKKRVQNDGQVDQYYVENSHEAIIDKDIWELVQLELARRKAYREEHQLKSYIMQNDDNPFTTKVFCKECGSAFGRKNWTTSRGKRKVWQCNNRYRVKGQIGCQNNHIDEETLEKAVVMAVELLSENVDLLHGKWNKIIEENRLLEKHYSTKLADIINKPSWEFDSYEMCQILDSITIVEDGQITVRFLEGTEVDL

SEQ ID NO: 6601 - protein, 413 aa, synthetic construct
MSVKKIRVNKQKHRKRVCAYIRVSTTNGSQLDSLENQKQYFENLYSNRDDIDFMGVYHDRGISGSKDYRPNFQAMIEDCRRGKIDVIHTKSIARFARNTVTVLEISRELKAIGVDIFFEEQNIHTLSSEGEVMLSVLASIAEDELRSMSGNQRWAFQKKFQRGELVINTKRFLGYDIDENGELIINPEEALIVREIFALYLAGNGTHRIAKLLNEKGVATVTGAKWHDTTIRQMLSNEKYKGSVLLQKYFHDGVNGPKKLNQGELEQYLIEDNHEAIISKEDWQSVQDKLNSRRWQQGRNKTYKFTGLLKCQHCGSTLKRQVSYKKKIVWCCSKYIKEGKVACQGMRVPEVDISNWVITSPVTVIERDGNGEKYYSYSGQESADQCSSSCQEENQGSRILSSVHRPRRTAIKL

SEQ ID NO: 6602 - protein, 413 aa, synthetic construct
MSVKKIRVNKQKHKQRICAYIRVSTTNGSQLESLENQKHYFENLYSNRDDIDFVGVYHDRGISGSKDNRPNFQAMIENCRKGMIDIIHTKSIARFARNTVTVLEISRELKAIGVDIFFEEQNIHTLSSEGEVMLSVLASIAEDELRSMSGNQRWAFQKKFQRGELVINTKRFLGYDIDENGELIINPEEALIVRKIFALYLEGYGTHRIAKLLNEKGVATVTGAKWHDTTIRQMLSNEKYKGSVLLQKYFHDGVNGPKKLNQGELEQYLIEDNHEAIISMEDWQAVQVKLNSRRWQQGRNKTYKFTGLLKCQHCGSTLKRQVSYKKKIVWCCSKYIKEGKAACQGMRVPEVDISNWTVTSPVKVIERDRDGEKYYSYSGQESADQRSTSGQKESQCSRILPSVHRPRRTAIKL

SEQ ID NO: 6603 - protein, 630 aa, synthetic construct
MPQLYSYIRWSTDRQDKGTTRNRQLAAAKAYAANAGLEMVEIEDPGVSAFRGKNTNTGKLGDFIDAVKQGAIASDSWLYVENLDRITRQNVTTAQKLFIELLELGLTLVTGMDKRVYTLDSVNKNPTELMISLLLFSRANEESETKSQRTLGNVETLIERHKNGLPVNIKSVGRHPFWIDDSGSQYEAVKKHPTYWNIAREAIDMFLSGSGVYSVKKYLDQKYPNGLKGKEWDYQVLKKMRDNRALIGERIVTIKGIPYKLENYYPWLCKDEAEFLLLEERKKQSHFKSKKNSVDKIKLLSGLSILRCNKCGGTMHSFMNHGKARYICTNGVHLQKGCSGWSITAQLVEHCTMIALLIGYMDKSRRSGTDTTVLEEELNKKEILIKDFDTQISNIVTAIAIAPDVSSLAHSLNEINSKRKELVLSVEKLKERLVSLQGKGSFEVDIMEFLILIQWAVFINMEDNDRDKIRKIIDAIIEYIVVDKTEECITIRIKYYGNDEVLVFGGVDRKPHWRFDIDFDTGKEGTLTVLENDLMKMPEIQKAVGYLRKLKESYVAMYDTAVTMLSEVGYPEIKGTQFWPNTGKHEKVTVAFEGVVYTISFNGRLPKAVTSALETTGLTRQQFIDEFKIQ

SEQ ID NO: 6604 - protein, 594 aa, synthetic construct
MTRHKLYSYVRWSSDRQAKGTSLERQTNKAKEFATLHNLELVELLDAGLSAYRGKNTTQGALGGFIQAVESGAIPNDSYLFVENLDRLSRQDILTANKLFSHLLELGLTVVTGMDGKIYTKASVTANPTDLMLSILLFSRANEESATKQKRVYGNIKALVERHKAGLPTTIKTAGSHVWWTDASGDKHTAVKPHPEYWEPARKAVELFLEGYSAHAVCDYLNEHYTAPPVRVTKATNTQENGGKWSYPLLRRMKTHRALIGERTINAGGKGIQGGAVYTLENYYPALCSPTEFALLQDLNENNKLTQGPTKTRITLLSGLGVLKCGHCGGAMTFMIGANSKIRYMCSNGKDKIGSCRSWSVSLDIVERTLVPALVRGYMEYATGGGAKGDDIKASIEATQAALQELESQIDNITTAITLGGNLAPLVERMGVLSKEKDSKLVELDRLARLSLLSESEGSAIEKITDFILQIRPAVLADVNHPLRLQLREAVRAVIESCTLTKRADRGLEIEYVIKGDPHRIRYTFKATTFGNYTEVTADLDEHGKPLAYPNTEEGLRLLQTRQQMEAELFKKVDQIQEEMKLPPIDGGQLWARR

SEQ ID NO: 6605 - protein, 507 aa, synthetic construct
MKRAISYIRFSSEKQSRGDSLRRQAKMVTDWLKAHPEYYLDESLTFRDLGVSGFTGKHLKGGLGDFLTAIEKGLVKAGDTLLIESLDRLSRQDVDQASELLRNILRSGVDVVTLSDGEHYTSESLKDPLALIKSILIMQRAHEESLRKSERIQAAWDAKKEAAKAGIKVSKRCPAWLKLNDDRKSFSVIPDKVETVKRCFQLRLEGKSIWEIVRTLNAEGHQTLNQYKAGKFGQTSVQDLLKNRSVIGYFTPKGCEEIAGYYPAIIDETTFYKVQQLSHSRYGRKPVSAKPLSVNLFKGVIRCSECGHALIITGFSDTRNGIYRCPLRNENRCSAKGLSRKQTDGTLLALLSRLDRFDSDTTNTIDTLKLHREHISSNIEKLVQLSLEIEDLNAITSKLKQLKGELSQVDADIEKETQRLKSIDVGCLSDCDLTTKVGRIEAQLIIKSAVKEVVLNTAKRRCKVTFHNGKVIDLPITENPSEDVTEAIQSLSEVTERGLIDVDVVEI

SEQ ID NO: 6606 - protein, 662 aa, synthetic construct
MTKLYSYVRWSSEKQGNSTTLSRQMSSARDFAREKGLELVEIIDPGVSAYRGKNANEGKLADFISAVEGGVIDRDSWLYVENLDRITRQSPTKAQTLFIRLLDLGLTVVTGMDRRIYTLQSVNDNPTELMVSLLLFSRSHEESKTKGNRTKGNVEALVKRFRDGLPVNIKSVGKHPWWIDESGSQYEAVKKHEHYWPIAREIIDLFMAGHGAYKAKRYLDDKYPKGFVGGAEWDYQMLIRMRKSRALIGERTIVLNKKPSKKKQADQDIWSDICTEPEIKYVLKGYYPSLCTDEVEFIKLQEVRSKNAYQSKDSTGTVNIKLLSGIGILRCGRCGGTMNSFMNKGKPRYICTNGRHLQKNCTGWSVNAMLIEHCTIIALIVGYMDTDRKTGFDTDVITKQIEVLNDKLIDLDKGIANITLAIEKGLELEQLINKGMELQQERGKIIKDIDLLVQRKAVYENKGSFEIAMFDFIEMIQWNVIIDTSNEIRNKIRSVIDRIIDEVTIDKVDGCISVRIKLIGNDVVFVFAGENRKPNWKFDVEYYSSSTDKNSESDLYIRNALETDALNKIFEQLDTLRGKYQKLLKHIMNEILPVAGYPAIDGKMFWPNTSGNERVVVSYKGERHTLAVKGTLPANIAALIEDSGLKRKEFIEAYHIKNELNE

SEQ ID NO: 6607 - protein, 506 aa, synthetic construct
MRTVITYLRFSSATQGAEGADSTRRQNELFKQWLRKNSDAQVVASFSDEGLSGYKGKHLTGQFGDMLARIEAGEFPAGAILLVESIDRIGRLEHLETEALMNRIIAHGIEIHTLQDGLIYTRDALSDDLGISIIQRVKSYLAHQESKQKSFRVSEKWKQRAKLALAGEQHLTRNVPGWIDPDTFKCNEHAETVRLIFKLLLDGESLHNIARHLQSNDIKSFSRRKDANGFSVHSVRTVLRSESVIGTLPASQRNDRPAIPNYYEAAIDASTFNKAQEILDKNRKGRTPASDNPLTINIFKGLFRCQCGASVHPTGTKNKYQGVYRCNSHLDGRCDVPPLKRKPFDRWMIDNFLGMIDVGNDGEAEKEIASLQHEVETVTARIKKATALLLEMDDITELKTQVKELNQKRTELQTTINTMKRKTSLSDKGLPQLKDIDLMTKAGRVECQLILSKHLKGLTLGKDSVTVTLQNDTEITISTNPLPLNDGTSIFEIAEKNLLNIDTFQL

SEQ ID NO: 6608 - protein, 507 aa, synthetic construct
MKRVISYIRFSSEKQAKGDSLRRQSKMVTDWLKAHPEYYLDESLTFRDLGVSGFTGKHLQGGLGDFLTAIEKGLVKAGDTLLIESLDRLSRQDVDQASELLRNILRSGVDVVTLSDGEHYTKESLKDPLALIKSILIMQRAHEESLRKSERIQAAWDAKKEEAKAGIKISKRCPAWLKLNDDRKSFSVIPEKVETVKRCFQLRLEGKSIWDIVRTLNAEGHQTLNQYKAGSFGQTSVQDLLKNRSVIGYFTPKGCEEIAGYYPSIIPETDFYRVQQLSYSRYGRKPVSENPMAVNLFKGVIRCSECGHTLIINGFTEKRHGIYRCPCKQENRCNAKGLSRKQTDGTLLTLLSRIDRFEPEQINVIDTLKLQREGILKNIEKLVELSLIIDDMTAITSKFKQLKSDLSLIESDIEKENQRIKSIDTGSLSDCDLSTKAGRIEAQLIIRGVVKEAVLDTTNKRCKVVFHNGKVIDLPITENPSEAVTEAIQSLTEIASKGLLDIDEFSL

SEQ ID NO: 6609 - protein, 520 aa, synthetic construct
MKKVITIEATPTIIRSSSDDFTLKKRRVAGYARVSTDHEDQATSYESQMRYYSEYINGRDDWEFVKMYSDEGISGTNTKLRTGFKAMVEDALNGKIDLIITKSVSRFARNTVDSLTTVRQLKEVGVEIFFEKENIWTLDSKGELLITIMSSLAQEESRSISENVTWGLRKQFAEGKVHFPYTNVLGFKAGEDGAIVVDQDEAKTVRYIFQQALIGKSPYHIAKDLSEQGIPSPSGKSHWNATTIKRMLRNEKYKGDALLQKTYTIDFLTKKKNINRGELPQYYVENNHEAIVDRETFDAVQQVLDNKGRKSSTTIFSSKLVCGDCGHFFGSKVWHSTSKYRRVIYRCNEKYNGSSKCSTPHVTEEEVKQWFVLAVNQVIDNRFEVIDNLSVLLSIGSLEVIDEQIKVLETEAEVVSQLVANLVSENAIIKQDQDKYLKKYNQLTSKYEGIVQDIESLELQRMQKSKRNKELQDFIGTLEKLGKVLTDFDELLWESLVESVMINEDKGAKFKFKNGAVVAI

SEQ ID NO: 6610 - protein, 411 aa, synthetic construct
MRTVRRIQPIKSPCRPKLKVAAYARVSDSRLHHSLSTQISYYNRLIQAHPDWELVGIYYDEGISGKEQSNRQGFQNLIKDCDNGKIDRIITKSIARFGRNTVELLTTVRQLRLKNIGVTFEKENVDSLSSEGELMLTLLASVAQEESQNMSENIRWRVQKKFEKGIPHTPQDMYGYRWDGEQYQIEPNEAKVIRKVFKWYLNGDSVKQIVDKLNQEHVLTRLGNPFTVASIREFFKQEAYFGRLVLQKTYREAFSRNPKRNKGQRNKYIIENAHEPIVTKEYFELVLHEKERRYQLMHQESHLNKGIFRDKIFCSDCGCLMIVKVDSKHVKKTVRYYCRTRNRFGASSCPCRTLGEKRLLASFKSKLGIVPYKEWVENNIKHIEYDFGHRIIRVTPVKGRKYTIEIREGRY

SEQ ID NO: 6611 - protein, 507 aa, synthetic construct
MKRVISYIRFSSEKQSRGDSLRRQSKMVTDWLKAHPEYHLDQDLSFRDLGVSGFTGKHLKGGLGDFLTAIEKGLVKAGDTLLIESLDRLSRQDIDIASELLRNILRSGVDVVTLSDGEHYTRESLRDPLALIKSILIMQRAHEESLRKAERIQAAWDAKKEAAKAGIKVSKRCPAWLKLNDDRKSFSVIPEKVETVKRCFQLRLEGKSIWEIVRTLNDEGHQSMSQYKPGKFGQTSVQDLLKNRSVIGYFTPKGCEEIAGYYPAIIDETTFYKVQQLSHSRYGRKPVSAKPLSVNLFKGVIRCSECGHALIITGFSDTRNGIYRCPLRNENRCSAKGLSRKQTDGTLLALLSRLDRFDSDMTNTIDMLRLHREHISSNIEKLVQLSLEIEDLSAITIKLKQLKGELSQVDADIEKETQRLKSIDVGCLSDCDLTTKAGRIEAQLIIKSAVKEVVLNTAKRRCKVTFHNGKSITLPITENPSEDVTEAIQSLSEVTERGLIDVDVVEI

SEQ ID NO: 6612 - protein, 506 aa, synthetic construct
MRSVITYLRFSSATQGAEGADSTRRQNELFKQWLRKNSDAQVVASFNDEGLSGYKGKHLSGQFGDMLSRIESGEFPEGTILLVEAIDRIGRLEHLETEALMNRIIAHGIEIHTLQDGLIYTRDALSDDLGISIIQRVKSYIAHQESKQKSFRVSQKWEQRAKLALAGEQRLTKMVPGWIDPDTFKLNEHAETVRLIFKLLLSGESLHNIARHLQSNGIKSFSRRKDANGFSVHSVRTVLRSESVIGTLPASQRNDRPAIPNYYEAAIDVSTFNKAQEILDKNRKGRTPASDNPLTINIFKGLFRCQCGASVHPTGTKNKYQGVYRCNNHLDGRCDVQPLKRKPFDRWMIDNFLGMIDVGNDGESERKIAALQHEVEIVTARIKKATALLLEMDDITELKTQVKELNQKRTELQTTIDNMRRKASLTDKELPQLKDIDLTTKAGRVECQLILSKHLKGLTLGKDSVTVTLQNDTEITIPTNPLPLNDGTSIFEIAEKELLEIDAYQL

SEQ ID NO: 6613 - protein, 506 aa, synthetic construct
MRTVITYLRFSSATQGAEGADSTRRQNELFKQWLRKNSDAQVVASFSDEGLSGYKGKHLTGQFGDMLARIEAGEFPAGAILLVESIDRIGRLEHLETEALMNRIIAHGIEIHTLQDGLIYTRDALSDDLGISIIQRVKSYLAHQESKQKSFRVSEKWKQRAKLALAGEQRLTKMVPGWIDPETFKLNEHAETVRLIFKLLLDGESLHNIARHLQANNISSFSRRKDANGFSVHSVRTVLRSESVIGTLPASQRNDRPAIPNYYEAAIDAATFNKAQEILDKNRKGRTPASDNPLTINIFKGLFRCQCGASVHPTGTKNKYAGVYRCNNHLDGRCDVPPLKRKPFDKWMIDNFLGMIDVGNDGESERKIAALQHEVEIVTARIKKATALLLEMDDIDELKIQVKGLNQKRTEIQTTIDTLKRKTSLTDKELPQLKDIDLTTKAGRVECQLILSKHLKGLTLGKDSVTVTLQNDTEITIPTNPLPLNDGSPIFEIAEKNLLNIDTFQL

SEQ ID NO: 6614 - protein, 559 aa, synthetic construct
MKTKLYSYIRFSSMRQNDGSSYERQIRMAREVAAKYDLELVNDYQDLGVSAFKGANSKTGALSRFLDAIGRSVPVGSWLFIENLDRLSRADIVSAQELFLSIIRRGITIVTGMDNKIYSLDTVTANPMDLMFSILLFIRGNEESQTKRNRTNSSALIKIKAHQENPQNPAVAIEEVGKNMWWTDTTSGYVLPHPTYFPVVQEIVELRKNGRSTAEILDHLNETYAPPPAVSNKKHSKWSRAMVERLFHTRALIGIKEVSVDGVNYELKDYYPRVIDDATFYHLKKNIGARAWNFGDKEEVKPIPLLSGIGLLKCDHCGCAMVKVKGTNKRSDQYRYTCDATRSRRLDCEHPNWSFRGDQLEKAVLQLLADKIWIAEDKANPVPALKVQVDEISRKIDNLIALSAMTGATKELADQITTLNSERETLYNQIKMAEEEMYSVDSQGWEKLAEFDLEDVYNEERLKVRFKIKQALKRIGCSRIDRNKNLFVLEYIDGKTQRVVIENSRGTRKGQIFVDLKTINDRQILESNGLVLHPCLDMLTDKNWKPEEEIPGPLQEFGI

SEQ ID NO: 6615 - protein, 507 aa, synthetic construct
MKRVISYIRFSSEKQAKGDSLRRQSKMVNDWLKAHPDYYLDQDLSFRDLGVSGFTGKHLKGGLGDFLTAIEKGLVKAGDTLLIESLDRLSRQDIDIASELLRRILRAGVDVVTLSDGEHYTKESLRDPLALIKSILIMQRAHEESLRKAERIQAAWDAKKEAAKAGIKVSKRCPAWLKLNDDRKSFSVIPDKVETVKRCFQLRLEGKSIWEIVRTLNAEGHRSMNQYKPGKFGQTSVQDLLKNRSVIGYFTPKGCEEISGYYPAIIDETTFYKVQQLSHYRYGRKPVSDKPLSVNLFKGVIRCSECGHALIITGFSDTRNGIYRCPLRNENRCSAKGLSRKQTDGTLLTLLSRLDRFDSDMTNTIDTLKLHREHISSNIEKLVQLSLEIEDLSAITIKLKQLKNELSQVDADIEKETQRLKSIDVGCLSDCDLTTKAGRIEAQLIIKSAVKEVVLNTAKRRCKVTFHNGKVIDLPITENPSEDVTEAIQSLSEVTERGLIDVDVVEI

SEQ ID NO: 6616 - protein, 547 aa, synthetic construct
MKLLVTYIRWSTREQDSGDSLRRQTNLIDAFYSKHKNDYYLLPAHRYVDKGKSGFHQQHKNQGSDFRRMFENVMSGAIPEGSLIVVENFDRFSRADIDTAIDDVRQILKKGVSILTLGDGELYDKSALTDPVKLIKHIIIAERAHQESLVKQKRIAQVWNHKTQLARELKKPMGKQAPGWLELSEDGSHYIVDEDKASLVNIIYDKRLSGMSMFAICKWLNEQGYPTINQRKVRISKTKKPDGNWSALSVKHILTSRSVLGYLPAKISTEDRKTVLREEVESFYPQIVTDSKFYAVQQLLEETGKGKTSSGEHWLYVNILKGLIRCKCGLVMTPTGIRKPVYQGTYRCNGNKESRCNYGTVSRKLLDTQLCSRLFSKLSQLHDEATDTAKLDELQRRLNTVDGELEKLTETLIQLPNITQIQEALRVKQEEKDELIVQLSREKARVKSVSSLDLSGLDMESVEGRTEAQIIIKRLVKEIVVSGNEKLVDIYLHNGNMIRGFPLDGKDDHTLTLEEATDEMQSLDDMLIFGEPVTRIYPAGDMEEVDA

SEQ ID NO: 6617 - protein, 518 aa, synthetic construct
MKKTVYCYARVSSRGQAKDGFGISRQQKMLNDYVSTYDDSLHKRGYELGAVNWLFAEGISAYSGKNIEDGSVLKSFIDDVLDRKIINAVLVIENLDRFSRAEPIKAANLFLNLITAGCDIHEVETETIHHSSSDLSIITGGLQRAHNESKRKARLSIKNWDERIKNAIDGKAVLTHRVPSWLEVKDNGYVIKEGEKEKYNLIFQMYADGFGPAAIRDVLKERNMLINDSEPTIAHLNKIIKDERLIGKFNSTGRKKLSGLVIYPVVVDLSLFHIVDQLRKQRNPVGKIHRKANNLFAGLCICMECGRYVQVNSIEPNGESYFRCGGSLVKSDRCQERGFKYKFFENALLQHIRNFDFSSLNANESEVQIKVNHLSLELLAHIKYRDEILQDIEKEDIPDPIDRRILKNLQKKIGDVESEISNLKRLNVNVSAFDELKQYSEELRDPLNADIRLDFNIKIKRVIKSIIIKRYSDTIFLVINYIAINEKQAIVINSKNGEVMYMGVQNDDLKTVEHLIGN

SEQ ID NO: 6618 - protein, 611 aa, synthetic construct
MRTVKAYVYSRVSSMQQVDAFGLDRQISTVMDFLENAKLPVELGYRLDPNNHEVLESDKGLSGYKGHNFTKGSLGRFKERVRSGEITEGCLLIESVDRFSRKQGYDAIDEFTFLIKRNIDIVEVETGQIFSNKLEHRLSALSTSIERAYQESKRKARISKKSWKHRKEESLANGVALNNNTPDWLALSNDKKTYEIDIQRVQTITKIFELYRDGYGVTQIVNLLNKEGERYNGKGWNTVTVYNKLRDRRLNGYLVGKYPSIPKKDNESTSETEKRVLENLKIKREANENAKRIYPIVVEDDLFLKVQSMMDRNVSTKKQRSSTTKQRNLFNGLTKCHECGSPMIVQSMSNGGQYLRCYRQRTKDEKCNSKMLRYYVTDRVLLEHIKGLNLDDIYGDKSGNLSLESLNNLLSQVNNKLVVLNEKIKSASDEEELFAIMDFKRKRIAEKEDILNQINALENESEVVRLSYDYDIEEITNQDNTVLRRKTNEHIAKVVSSVKCLRMDSSYIGAYYLYDISYHKDIIKHLLLTNNDGVLLSEISINEINNQRVYSVKEDNKIVFKVESNGDVWVLHASRQKSIDELLHYINVMMVGREPEGFAYEVNEDMIEWVD

SEQ ID NO: 6619 - protein, 584 aa, synthetic construct
MNSGAGITNTKLIAIYARVSTARQEEDGTIETQLRALREFAQQNNFVVVQEYIDDGWSGDILARPSLDQLRADVTKKLWQAVLIYDPDRLARRYSYQELVMDELRERHIEVLFVTVSAPKNSEEKILHGVRGLFAEYERAKIAERFRLGKLRKVKDGHILLSEAPYGYIYIPNQGDRHGYLELLHEEARVVRMVFEWVANERLTLRHVVRRLQEIKIRPRKSARGVWNTSTLSTLLRNEAYIGEAHWGSTYAVAPEHPLKKDTYRKIKKSSRRTRPRTEWVIVTVPSIIDRALFERAGAQLDANYALSKRNKKNEYLLAGRIRCVCGRSRTGEGVLLGKHLYYRCSDRVLSFPLRGVCKERGINARIGDQLVWDKIVDLMSSPELMLSQVERWIDSKQDKAANSTSDVRPLENELASLGEQLGRHNRAYGAGLFTIEQLREYTQPIKDRIAAVELQISNSKGDTLVEKKPVLPQKEELELFADEARNTLHNLSFSQKRAILLNTVDKIVGTPSELQIYGAIPIENHVEFKTSHRHGQDATRHRIPFEFRIELPPPRTQRVILARTEKGRIISTAPPPAANGLHS

SEQ ID NO: 6620 - protein, 566 aa, synthetic construct
MTRPIKKRAVLYARYSSDMQKATSIDGQLLLCRKIAARNDLDVIGAFVDAAKSGLTENARDGYQQLLNGVRNHDFDVVIVEHFDRLSRDPATIQRLKQVFEFNGVELMDQKGVYATATDISIASLYNTIYKPQLADKVRRGHDNAVASGRIPGSYAYGYRPRPGAPGERVIDENEAKIVVRIFTEYVSGRSTRDIAADLTRQGLPSPGATRHKNKAGRTTWNHQCITGGRHGRGIIGNELYIGEIHWNVRSTILNPETQKKQKRRNPDDRHIIVKKPELRIVPQVLWDRAQKVRSGRAIHMFGPTGKPRRRPVIPRNNEHPLAGVLRCGVCNGNMRIAQSSRNGAPRAACANAHQRGTCEHTRSFDMDVLLEDVSSKMELKLLSPKAIEEAMRAWKEERKNDRKKNSEHANLERRLRTLTTEIERLSYAIANSRRKPDELLKRIDECDVERETVKERLRLLGSGSENVIPFDHPKFGDRYHSEAKRLVTALRINPKAIETRVAFRNLIDSIVVHPVRKRMPYEYTPYLNSASLSSMNLFPENRRKTREISAFVYYDNVKSEKSVSS

SEQ ID NO: 6621 - protein, 589 aa, synthetic construct
MSAHVTILRNTVLPVKFNTMNRPRLYSYIRYSSERQGKGSSIERQKSYIAEMAKQIATEYDLEIFEEYQDLGVSAYKGKNVQEGALSDFIDQVESGLIPKGSFLLIESLDRFSRQNAMQAVNLFTSLLLNGITVITGIDKQVYRQTEVNTETLQQLMFSVMLFSRANEESSTKSHRTIASALSKIRRHQERKPGDPVVAIKELGSDKWWTDSSTGYVNPHPVLFPIAKKIIQLKQDGWSNRMILQHLKNNYDGPVIGNKKSKGIWNMQHCSRILEPAIYGRKVITVNNAEYVLDDYYPAIISKDEYEALKLQVGNKGFAPNRESNPEIPLLSGIGILHCAHCSCYMVKAKSTLKNHPHAYRYQCASRDLHQDCNKWGFRASTLERTILQLIADRIFLQTKYQPSGLEGKIADIQSQLENYVLAIGSAKSPEIINSLTSQIDQLEQEKQSLIVEKRLYDESIVQMNTEGWDKFRKFDIDDALNPLRTKIRANIKTVIMRVDCSRIDKKHNLFTITYRDQHKQRIVIENNSGWKKGKIYVEAQTINDIQILESEGLILHDHIDILINRDKFMTEAKKRLDHPRTLIDELTE

SEQ ID NO: 6622 - protein, 559 aa, synthetic construct
MKTKLYSYIRFSSMRQSDGSSYERQIRMAREIAAKYDLELVNDYQDLGVSAFKGANSKTGALSRFLDAIGRSVPVGSWLFIENLDRLSRADIVSAQELFLSIIRRGITIVTGMDNKIYSLDTVTANPMDLMFSILLFIRGNEESQTKRNRTNSSALIKIKAHQENPQNPAVAIEEVGKNMWWTDTTSGYVLPHPVYFPVVQEIVELRKNGRSTAEILDHLNETYTPPPAVSNKKHSKWSRAMVERLFHTRALIGIKEVSVDGVNYELKDYYPRVIDDPTFYHLKKNIGARAWNFGDKEEVKPIPLLSGIGLLKCDHCGCAMVKVKGTNKRSDQYRYTCDATRSRRLDCEHPNWSFRGDQLEKAVLQLLADKIWIAEDKANPVPALKVQVDEISRKIDNLIALSAMTGATKELADQITTLNSERETLYNQIKMAEEEMYSVDSQGWEKLAEFDLEDVYNEERLKVRFKIKQALKRIGCSRIDRNKNLFVLEYIDGKTQRVVIENSRGTRKGRIFIDLKTINDRQILESNGLVLHPCLDMLTDKDWKPEEEIPGPLQEFGI

SEQ ID NO: 6623 - protein, 611 aa, synthetic construct
MRTVKAYIYSRVSSLQQVDAFGLDRQISTVLDFLENAKLPAELGYQLDPSNHEVLDSDKGLSGYAGHNFTKGSLGRFKERVRSGEITEGCLLIESVDRFSRKQGYDAIDEFTFLIKRNIDIVEVETGQIYSYKLDHKLSTLSTSIERAYQESKRKARISKKSWQKRKKDSVDTGIALNNNTPDWLSLSQDKKSYELDVQKVQTITKIFELYRDGYGVTQIVNLLNKEGERYNGKGWNTVTVYNKLRDRRLNGYLVGKYTTIPKKDNESTNDAEKRIIENIKIKKEANDNAKRIYPVVIEDDLFSRVQSMMDRNVSSKKQKSTTTKQRNLFNGLTKCNECGSPMIVQTMSNGGQYLRCYRQRTKDEKCNSKMLRYFETEKVLLQHIKNLNLDEIYGDEKSNQSLDTLKRLLSDVNGKIALLNEKVQSANDESELFAIMEFKRKRILEKDELIAKINSLENRCETVTLNYTYDIEQLTNQDNTVLRRKANEHIAKVISSIKCRRIDSSYIGAYYLYDITYHREVLKHILITDNSGKLISEIAISEKDNERTYQVREGGKTVFKVESNGNVWVLYASRTKTIDDLLYYITTMMVGREPDEFVYQLNEDQIEWID

SEQ ID NO: 6624 - protein, 629 aa, synthetic construct
MKKCFIYHRVSTELQLSGTGIERQEQNLKAYVERINLLAEMDDPEATIISDQGVSAFKGLNMSEGELGRWMDQVRAGMWDDSHLVLESIDRFSRQNPFQVVGYLAELDRHNITIHDVSLNMLINRGNSAMLPIVAMSAQRAYEESKIKSDRIRDGWRRKREQAFKQGTIVTNKRPQWIDIVEDKYELNDKVAIVREIFRLYQTGIGTPTIAKMLNERGSEWLFESGRLWRGESIHKLLRNKRVTGSIFISEIIRDYSSTSNPVDQKRYEMDVYPIAISKEEFNLVQELLKSRRPGAKVTGGKVLKKFYDPITNKPYLDRDGNVIELEVDTGKEIIQSNIFNGICRCARCGEAMYHNVVVAKRDSKKKGKFTEEYRYIRCIAERDGLCDNKALQYEVVEQFVIEHIKNLDFTQILKPNEINPEIELVRLKIEEEEAHIEDYKLNIERIRNTGKKIPFAVLVELEESEDRLKELKERQTTFTEVQVDTDYLKMVDPSVLFDVKNIEVRARMSAELSKILDSIQLYRTGKHYVITINYKKVEVLKHVLFVEAKKEPVLVSGVAIERFGDTVAYCTPSFSIVVEGVTSPRLINIEGEPLSIIDYSLLLNYVDAVDPNDAVGVWMRNQFNTLTA

SEQ ID NO: 6625 - protein, 541 aa, synthetic construct
MPKAISYIRFSTKIQSVGDSTKRQSKYINDWLKRNPDYYLDESLRFQDLGISGFSGANAKSGAFGEFLAAVESGYIEAGSVLLVESLDRVSRQDIDTAGEQLRKILRSGVEVVTLVDNEWYTKESLKDSLSMIKAMLVMERAHEESAMKSTRLRSVWAAKRERAAKGEIMSKRCAAWLKVSEDRSRFEFIPENVKAVQRVFQLRLEGLSHVKIAKQMNDEGFSTLNQFKSVTGGWSQSSVTELLSNRSVIGFKVPSKSMAVKGVSEIPNYYPSIITDEQFYAVQQLKQGSGRKPSSDLPLLTNLFKGVLRCSECGFIVVVAGVSAKRSGIYKCSMKSEGRCNSVGFSRLQTDRALVQGLLYNTNRLSLNRDNGSAIGTLQSELEQLQKQRERLIKLAMLADDTESMAKDLKALNSQIKDAEKAVSEVHQREQSSQLETISHLDLTLKKDRIEAQIIIKRIVKEIRLNTAQKKCDVFLHNGLKLLNFPLDRVVDGAQWLEVLPLIDGDEFDFEGFTTKPQHIALEESPEWVKEMEEQPNQPL

SEQ ID NO: 6626 - protein, 517 aa, synthetic construct
MRHVITYLRFSSKPQERGDSIRRQTDLFNRWLRANPDAEVIDQFKDEGQSAFHGRHLKGDFGRMLQNIEDGKYIAGRTVLLIESEDRLNRQKARKTESLVDLITGKGIDVICLASGKIYNAENIDELGTSIQLKIAAHIAYKQSKDKSDKVSAAWETRAKLALSGEQLLTKNVPGWIDPDSRKLNEHAQTVKDIFSLLLAGDSLHCIARHLQASGTKSFSRRRDANGFSVHSVRTILRSESTIGTLAASKHNDRPAIPDYYEAAVDVATFNKAQEILSKNRKGRTPASDNPITINLFKGLMRCQCGASVHPTGVKNTYQGVYRCNNVVDGRCMVPTIKRKAFDTWMINNAVGMLEQSGDNDTERKKAELQYQIDMLSKRIAKGSALLMELDDVAELKEEVKKHSHQRNQLQSELEKLNQRETFSDKSLPHLADIDLTTKAGRIEAQLLLSKYIKEIVVHPSTFTVTLRNGNTYESLSLVPHEVYSDEEALSIRNRMQQLIDDELGIIEPSLKGQMKW

SEQ ID NO: 6627 - protein, 673 aa, synthetic construct
MIGEETLREEIFQYDKAKFKGICVPYARFSTKGQSKVGKKSLERQLSKAREYAKRNNLFINEDLIFTDKGVSGYSNQGELSKAFKKGQMATMLLLLEEVPPEERDNVYITFHNFDRFSRMSPDAAQAHFNKILNRGFKIVTTIDNQLYDRRDKGMSNMLISIIKMTTAWQESLNKSIYITDALSRKKKVIEYLYNHPSQKGKHKHIGVVQPSIPRWIDQENITYEYIDADGSKRTDTFKKFSLNQYKAEVVRKIFELKIAGLGYTRICQKLNNDGVEVFEQGRFKKAKKWHPYAVQNIITSDKVLGHITLKEMVTEEYHCKETDEIKTKKVKKEVTSKLENYYPSVVDEEVFRLANVLKFQEKKGKPLGRIGERTNIFATFMSCYCGSTLQYSRSQINKRSNKAPVYREQLRCNNALVKNGCFDDYINYVELEQAFFKYVHHIDFREVCLVGDKSLETEIKNLQAEITYLNGQKKELKLKNSGLEKTFESAISQGLNADYVLVALNEAKKSADLIETKISDLKVRITKLQLSLDSKESDFLDIVEYSKRIKNSSTETKIMMRKKLNDFLHSKIKWMEVCSSKHSKFVILCFHDDVIRTFAYSENYANDLMFNTIKISYEVEDSQLNYELFLIYIHQIKRSLRGETEVVSNGDLIEALQRLKRKFYAGKGIDYV

SEQ ID NO: 6628 - protein, 653 aa, synthetic construct
MFDYDKSIFDGICIPYARFSTTEQDKVGRKSLERQLEEAKRYASQNNLYISDDLIFTDKGVSGFAKQGQLSKTFEKGQMALLLDVLEDVPFKERENIYLCFHAFDRFSRQHPEVAYEQFSRILKRGFNIVTTIDDCLYSSKEADLESMLISIIKMSSAHYESEVKSVYVSDAHRRRREMLEYLYNHPTQKGKHKHIGLKQSTTPRWIIESEIIYDFVDDNGVARKDSFSKFSLDEAKAEIINQIFDWKIQGLGHTKICQLLNQKQIPTFEDGNCRKAEKWHTFAISNLFKNKSTIGTFTLKTVEDEEYFCESERIFKTRSNKVDATSEMENYFPAVVTVEKYEAALKIIAMNNKGEKISEPEDKTHVFSKVLRCACGGRLVFKGTRKTGKSEKADWFEYLRCEKAILKDGCDAENIIYKDFEMAFLRFATSSNYTVFSTTQSKLKTKLKRLSIKQSYLNGEKEQLLLEAKGLNKTFESIVTQNLDATLLLDSISKNKSLLNTVQNELVKIENQVKGVEREYEKSGKPIDKRIIKKELRSEDYSKRLLMRKAVNQQLRKNVVHMEVCSTKLLKFVIVCFDDYVIRTYAYQDEFSSDLMFNFININVENLDESEAYDLIIHLFKEVRISLSGENAVITNFDLKVHLSGIKEKYLK

SEQ ID NO: 6629 - protein, 509 aa, synthetic construct
MVQRKQAISYQRFSSDRQRNNSSLDRQSDSIKSWLKQNPDVDLIDQYVDEAMSGWSGKHIEQGSLGKLLQAIEEGIVQPETLILVEHFSRLSRQNIDKTEELLRKIWQHGITIVTIRDNGLYPPSTINDMPLRIRLIVEIEQAFKESEWRSAKVKGSYVKREKDAKNGLTPRMRRPFWLNRDGTLNDHHVVIKDIFNWYMEGLGQQRIIVKLKEKYQSVPSVQKMNPSTVMRWLTSDVVRGLWRGCKVYEAAVDDTLYFNVQTVHNSRLYHNVKPDRNWPLSGLLQCGVCGRGMSIQKSKGSLPVIRCSSKQRDKSCQRKTTFPYALTHLYMFNTVRKRASRLYTQKTVTKENALRLGQIDNDLVKLRTQLKEEKQLYDEASSEGKSGRLILKIMLETDERIQDLERERDSIQSSIEASNNLFISDEANNLVLTPRNFNLEMHKLGFKIVVGEYSLNTEGLSDKAPEWQYLGYSRKKRAYEWEVLGKKYFMPTASFNEEVLMLEDKEEI

SEQ ID NO: 6630 - protein, 578 aa, synthetic construct
MNYVAYLRVSSYNQKELGDSIDGQRQSIIDWVQAKGGNILRWYTDDGVSAFKGKRNQFELMLHELENDIVKADGLIVYSLSRFSRNLLRQLEAKKLLEKKGITLVSATEALPTNQEDNFIMVSLLGLMNEHYSIQNGKVVTDRLRDTARKGYFTGGPVPYGYCSITVSGVTSKCRKKLQIFEEEADLVKQIFSLSEKGVNGKPLGVKSIAEMLNKKLQYRRGTKWNRNSVSRLLRNTAYIGDFVYNSGGREPIIVKIPAIIDRNQFDNVQDGLKSRDIFSAESRRLRSHCLLTGLLKCQVCGGSMVVTSGKSGKYSYYQCSKQVRHAPDTCTSKRIRRDIVERVVKQKFIGELLKEDHLKKIHTRTRLRIKDANRTLVSDKSRLSKRKSNLETRYSRLIMMVADGELAPDERINKNLSEISAQIDALEHELARLSVRINFPVKNFGDARLQDFAVAVQEYLMDADDEKIKQLMLSTVTSVKVVEGAKKLIFEGSNMAVLYLIANAKTGTEFSVPVFVTKWRRDRDLNPRYAINVCRFSRPVLSTTQPSLRCGRYNKEHSPTCKVLNYNRSTVCLFYDH

SEQ ID NO: 6631 - protein, 555 aa, synthetic construct
MRFVAYLRISSYSQREKGDSIDGQREYIQRWAKSNGHEIVHWYVDEAASAFKGRRFVFDVMLHELSEQIIDANGVVVYSLSRFSRNLKNQLLAMEVLEKKGMILQSASEALPSEPSSFKFMTNILGILHEHQSRENAAVVSDRLRDTARKGFHTGGPLLFGYQSVSVKGDTSKERKKLVVKSDEAEVVKEIYSLSDIGLNGKGLGVKEIAKILNDKKITNRGKRWNKNTIHRILTNSAYKGEFEFGKTQKNEPGKNIIKIPVPKIVSKELYNRVQNKLSERQVAYNNVKSLRSSSLLTGTLRCPVCGSTMVISTGKGGKYKYYQCSLQVRQDPKLCSSKRLRKNEADNALRKALLEHVFTYKHLANIYNDTLEIVKNKKKVSDEKLRPIRNQISSLKTKVRNLVDLIADGKIEPNPAINRNMDEYNAQIALYEEKLDSYKSLASIPIKRFGKAQISSFVDNVQQYVKEANDEKLKQFLLATITEVTITEQKKLVLKGSNLALLYLISNEKVGTDYSVPTFVTIWRRDRDLNPRYAINVCRFSRPVLSTTQPSLRC

SEQ ID NO: 6632 - protein, 626 aa, synthetic construct
MSVDIEQIHQEKLAYSYIRYSSKRQEFGDSFRRQTQQTKDFCEKYGYTLANQFEDLGVSGFKDDQEALQAFIRDCESGKIKKGSLLIVESLDRLSRKQTKIALRQMLQILEYVDVYSHHEQKFYRSEADNSDNQMIDLMMSIMVMSRAYNESFAKQKRLKEAWDAARNKAKKGIGKVKGSLPHWLSLSPDATKFIIKEDRTDIIFTMFELSASGMGSTQIIKFLNKNIDKYPSPSPKTKLWVRSTVKRILGDKRLLGEHQFFKADPTNVKKKIPAGDVIPDYFPQVIDEELFYEVQSGMRSRKIKAGRVSSTHFPNVFRHILKCGCCGASMSYVNKGLMNAKVRKPTKYLACSVAKRSDECSQSKHFRYEPIEHMLIHLATANGFMPKVESSADLTVRYEKLLATHEKEQKQLEMLLSRDLTSQIIMDKISALDKSVQRISSEIQALEDLIAANKGQYEYKDLYRDLVLLDDEIMKYSNRAQFNSHMQQEIDLAYLYHRYGQPHLVFKMKSGLVHAALLDQQGTFGGCSLEDGSDTFKRLEGKNSLEDDARLWKLLKYVGDISDDVENADLYAHHRSQIHDLMSKLSAKLSKYVQKPTDESLFEEIYELSDRVYAEIGKNEKVFIE

SEQ ID NO: 6633 - protein, 545 aa, synthetic construct
MNKYHLYQRVSKQIQAEEGQGIQRQEQACEHWISDYNKRLLSEGKSAYSKGLIYEDRGKSAYTAANFKRGELGALINDIENGKIEKGDLIVIELIDRFSRANVDFVRSQFQRIIDAGVKIAITKWNLVFEENMESVSSVTGRILLEIGMYLAYQESSQKSSRIKASRKLLEDSGRKSIAKPPFWLARNLDLKSYTIIEENAEIIRKIFDLKLNFNYGPQKIIKSLGDLDIYRYSFDENGNLIKTTKNSPLSESSINAYIRNTNVIGKLDGKDYYPRIIDDRTFYAVQKRTRENTGGVGEIFRNVFVGVGKCGCLIRKENENGCGSLAKCGYIMAFSSRKVKNPTKGMYLKCNRKRKSTKCDSENINYHLAQNKIYNVLKSLKFDIDQSVDISHLEEKINTIDKSMSKIREYMTQYSDDEEWENQYKIKRMEREKIENEIKASKSRITGKLSNLDIDFSKEKDRVLFNQFLKDNRITVYFTKERMEIIIGSLNNFSIKCGYDDSSRDIDHIIESYSKNGLVGIEEKVGKSEGKGLLRFNLPTVSGS

SEQ ID NO: 6634 - protein, 643 aa, synthetic construct
MLYAYCRVSSGKQLEGLSMSLQGDEALLSRIAKEYHTTVSDRIYIDEGVSSYKGKNLESGQLGEIVRDIEKGRIKKGDIIVMRALDRLSRQELTDSENLYNRIVGAGVNIYTTIDNHLYKPNCVHSAILKTLALNTAHEESAKKAYLTNRYALHRIEEFQRGEKPENGTAWDIGVGKHPFWIQLDNKVVQPHRLYFQAAKDIVKLIIDGKGNREIMRYLEENHPRYDKDGERIEWSYSLVASFHRKEALTGLRSVKLEDIEYKLEDYYPRVCTELEFHQMSLRKEEKYVSNGNRARPTLLGGIRRLYCSCGRAMGGITPKDSPAFYRCLHILNPCISYISLRVVDRIVLDAIQTHVFESEKFDDTLLNELLSKADLMRIKYSKQESMLMSDPDLFTPEFKQQLRKSKLEIEQVEQEIMAERKKHAVIEDVDLKSYAEWQAAISEFQEQRDDEEIIKLRDKVQKLVRRIDIDGQLITITMVDGKKIYRHIVKDNTHDTVYCKVHVVDSETLEMVTLTNPALSDVYCLESELERFKSACNINQTFITRIAIREKTDHLGIVQQAVSDYLDEHDVLRWRRSDVMKLGVTTTQWQMFKEPEHMSGTGVVIEELKYKDKNYAKKSAVVAYKRYNEQAILNLLNARSLI

SEQ ID NO: 6635 - protein, 575 aa, synthetic construct
MTKIAYSYTRLSTEKQIKGHGFTRQREAIEKVCCQHGWQLSDQTFNDLGVSAWKGANATTGALSQFIDLAKKGAIRPNSVLIVESVDRLSRQQVDKSLRLMLELLEVGVSIFTLSDSKLYTTNSDSVMLDLMMWLMTAQRAHEESEIKSLRVRAAKKKNKELIRKGIIVTRKCPEWLTVSDDKSCFLVNNERAEIVRKIFTWYSQGFSTKPIALKLNELGIPYWGKSSTWSYRHIRSLLKHRGVIGEIQLLKRIDGRDVADGDPVEDYYPAIIDRGLWATCQQIKSSKTTAKGRVVERGMANLFRGLLKCECGSGLAINSSTVKGRTYRFLRCSQLKTTGCQAKNWHYEKTERILLIALRRFLSSFNEEGHESAVKEAETKCALLREELMEKQRQATKLLEMLLEKDSDLMRERFDSIETQVNSLKDALKLADERAEALSYEKDIAFDKVDKLQSVLEEIANDDDARHKANGLLRRMLDTITLGAAPNPRSSVFKEFSDKEYQGLMLIKRRDGHEIKVEVLNDYKMAIAWDGDDFTVIECMPIQQFKSQTNPQNVIAISGQSIDLLNDDGWVSTF

SEQ ID NO: 6636 - protein, 545 aa, synthetic construct
MNKYHLYQRVSKQIQAEEGQGIQRQEQACEHWISDYNKRLLSEGKSAYSKGLIYEDRGKSAYTAANFKRGELGALINDIENGKIEKGDLIVIELIDRFSRANVDFVRSQFQRIIDAGVKIAITKWNLVFEENMESVSSVTGRILLEIGMYLAYQESSQKSSRIKASRKLLEDSGRKSIAKPPFWLARNLDLKSYTIIEENAEIIRKIFDLKLNFNYGPQKIIKSLGDLDIYRYSFDENGNLIKTTKNSPLSESSINAYIRNTNVIGKLDGKDYYPRIIDDRTFYAVQKRTRENTGGVGEIFRNVFVGVGKCGCLIRKENENGCGSLAKCGYIMAFSSRKVKNPTKGMYLKCNRKRKSTKCDSENINYYLAQNKVYNVLKSLKFDIDQSVDISHLEEKINTIDKSMSKIREYMTQYSDDEEWENQYKIKRMEREKIENEIKASKSRITGKLSNLDIDFSKEKDRVLFNQFLKDNRITVYFTKERMEIIIGSLNNFSIKCGYDDSSRDIDHIIESYSKNGLVGIEEKVGKSEGKGLLRFNLPTVSGS

SEQ ID NO: 6637 - protein, 514 aa, synthetic construct
MNNNKALAVLYVRFSTKKQEAGDSQRRQIESAAQWCERNNAELSAQTYEDLGVSAFKEGGKRPALEDLINAIRMGKIPRDSYLLIEDHDRLSRRGWRYTQDLVYQLVQLGVRLVMLKTGVVYDANNINNIADNIVLMISAERAHQESERKSHLIKASREKARRDKKVTGKLPAWVSRDGDGFTFNDKKATIQELINCKLSGKSHQSTAKHLNSLKMTTGNDSAWSASGVRAIVQNHALYGAKAYFDTGKDGRMNKDPIEIVSDIFPALITHEQYQVLNKRQQAGRTSKRGAYSRLLKCGACGGAMTTRTSNYKGKPRAYKMCVKATEGSCNQVERIREPEVYLNEALHYLKYESSSTLYVSRTSEYQQRLETLNATVDLLTKNGNIEALARVYTDIKEVSDLIEESKVLDQNNVDVKVDFSLISSIEDVEQRNIELRKVLREIRFYCIEKVGQTSKWKIVIEQINGIKKYLVLDQKYGFGNTVVDYASLLTQGTEDNREPWEIEDSEEWESYSY

SEQ ID NO: 6638 - protein, 515 aa, synthetic construct
MTKAYSYIRFSTKGQIEGRSLQRQLETARKYAEENGLELQSLSFQDLGVSGFKGRNSEQGALSQFIEAVKEGTIPEGSWLLLESFDRMSRQPVEKSMRLLMELVELGITVVTLMDKQVYRRGQLDMTKLIISLVIMSRAHEESAAKSKRLADVWHAKQAVAHLKPLGTHLPAWLEYNEDKTKIQINYEKAVVVRYIFELSANGYGRSALIRKLNSQGIAPIGSRAKRWHLSYVTKLLNNTAVLGEYIPHVTDKLGQRVPTGEVIENYYPPIIEKDLWLRAKAAAQSRKIRGTGAIRRGHTRNILSGMVSCECGSSMQFVNKGSSDKGGYYLVCSTARHGAGCQYIGHRYYSVQWVVLIALQKLLHTFANKTDNHEKEMQLEGELVELDRKLNNLINDLEENGSSNYISAAIRKTEQRMDIVKNELLILQSSKAVENDEVDLQEITLRLNENFERLRLHQYLKRHIANIVVYKNKERLEISLKTGEDITLTFNTSDSLWQTNTGISFRVTFDTRWG

SEQ ID NO: 6639 - protein, 574 aa, synthetic construct
MTKIAYSYTRLSTEKQIKGHGFTRQREAIEKVCCQHGWQLSDQTFNDLGVSAWKGANATTGALSQFIDLAKKGAIRPNSVLIVESVDRLSRQQVDKSLRLMLELLEVGVSIFTLSDSKLYTTNSDSVMLDLMMWLMTAQRAHEESEIKSLRVRAAKKNKELIRKGIIVTRKCPEWLTVSDDKSCFLVNNERAEIVRKIFTWYSQGFSTKPIALKLNELGIPYWGKSSTWSYRHIRSLLKHRGVIGEIQLLKRIDGRDVADGDPVEDYYPAIIDRGLWATCQQIKSSKTTAKGRVVERGMANLFRGLLKCECGSGLAINSSTVKGRTYRFLRCSQLKTTGCQAKNWHYEKTERILLIALRHSLSSFSEEDHAVSLRECQHYLARISEELKEKERQAENAINYLLDKPSKLLEARLQTLEDDIARLKAIQEQAEHRLEAVHYEKSTALDKVEELQRVLEDIANDDDSRHKANGLLRRLIDTITLGSISNPRSKEFMEVSGNDYHGLIIIKRRDGLELRIEVLKDYGLSISWEGDDFTVIECSPTQQLNSQHVSQRLINLGGQTVDLWDDEGWVASS

SEQ ID NO: 6640 - protein, 545 aa, synthetic construct
MNKYHLYQRVSKQIQAEEGQGIQRQEQACEHWISDYNKRLLSEGKSAYSKGLIYEDRGKSAYTAANFKRGELGALINDIENGKIEKGDLIVIELIDRFSRANVDFVRSQFQRIIDAGVKIAITKWNLVFEENMESVSSVTGRILLEIGMYLAYQESSQKSSRIKASRKLLEDSGKKSIAKPPFWLARNSDLKSYTIIEENAEIIRKIFDLKLNFNYGPQKIIKSLGDLDIYRYSFDENGNLIKTTKNSPLSESSINAYIRNTNVIGKLDGKDYYPRIIDDRTFYAVQKRTRENTGGVGEIFRNVFVGVGKCGCLIRKENENGCGSLAKCGYIMAFSSRKVKNPTKGMYLKCNRKRKSTKCDSENINYYLAQNKIYNVLKSLKFDIDQSVDISHLEEKINTIDKSMSKIRDYMTQYSDDEEWENQYKIKRMEREKIENEIKASKSRITGQLSNLDIDFSKEKDRVLFNQFLKDNRIKVYFTKERMEIIIGSLNNFSIKCGYDDSNRDIDHIIESYSKNGLVGIEEKSGKSEGKGLLRFNLPTVPGS

SEQ ID NO: 6641 - protein, 507 aa, synthetic construct
MKRVISYIRFSSERQAKGDSLRRQSKMVTDWLKAHPEYYLDQDLSFRDLGVSGFTGKHLKGGLGDFLTAIEKGLVKAGDTLLIESLDRLSRQDIDIASELLRRILRAGVDVVTLSDGEHYTKESLRDPLSLIKSILIMQRAHEESLRKAERIQAAWDAKKEAAKAGIKVSKRCPAWLKLNDDRKTFSVIPEKVETVKRCFQLRLEGKSIWAIVKALNDEDRQSMNQYKPGKFGQTSVQDLLKNRSVIGYFTPKGCEEISGYYPAIIDETTFYKVQQLSHSRYGRKPASAKPLSVNLFKGVIRCSECGHALIITGFSDTRNGIYRCPLRNENRCSAKGLSRKQTDGTLLALLSRLDRFDSDTTNIIDTLKLHREHISSNIEKLVQLSLEIEDLSAITSKLKQLKGELSQVDADIEKETQRLKSIDVGCLSDCDLTTKAGRIEAQLIIKSAVKEVVLNTAKRRCKVTFHNGKAITLPITENPSEDVTEAIQSLSEVTERGLIDVDEVIV

SEQ ID NO: 6642 - protein, 547 aa, synthetic construct
MKLLVTYIRWSTKEQDSGDSLRRQTNLIDAFYSKHKNDYYLLPAHRYVDKGKSGFHQQHKNQGSDFRRMFENVMSGAIPEGSLIVVENFDRFSRADIDTAIDDVRQILRKGVSILTLGDGELYDKSALTDPVKLIKHIIIAERAHQESLVKQKRIAQVWNHKTQLARELKKPMGKQAPGWLELSEDGSHYIVDEDKASLVNIIYDKRLSGMSMFAICKWLNEQGYPTINQRKVRISKTKKPDGNWSALSVKHILTSRSVLGYLPAKISSEDRKTVLREEIEGFYPQIVTDSKFYAVQQLLEETGKGKTSSGEHWLYVNILKGLIRCKCGLVMTPTGIRKPVYQGTYRCNGNKESRCSYGTVSRKLLDTQLCSRLFSKLSQLHDEATDTAKLDELQRRLNTVDGELEKLTETLIQLPNITQIQEALRVKQEEKDELIVQLSREKARVKSVSSLDLSGLDMESVEGRTEAQIIIKRLVKEIVVSGNEKLVDIYLHNGNMIRGFPLDGKDDHTLTLEEATDEMQSLDDMLIFGEPVTRIYPAGDMEEVDA

SEQ ID NO: 6643 - protein, 507 aa, synthetic construct
MKRVISYIRFSSERQAKGDSLRRQSKMVNDWLKAHPEYYLDQDLSFRDLGVSGFTGKHLKGGLGDFLTAIEKGLVKAGDTLLIESLDRLSRQDIDIASELLRNILRSGVDVVTLSDGEHYTRESLRDPLALIKSILIMQRAHEESLRKAERIQAAWDAKKEAAKAGIKVSKRCPAWLKLNDDRKSFSVIPEKVETVKRCFQLRLEGKSIWEIVRTLNDEGRQTLNQHKAGSFGQSSVQDLLKNRSVIGYFTPKGCEEIAGYYPAIIDETTFYKVQQLSYARYGRKPASDKPLSVNLFKGVIRCSECGHALIITGFSDTRSGIYRCPLRNENRCSAKGLSRKQTDGTLLALLSRLDRFDSDMTNTIDTLKLHREHISSNIEKLVQLSLEIEDLSAITSKLKQLKGELSQVDADIEKETQRLKSIDVGCLSDCDLTTKAGRIEAQLIIKSAVKEVVLNTAKRRCKVTFHNGKIIDLPITENPSEDVTEAIQSLSEVTERGLIDVDEVII

SEQ ID NO: 6644 - protein, 506 aa, synthetic construct
MRHVITYLRYSSAIQGAEGADSTRRQNDLFKQWLKKNSDAQVVASFNDEGLSGYKGKHLSGQFGDMLSRIESGEFSEGTVLLVEAIDRIGRLEHLETEALMNRIIAHGIEIHTLQDGLIYTRDALSDDLGISIIQRVKSYIAHQESKQKSFRVSQKWEQRAKLALAGEQRLTRNVPGWIDPDTFKCNEHAETVRLIFKLLLSGESLHNIARHLQSNGIKSFSRRKDANGFSVHSVRTILRSETTIGTLPASQRNDRPAIPNYYEAAIDASTFNKAQEILGKNRIGRTPASDNPLTINIFKGLFRCQCGASVHPTGTKNKYQGVYRCNNHLDGRCDVPPLKRKPFDKWMLENFLGMIDVGNDGEAEGKIASLQHEVEIVTTRIKKATALLLEMDDIDELKIQLKELNQKRTELQTTIDNMRRKASLTDKELPQLKDIDLTTKVGRVECQLILSKHLKGLTLGKDSVTVTLQNDTEITIPTNPLPLNDGSPIFEIADKELLDIDAYQL

SEQ ID NO: 6645 - protein, 507 aa, synthetic construct
MKRVISYIRFSSEKQSRGDSLRRQSKMVTDWLKAHPEYHLDQDLSFRDLGVSGFTGKHLKGGLGDFLTAIEKGLVKAGDTLLIESLDRLSRQDIDIASELLRNILRSGVDVVTLSDGEHYTRESLRDPLALIKSILIMQRAHEESLRKAERIQAAWDAKKEAAKAGIKVSKRCPAWLKLNDDRKSFSVIPEKVETVKRCFQLRLEGKSIWEIVRTLNDEGHQSMSQYKPGKFGQTSVQDLLKNRSVIGYFTPKGCEEISGYYPAIIDETTFYKVQQLSHYRYGRKPVSDKPLSVNLFKGVIRCSECGHALIITGFSDTRSGIYRCPLRNENRCSAKGLSRKQTDGTLLTLLSRLDRFDSDMTNTIDMLRLHREHISSNIEKLVQLSLEIEDLSAITIKLKQLKGELSQVDADIEKETQRLKSIDVGCLSDCDLTTKAGRIEAQLIIKSAVKEVVLNTAKRRCKVTFHNGRLIDLPITENPSDNVTEAIQSLSEVTERGLIDVDEVII

SEQ ID NO: 6646 - protein, 559 aa, synthetic construct
MKTKLYSYIRFSSMRQNDGSSYERQIRMAREVAAKYDLELVNDYQDLGVSAFKGANSKTGALSRFLDAIGRSVPVGSWLFIENLDRLSRADIVSAQELFLSIIRRGITIVTGMDNKIYSLDTVTANPMDLMFSILLFIRGNEESQTKRNRTNSSALIKIKAHQENPQNPAVAIEEVGKNMWWTDTTSGYVLPHPVYFPVVQEIVELRKNGRSTAEILDHLNETYTPPPAVSNKKHSKWSRAMVERLFHTRALIGIKEVSVDGVNYELKDYYPRVIDDATFYHLKKNIGARAWNFGDKEEVKPIPLLSGIGLLKCDHCGCAMVKVKGTNKRSDQYRYTCDATRSRRLDCEHPNWSFRGDQLEKAVLQLLADKIWIAEDKANPVPALKLQVDEISRKIDNLIALSAMTGATKELADQITTLNSERETLYNQIKMAEEEMYSVDSQGWEKLAEFDLEDVYNEERLKVRFKIKQALKRIGCSRIDRNKNLFVLEYIDGKTQRVVIENSRGTRKGRIFIDLKTINDRQILESNGLVLHPCLDMLTDKNWKPEEEIPGPLQEFGI

SEQ ID NO: 6647 - protein, 559 aa, synthetic construct
MKTKLYSYIRFSSMRQNDGSSYERQIRMAREVATKYDLELVNDYQDLGVSAFKGANSKTGALSRFLDAIGRSVPVGSWLFIENLDRLSRADIVSAQELFLSIIRRGITIVTGMDNKIYSLDTVTANPMDLMFSILLFIRGNEESQTKRNRTNSSALIKIKAHQENPQNPAVAIEEIGKNMWWTDTTSGYVLPHPTYFPVVQEIVELRKNGRSTAEILDHLNETYTPPPAVSNKKHSKWSRAMVERLFHTRALIGIKEVSVDGVNYELKDYYPRVIDDATFYHLKKNIGARAWNFGDKEEVKPIPLLSGIGLLKCDHCGCAMVKVKGTNKRSDQYRYTCDATRSRRLDCEHPNWSFRGDQLEKAVLQLLADKIWIAEDKANPVPALKVQVDEISRKIDNLIALSAMTGATKELADQITTLNSERETLYNQIKMAEEEMYSVDSQGWEKLAEFDLEDVYNEERLKVRFKIKQALKRIGCSRIDRNKNLFVLEYIDGKTQRVVIENSRGTRKGRIFIDLKTINDRQILESNGLVLHPCLDMLTDKNWKPEEEIPGPLQEFGI

SEQ ID NO: 6648 - protein, 604 aa, synthetic construct
MKKVFVYHRVSSDQQLDGSGIARQAELLEGYLERTGICAEMDDPAPVVLSDQGVSAFKGLNISEGELGAWMEQVRNGMWDSSILVVESIDRFSRQNPFDVMGYINALMAHNVAIHDVMANIVISRSNSKDLPFVMMNAQRAYDESKYKSDRIRKGWAKKREQAFNKGTIVTNKRPQWIEVENDKYVLNHKAAVVKEIFALYQTGMGCPTIAKQLQTKEGEQYKFNRPWTGELVHKILTNRRVTGKIFISEIIRNHDDIENPVTQKKYDMDVYPVVISEDEFELVQELLKSRRPNAGRVTVKKDGQEEVLIKSNLFSGIARCTECGGPMYHNVVRAKRTPKKGDPKIEEYRYIRCLNERDGLCENKAMTYETVEHFVVEHLLGMDLNTVIKEQEFNPEIEVIRIQIDQVKDQVTNYENGIERRKSAGKAVSFEMREELDDAKLELEQLLARQASLATVQVDLPVLQDVNVTELYNVNNVDIRTRYENELNKIVSNIRLKRNGNFYTIDIIYKQNELKRHVLFIENKKKEQKLISEVIIENVDGAKFYYTPSFVISVKDGEIRFQQTKEDLTIIDYSLLLNYVDAVDRCDAVGVWMRNNMSFLFTK

SEQ ID NO: 6649 - protein, 505 aa, synthetic construct
MTLAFSYVRFSTKHQASGTSLERQVNTSKLFCSQNGLTLSNQSYHDLGISGFKNVRRPELEQMLEAIQTGDIPSGSYILIEAIDRLSRKGISHTQDILKKILQYDVKVAFVGEDAKTLQGHILNKDSLNDLSSVILVALAADLAHKESLRKSKLVKASKAIAREKAADGEILPGKSVFYLDYDKKNKKYVFNKRVDLARKIIQMRLEGKGPRKIARLLNEENIPGPTGKQWYQMSVKRLLKSPVLYGAYQTHQIIEEKYIPVSLIENYYPALIDYQTFSQIQFDDKRVSKGRPSRHKFSGVLYCECGAVLCRKVNTYETKQGPKEYQYFNCFGAFEGRCKNNKAIKDLHIPLEKAIDKLQIKTRSVKNIKNEQIIAKREKIDQLNKMLLELEMPPVSVLKTISTLEKELQELLEQPDVQPPKSADVKTLVAIKDAEQYNLYLKRLVKRITIFQLNGPKNIRIKIEKTDGHYQSFIVNNGKIMFNADTKALQEHLRKLKEGTSDED

SEQ ID NO: 6650 - protein, 520 aa, synthetic construct
MKRADLYIRVSTDEQADKGYSQRDQEERLKRYCATNKIAVGQVIYEDHSAKTFNRPEWTRLLNSLKKRSSKTDLILFTKWDRFSRNAGDAYQMISTLNKLGIEPQAVEQPLDLSIPENKMMLAIYLSAPEVENDRRALNTFYGMRRARKEGRLMGRAPFGYINRSKEDGRKYIAPKEPEATAMLWAFNEIAKGVFACDQVRQKMNKLHKTTISRSAFHVAVRNPLYYGKIFIAKFKDEEAHLVQGQHEPLISKDLFDRVQLILDGNKRVERPNTKILSDENLPLRGFLVCPECGRNLTGSASKGRTSRYYYYHCVSSCGFRQKAELANDIFEKSMRQFALNGTSQIVKRLLLDNYKKFAKNPFDEKKQIAQEIDKLNARLSVARNKLLSEIIDDEEYLEIKDECRKRIESLEEQLSKDGSDTKKINVEKSLDRALKYIESIPKMYSEGEIRTRRDIIGSIFPEKLEFDGKTYRTARMNVIANYIFQITNGLLQKKNRTNESKFHLSCLVARRGIEPLLQE

SEQ ID NO: 6651 - protein, 542 aa, synthetic construct
MKQLKKKRIGLYARVSTEMQTDGYSIQGQLNQLTEYCQFQGYEVVNEYTDRGISGKTMQRPELQRMLKDANEGKLDCIMVYKTNRLARNTSDLLNIVEELYKINVEFFSLTEKIEIASSTGKLMLQILASFAEFERNTIVENVYNGQRQRAIEGYYQGNLPLGYDKVPDSKKELMINQHEANIVKYIFDSYAKGHGYRKIANALNHKGYVTKKGKPFSISSITYIISNPFYIGKIQFAKYRHWSDKRRKGLNEEPIIADGKHAPIIDRNLWDKVQFKRQESRKKPQVHGKGTNLLTGIVKCPKCGAAMAASNTTNTLKDGTKKRIRYYSCSNFRNKGSKVCSANSVRADVLEKYVMDQILEIIKSKKVLKQLVEKVNEKSQIDVSSLNHDIAYKQSQCEEIKAKMHTLTKTIEDSPDLDSVLKPTILSYQDELNQINNQIYQLEQDKQAEAPHYDADMIANVLQAIFKDIDKLEKSQLKSLYLTIIDRIDIRKDEHHKKQFYVTLKLNNDIIKQLFNNHPLDEVLPSTSSLFLPQTLYITIE

SEQ ID NO: 6652 - protein, 453 aa, synthetic construct
MEEAIAYVRQSTLKQQSLATQKSLIMDTAKQYGWSNVAFYDDKKTGRHTKRSGYQKMVEIITSGKCKVLCCYRLNRLHRNLKNAIQFFEICKKHHITIISVNDGYFDLSKEFDCFRLNILMSLAEMESNNISEQTKNGIREKAKQGKLITTHAPFGYRYRKGCFVVQEEEAYTVKSVYRWYLQGLGYKKISQHLDSNPNLIPRKPYQVRNILLNPNYCGRVINKYGTFNDIVPPIIDIDTFEEAQERRIHKQLNRSNSRNKLKRRIKCPYCQSTLTNLTIKKENYSLRYYVCPKNMNDAYRTCPFKSINAPELESEVLDTCKKYFEEQSFHKRLNNTILKVLKQQQMKHKETHLTQEQLIEKLAQNRIDVKTFKRLSASCKSEENYSTYSTYQIDDKLKYVIKNKITLQDIAPFIDCIKITQTKQLQGIYFKNSPLNIVEQSHLITPERNEVI

SEQ ID NO: 6653 - protein, 507 aa, synthetic construct
MKRVISYIRFSSERQAKGDSLRRQSKMVNDWLKAHPEYYLDQDLSFRDLGVSGFTGKHLKGGLGDFLTAIEKGLVKAGDTLLIESLDRLSRQDIDIASELLRRILRAGVDIVTLSDGEHYTRESLKDPLALIKSILIMQRAHEESLRKAERIQAAWDAKKEAAKAGIKISKRCPAWLKLNDDRKTFSVIPEKVETVRRCFQLRLEGKSIWEIVRTLNDEGHQTLNQYKAGKFGQTSVQDLLKNRSVIGYFTPKGCCEIAGYYPSIIPESDFYKVQQLSYARGGRKPASGKPLSVNLFKGVIRCSECGHALIITGFSDTRNGIYRCPLRNENRCSAKGLSRKQTDGTLLTLLSRLDRFDSDMTNTIDTLKLHREHISSNIEKLVQLSLEIEDLSAITSKLRQLKNELSQVDADIKKETQRLKSIDVGCLSDCDLTTKAGRIEAQLIIKSAVKEVVLNTAKRRCKVTFHNGKTITLSITENPSEDVTEAIQSLSEVTERGLIDVDEVII

SEQ ID NO: 6654 - protein, 559 aa, synthetic construct
MKTKLYSYIRFSSMRQNDGSSYERQIRMAREVAAKYDLELVNDYQDLGVSAFKGANSKTGALSRFLDAIGRSVPVGSWLFIENLDRLSRADIVSAQELFLSIIRRGITIVTGMDNKIYSLDTVTANPMDLMFSILLFIRGNEESQTKRNRTNSSALIKIKAHQENPQNPAVAIEEVGKNMWWTDTTSGYVLPHPVYFPVVQEIVELRKNGRSTAEILDHLNETYTPPPAVSNKKHSKWSRAMVERLFHTRALIGIKEVSVDGVNYELKDYYPRVIDDATFYHLKKNIGARAWNFGDKEEVKPIPLLSGIGLLKCDHCGCAMVKVKGTNKRSDQYRYTCDATRSRRLDCEHPNWSFRGDQLEKAVLQLLADKIWIAEDKANPVPALKVQVDEISRKIDNLIALSAMTGATKELADQITTLNSERETLYNQIKMAEEEMYSVDSQGWEKLAEFDLEDVYNEERLKVRFKIKQALKRIGCSRIDRNKNLFVLEYIDGKTQRVVIENSRGTRKGRIFIDLKTINDRQILESNGLVLHPCIDMLTDKNWKPEEEIPGPLQEFGI

SEQ ID NO: 6655 - protein, 507 aa, synthetic construct
MKRVISYIRFSSEKQSRGDSLRRQSKMVTDWLKAHPEYYLDQDLSFRDLGVSGFTGKHLKGGLGDFLTAIEKGLVKAGDTLLIESLDRLSRQAVDRASELLRNILRSGVDVVTLSDGEHYTSESLKDPLALIKSILIMQRAHEESLRKSERIQAAWDAKKEAAKAGIKVSKRCPAWLRLNDDRKSFSVIPEKVETVKRCFQLRLEGKSIWEIVRTLNAEGHQTLHQHKPGSFGQSSVQDLLKNRSVIGYFTPKGREEIAGYFPPIIPETDFYKVQQLSYSRYGRKPASDKPLSVNLFKGVIRCSECGHALIITGFSDTRNGIYRCPLRNENRCSAKGLSRKQTDGTLLALLSRLDRFDSDTTNIIDMLRLHREHVSSNIEKLVQLSLEIEDLNAITSKLKQLKGELSQVDADIEKETQRLKSIDVGCLSDCDLTTKAGRIEAQLIIKSAVKEVVLNTAKRRCKVTFHNGKTITLSITENPSEDVTEAIQSLSEVTERGLIDVDEVII

SEQ ID NO: 6656 - protein, 507 aa, synthetic construct
MKRVISYIRFSSEKQAKGDSLRRQSKMVNDWLKAHPEYYLDQDLSFRDLGVSGFTGKHLKGGLGDFLTAIEKGLVKAGDTLLIESLDRLSRQDVDQASELLRNILRSGVDVVTLSDGEHYTRESLRDPLALIKSILIMQRSHEESLRKSERIQAAWNRKKELISEGIKISKRCPAWLKLNDDRKSFSVIPDKVETVKRCFQLRLEGKSIWEIVRTMNAEGHQTLHQHKPGSFGQSSVQDLLKNRSVIGYFTPKGCEEISSYYPSVIDETTFYKVQQLSHSRYGRKPVSDKPLSVNLFKGVIRCSECGHALIITGFSDTRSGIYRCPLRNENRCSAKGLSRKQTDGTLLTLLSRLDRFDSDTTNVIDMLRLHREHISSNIEKLVQLSLEIEDLSAITNKLKQLKNELSQVDADIEKETQRLKSIDVGCLSDCDLTTKAGRIEAQLIIKSAVKEVVLNTAKRRCKVTFHNGKVIDLSITENPSEDVTEAIQSLSEVTERGLIDVDEVII

SEQ ID NO: 6657 - protein, 472 aa, synthetic construct
MNTKRKVAIYSRVSTLHQAEEGYSIGQQIEALTKYCQAMGWVIYDNYSDGGFSGGKLERPAMQKMIQDAKSGKFDTVVVYKLDRLSRNVRDTLYLVKDVFNANNVDFVSLQENIDTKSAMGNLFITLLSAIAEFEREQIKERMQLGVKGRAKSGKTTSWTTPPFGYKYDTNTQSMIVDHYQAEIVRDMFNKIISGWSIMGITTYMRENYDGKWTHVKVKRILENITYIGKVKYRNEIFEGEHTPILPEELFSKAQKALEERTNKKDNTRPFQGLYMLSHIAKCGYCGTPLKIDTYKPRKDGTRKRTYTCINKNPKRIKTAIYNDGEQCKESGRYDVKDVERYVLNEISKLQLNPKSIESLYRDKPEENITAHQERLKKLETKLSKLNDLYINELISMEALKQKSAELLKEKSSLETFINNNKRKINNKPAFEKVAKMDDVFKMSYDDQKKIVKTLIKRVEVKRDEINVIFKL

SEQ ID NO: 6658 - protein, 471 aa, synthetic construct
MQTKKAAIYVRVSSLHQAIEGYSIGQQQDALTKYCEAMNWAIYDVYTDAGFSGGKIDRPAMEKLITDAKMGKFDTVLVYKLDRLSRSVQDTLFLVRDIFNENNIGFVSLQENIDTSTAMGNLFLTLLSAIAEFEREQIKERMQLGVKGRAKSGKTTAWTTPPFGYKYDTNTQSMTVDHYQAEIVRDMFNKIISGWSIMGITTYMRENYDGKWTHVKVKRILENITYIGKVKYRNEIFEGEHTPILPEELFSKAQKALEERTNKKDNTRPFQGLYMLSHIAKCGYCGTPLKIDTYKPRKDGTRKRTYTCINKNPKRIKTATYNDGKQCKESGRYDVKDVERYVLNEISKLQLNPKSIESLYRDKPEENITAHQERLKKIETKLSKLNDLYINELISMEALKQKSAELLKEKSSLETFINNNKRKINNKPAFEKVAKMDDVFKMSYDDQKKIVKTLIKRVEVKRDEINVIFKL

SEQ ID NO: 6659 - protein, 412 aa, synthetic construct
MKTVTQIKTINPSLTIKLKVAAYARISHSSLKHSLSNQVSYYNQLIQSNPCWSFAGIYIDDGISGKSQETRSDFQALIKACHEGKVDLILTKSISRFGRNTVELLTTVRELKELGVNIRFEREGIETLTSDGELLLTLLASVAQEESRSISENVKWYVKKSFEQGLPYIPQDIYGYRWQGDTYVIEPHEAKIVKQVFRWYMEGLGVPTIAQKLNDLGERTRLRNPFTKSILYEFFKQEAYYGRLVLQKTYRTDFSRNPKRNKGQRDKYIVDNAHEPIVSKEYFESVLAEKRRRSKGRYYRDESIPTLFRDKIYCAHCGVDMLLTVDKPHTDKATVRYNCRTRQHKGLDACPSKTLAEKRLIMTLTNYYNCSIDEEWVAKVKSVTFNSIDYSITVTFKDGEFHTLPIKRGQFK

SEQ ID NO: 6660 - protein, 584 aa, synthetic construct
MKTNNVEIIKADSLVRRRGVNVERHLKRVAAYCRVSSDSEDQKNSYESQVKHYKDYISQRSDWELADIYADEGISGTQVGKRQDFQRLINDCVNGEIDYIVTKAIARFARNTLDTLKYVRMLKDMQIGVYFEEENIDTLTMDGELLLTILSSVAQQEVENTSAHVKKGLKMKMQRGELIGFQGCLGYDYDVETKQLSINKKEAKIVRYIFERYLEGIGGKVIARELDELGYKSPRGLDHWNDTTVLGIIKNEKYKGDILMGKTFTVDPISKRRLSNFGEEDKYYIKDNHEPIISKEDFEKAQAIRLRRAGNKKTAANVNGKRERYSKMYAFSSMLECGFCGSLLSRRSWHCRSDYRKVVWHCVTSIKKGKKYCKHSKGLEELAIEGAFMEAYRQLYHSNENIVSDLLETIESELNDNSLNKELKKITNKLRTLLKKEENLVNLKLEGKISDSIYNEKYNELSSEKEYLAEEKVNVETILKSEIDVKKRLTEFKQLLSSQKMLTEFDRTVFESIVEKIIVGGVNSDGEIDPAMLTIIFKTGETQNKDGKQFKSKRKNAKLEPDKLCPQNCDEDKKLYSQGTDNTC

SEQ ID NO: 6661 - protein, 561 aa, synthetic construct
MVKAYIYTRVSSLQQSDGFGIERQVHTLMDFLEDAELPKELGYQLDPHDYEVLEQDAGLSGFKGHNFTKGSIGKFKNRVASGEITSGCLLIESVDRFSRKQGYDAIDEFTFLIKRNIDIIEVETGQIFSYKLDHKLTQLSTSIERAYQESKRKSRMAVKSWANIKRKAVEEGIAISRNVPYWLEVKNNEYLTRTEHVNKIKRVFDMYINGVGVTSIVRELNKEGGKHDGGVYSTNFINMMLRDRRLLGWQRGKKKANETQEGREKRAIKIYPVIIGTDIFDLVQRKIDANKVTKSVRTSSKQKSLFNGLVRCEICGEALVGHFSERGNYLRCIGKRSKVGSCDSRLIKYSTFEESMLVNLKGIDFKEIYTNKNVSDDHVNNLRNELAVVNAEYDEIEGLLNTSGSTIEIVALSKALREKNKDKDKLQSELTTLTNNNVIEDVEIDVSKLTNQNNVELREKYNIYLRKVIKEIRVKRVDDILYVMVQYFTDVISHLFIIDGKDGTLLSRSHISNDLVFESDMMTIDMLKGEWELKKNNMSQWDELALDIWQSVVESAVKSIK

SEQ ID NO: 6662 - protein, 546 aa, synthetic construct
MKQADGSSYERQKRTAKEIAAKYDLELVTSYQDFGVSAFKGANSRTGALSRFLDEIGRSVPVGSWLVVENLDRISRQSIIEAQELFLSIIRRGITIVTGMDGKVYSRESVNANPIDLLLSVMLFARANEESQTKRNRTNSSALIKIKSHQENPQNPAVAIEEVGKNMWWTDTTSGYVLPHPTYFPVVQEIVELRKNGRSTAEILDHLNETYAPPPAVSNKKHSKWSRAMVERLFHTRALIGIKEVSVDGVNYELKDYYPRVIDDATFYHLKKNIGARAWNFGDKEEVKPIPLLSGIGLLKCDHCGCAMVKVKGTNKRSDQYRYTCDATRSRRLDCEHPNWSFRGDQLEKAVLQLLADKIWIAEDKANPVPALKVQVDEISRKIDNLIALSAMTGATKELADQITTLNSERETLYNQIKMAEEEMYSVDSQGWEKLAEFDLEDVYNEERLKVRFKIKQALKRIGCSRIDRNKNLFVLEYIDGKTQRVVIENSRGTRKGQIFVDLKTINDRQILESNGLVLHPCLDMLTDKNWKPEEEIPGPLQEFGI

SEQ ID NO: 6663 - protein, 506 aa, synthetic construct
MRTVITYLRFSSATQGAEGADSTRRQNELFKQWLRKNSDAQVVASFSDEGLSGYKGKHLTGQFGDMLARIESGEFSEGTVLLVEAIDRIGRLEHLETEALMNRIIAHGIEIHTLQDGLIYTRDALSDDLGISIIQRVKSYVAHQESKQKSFRVSQKWKQRAKLALAGEQRLTRNVPGWIDPDTFKCNEHAETVRLIFKLLLDGESLHNIARHLQSNDIKSFSRRKDANGFSVHSVRTVLRSESVIGTLPASQRNDRPAIPNYYEAAIDAATFNKAQEIFDKNRKGRTPASDNPLTINIFKGLFRCQCGASVHPTGTKNKYAGVYRCNNHLDGRCDVPPLKRKPFDRWMIDNFLGMIDVGNDGESERKIAALQHEVEIVTARIKKVTALLLEMDDITELKAQVKGLNQKRTEIQTTIDTLKRKTSLTDKELPQLKDIDLTTKAGRVECQLILSKHLKGLTLGKDSVTVTLQNDTEITIPTNPLPLNDGSPIFEIADKELLDIDAYQL

SEQ ID NO: 6664 - protein, 507 aa, synthetic construct
MKRVISYIRFSSERQAKGDSLRRQSKMVNDWLKAHPEYYLDQDLSFRDLGVSGFTGKHLKGGLGDFLTAIEKGLVKAGDTLLIESLDRLSRQAVDRASELLRNILRSGVDVVTLSDGEHYTSESLKDPLALIKSILIMQRAHEESLRKSERIQAAWNRKKELISEGIKISKRCPAWLRLNDDRKSFSVIPEKVETVKRCFQLRLEGKSIWEIVRTLNDEGHQSMSQYKPGKFGQTSVQDLLKNRSVIGYFTPKGCEEISGYFPSIIPETDFYKVQQLSYSRYGRKPASDKPLSVNLFKGVIRCSECGHALIITGFSDTRNGIYRCPLRNENRCSAKGLSRKQTDGTLLALLSRLDRFDSDTTNIIDILKLHREHISSNIEKLVQLSLEIEDLSAITSKLKQLKGELSQVDADIEKETQRLKSIDVGYLSDCDLTTKAGRIEAQLIIKSAVKEVVLNTAKRRCKVTFHNGKIIDLPITENPSEDVTEAIQSLSEVTERGLIDVDEVII

SEQ ID NO: 6665 - protein, 547 aa, synthetic construct
MKLLVPYIRWSTKEQDSGDSLRRQTNLIDAFYSKHKNDYYLLPAHRYVDKGKSGFHQQHKNQGSDFRRMFENVMSGVIPEGSLIVVENFDRFSRADIDTAIDDVRQILRKGVSILTLGDGELYDKSALTDPVKLIKHIIIAERAHQESLVKQKRIAQVWNHKTQLARELKKPMGKQAPGWLELSEDGSHYIVDEDKASLVNIIYDKRLSGMSMFAICKWLNEQGYPTINQRKVRISKTKKPDGNWSALSVKHILTSRSVLGYLPAKISSEDRKTVLREEIEGFYPQIVTDSKFYAVQQLLEETGKGKTSSGDHWLYVNILKGLIRCRCGLVMTPTGIRKPVYQGTYRCNGNKESRCSYGTVSRKLLDTQLCSRLFSKLSQLHDEATDTAKLDELQRRLNTVDGELEKLTETLIQLPNITQIQEALRVKQEEKDELIVQLSREKARVKSVSSLDLSGLDMESVEGRTEAQIIIKRLVKEIVVSGNEKLVDIYLHNGNMIRGFPLDGKDDHTLTLEEATDEMQSLDDMLIFGEPVTRIYPAGDMEEVDA

SEQ ID NO: 6666 - protein, 588 aa, synthetic construct
MKKEVKVIKGDTTLKRTASGCVERSIKRVAAYCRVSTDTEDQINSYNSQVEHYTEFIQKNNEWTLAGIYADEAITGTQVDRRIDFQRLINDCMNGDIDMIITKSISRFARNTLDTLKYVRKLKEFNVAVFFEEENINTLTMDGELLLTILSSVAQQEVENISANVKKGLRMKMERGEMVGFQGCLGYDYDPETKSISINEKEAEIVRYIFRRYIEGVGGMVISRELEEQGYLSPRGNKRWTETTVLGIIKNEKYKGDLMMGKTYTVDPISKRRLDNFGEQDKFYIENHHEPIISEEDFEKAQGIRLRRSKNRNTVANNGGKREKYSRKYAFSSMLECGFCGYNLSRRNWHSSSEYTKVIWQCVNATKNGKKYCPHSKGIEEEAIEKAFMESYRQVCHNNVEITNEFLKTVEEELKDNSLSKDLKKISNQLDKILKKEKDLVELRLNESISMDIYQDKYNEIAISKEKLLAEKRTLEVTLTDEKALKKRLEGFKKLLESNKYLEEFDRAVFESIVDKIIIGGTNDEGEIDPAMITIIYKTGKKDSQDGRLFKSRRKNAKEVNEKADSKLYPQSGDEVNNLYSYPIDNTH

SEQ ID NO: 6667 - protein, 588 aa, synthetic construct
MKRDVKVIKGDTTLKRTASGCVERSIKRVAAYCRVSTDTEDQINSYNSQVEHYTDFIKQNNEWTLAGIYADEAITGTQVDRRIDFQRLINDCMNGDIDMVITKSISRFARNTLDTLKYVRKLKEYNVAVFFEEENINTLTMDGELLLTILSSVAQQEVENISANVKKGLRMKMERGEMVGFQGCLGYDYDPETKSISVNEKEAEIVRYIFRRYLEGVGGMVISRELEEQGYLSPRGHKRWTETTVLGIIKNEKYKGDLLMGKTFTVDPISKRRLDNFGEQDKFYIENHHEPIISEEDFEKAQGIRLRRAKNRNTVANNGGKREKYSRKYAFSSMLECGFCGHMLSRRNWHSSSEYTKVIWQCVNATKNGKKYCPHSKGIEEEAIEKAFMESYRQACHNNVEITNEFLKTVEEELKDNSLAKDLKKISNQLDKILKKEKDLVELRLNEAISMEIYQEKYNEIAISKEKLLEEKRTLEVTLTDEKALKKRLEGFKKLLESNKYLEEFDRAVFESIVDKIIIGGTNDEGEIDPAMITIIYKTGKKDSQDGRLFKSRRKNAKEVNEETDNKLYPHSSDEVNNLYSYPIDNTH

SEQ ID NO: 6668 - protein, 470 aa, synthetic construct
MKGESELDKKAAIYIRVSTQEQVTEGYSIQAQTDRLTKYVEAKDFILYKKYIDAGYSASKLERPAMQELIQDVQSKKVDVVIVYKLDRLSRSQKDTMYLIEDIFRPNDVELISMQESFDTSTAFGSATVGMLSVFAQLERKSISERMITGRVERAKKGFYHTGGQDRPPAGYQFNSDNQLIINEYEAAAIKDLFRLYNDGLGKSSISEYLKKNYPGKNKWLPSSIDRMLKNSLYIGKVKFSGVEYDGIHEPIIDEVTFYKTQKEIARRKQSNTKRYNYVALLGGLCECGICGAKMANRRAVGRKGKVYRYYRCYSKKGSPKHMMKTDGCSSKAQQQFIIDEAVINNLKNIDVEAELKRRSAPQTNTSLISSQIESIDKQINKLIDLFQVDSMPLDVISEKIDKLNKEKQSMEKLLERKNRLDKTELQHRFDILKSFDWDNSSIESKRAVIEMLVQKVIIHDNSIEIILVE

SEQ ID NO: 6669 - protein, 507 aa, synthetic construct
MKRVISYIRFSSEKQSRGDSLRRQSKMVNDWLKAHPEYYLDQDLSFRDLGVSGFTGKHLKGGLGDFLTAIEKGLVKAGDTLLIESLDRLSRQAVDRASELLRNILRSGVDVVTLSDGEHYTKESLRDPLSLIKSILIMQRAHEESLRKSERIQAAWNRKKELISEGIKVSRRCPAWLRLNDDRKSFSVIPEKVETVKRCFQLRLEGKSIWEIVRTLNDEGHQSMSQYKPGKFGQTSVQDLLKNRSVIGYFTPKGCEEISGYYPAIIDETTFYKVQQLSYARYGRKPASDKPLSVNLFKGVIRCSECGHALIITGFSDTRNGIYRCPLRNENRCSAKGLSRKQTDGTLLALLSRLDRFDSDMTNTVDTLKLHREHISSNIEKLVQLSLEIEDLSAITSKLKQLKGELSQVDADIEKETQRLKSIDVGCLSDCDLTTKAGRIEAQLIIKSAVKEVVLNTAKRRCKVTFHNGKVIGLSITETPSEDVTEAIQSLSEVTERGLIDVDEVII

SEQ ID NO: 6670 - protein, 559 aa, synthetic construct
MKTKLYSYIRFSSMRQSDGSSYERQIRMAREIAAKYDLELVNDYQDLGVSAFKGANSKTGALSRFLDAIGRSVPVGSWLFIENLDRLSRADIVSAQELFLSIIRRGITIVTGMDNKIYSLDTVTANPMDLMFSILLFIRGNEESQTKRNRTNSSALIKIKAHQENPQNPAVAIEEVGKNMWWTDTTSGYVLPHPVYFPVVQEIVELRKNGRSTAEILDHLNETYTPPPAVSNKKHSKWSRAMVERLFHTRALIGIKEVSVDGVNYELKDYYPRVIDDPTFYHLKKNIGARAWNFGDKEEVKPIPLLSGIGLLKCDHCGCAMVKVKGTNKRSDQYRYTCDATRSRRLDCEHPNWSFRGDQLEKAVLQLLADKIWIAEDKANPVPALKVQVDEISRKIDNLIALSAMTGATKELADQITTLNSERETLYNQIKMAEEEMYSVDSQGWEKLAEFDLEDVYNEERLKVRFKIKQALKRIGCSRIDRNKNLFVLEYIDGKTQRVVIENSRGTRKGQIFVDLKTINDRQILESNGLVLHPCLDMLTDKNWKPEEEIPGPLQEFGI

SEQ ID NO: 6671 - protein, 506 aa, synthetic construct
MRTVITYLRFSSATQGAEGADSTRRQNELFKQWLRKNSDAQVVASFSDEGLSGYKGKHLTGQFGDMLARIESGEFSEGTVLLVEAIDRIGRLEHLETEALMNRIIAHGIEIHTLQDGLIYTRDALSDDLGISIIQRVKSYVAHQESKQKSFRVSQKWKQRAKLALAGEQRLTRNVPGWIDPDTFKCNEHAETVRLIFKLLLDGESLHNIARHLQSNDIKSFSRRKDANGFSVHSVRTILRSETTIGTLPASQRNDRPAIPNYYEAAIDAATFNKAQEILDKNRKGRTPASDNPLTINIFKGLFRCQCGASVHPTGTKNKYAGVYRCNNHLDGRCDVPPLKRKPFDKWMIDNFLGMIDVGNDGESERKIAALQHEVEIVTSRIKKATALLLEMDDITELKAQVKELNQKRTELQTTIDTLKRKTSLTDKELPQLKDIDLTTKAGRVECQLILSKHLKGLTLGKDSVTVTLQNDTEITIPTNPLPLNDGSPIFEIADKELLDIDAYQL

SEQ ID NO: 6672 - protein, 507 aa, synthetic construct
MKRVISYIRFSSEKQAKGDSLRRQSKMVTDWLKAHPEYYLDQDLSFRDLGVSGFTGKHLKGGLGDFLTAIEKGLVKAGDTLLIESLDRLSRQAVDRASELLRNILRSGVDVVTLSDGEHYTSESLKDPLALIKSILIMQRAHEESLRKSERIQAAWDAKKEAARAGIKVSKRCPAWLKLNDDRKSFSVIPEKVATVKRCFQLRLEGKSIWEIVRTLNDEGHQTLNQYKPGKFGQTSVQDLLKNRSVIGYFTPKGREEIAGYFPPIIPETDFYKVQQLSYSRYGRKPASDKPLSVNLFKGVIRCSECGHALIITGFSDTRSGIYRCPSRNENRCNAKGLSRKQTDGTLLALLSRLDRFDSDMTNTVDTLKLHREHISSNIEKLVQLSLEIEDLSAITSKLKQLKGELSQVDADIEKETQRLKSIDVGCLSDCDLTTKAGRIEAQLIIKSAVKEVVLNTAKRRCKVTFHNGRIIDLPITENPSEDVTEAIQSLSEVTERGLIDVDEVII

SEQ ID NO: 6673 - protein, 507 aa, synthetic construct
MKRVISYIRFSSERQAKGDSLRRQSKMVTDWLKAHPEYYLDQDLSFRDLGVSGFTGKHLKGGLGDFLTAIEKGLVKAGDTLLIESLDRLSRQDIDIASELLRRILRAGVDVVTLSDGEHYTRESLKDPLSLIKSILIMQRSHEESLRKSERIQAAWDAKKEAAKAGIKISRRCPAWLRLNDDRKSFSVIPDKVETVKRCFQLRLEGKSIWEIVRTLNDEGHQSMSQYKPGKFGQTSVQDLLKNRSVIGYFTPKGCEEIAGYYPAIIDETTFYKVQQLSYARYGRKPASDKPLSVNLFKGVIRCSECGHALIITGFSDTRSGIYRCPLRNENRCSAKGLSRKQTDGTLLTLLSRLDRFDSDMTNTLDTLKLHREHISSNIEKLVQLSLEIEDLNAITSKLKQLKGELSQVDADIEKETQRLKSIDVGCLSDCDLTTKAGRIEAQLIIKSAVKEVVLNTAKRRCKVTFHNGKVIDLPITENPSEDVTEAIQSLSEVTERGLIDVDEVII

SEQ ID NO: 6674 - protein, 507 aa, synthetic construct
MKRVISYIRFSSEKQAKGDSLRRQSKMVTDWLKAHPEYYLDQDLSFRDLGVSGFTGKHLKGGLGDFLTAIEKGLVKAGDTLLIESLDRLSRQDIDIASELLRNILRSGVDVVTLSDGEHYTSESLKDPLALIKSILIMQRAHEESLRKSERIQAAWDAKKEAAKAGIKVSKRCPAWLKLNDDRKSFSVIPDKVETVKRCFQLRLEGKSIWEIVRTLNDEGHQSMSQYKPGKFGQTSVQDLLKNRSVIGYFTPKGCEEISGYYPAIIDETTFYKVQQLSHSRYGRKPASDKPLSVNLFKGVIRCSECGHALIITGFSDTRNGIYRCPLRNENRCSAKGLSRKQTDGTLLTLLSRLDRFDSDTTNTIDTLKLHREHISSNIEKLVQLSLEIEDLSAITSKLKQLKGELSQVDADIEKETQRLKSIDVGCLSDCDLTTKAGRIEAQLIIKSAVKEVVLNTAKRRCKVTFHNGKIIDLPITENPSEDVTEAIQSLSEVTERGLIDVDVVEI

SEQ ID NO: 6675 - protein, 506 aa, synthetic construct
MRTVITYLRFSSAIQGAEGADSTRRQNDLFKQWLKKNSDAQVVASFSDEGLSGYKGKHLTGQFGDMLARIESGEFPAGTILLVESIDRIGRLEHLETEALMNRILGNGIEIHTLQDGLIYTKDALADDLGISIIQRVKAYIAHQESKQKSFRVSQKWEQRAKLALAGEQRLTKMVPGWIDPDTFKCNEHAETVRLIFKLLLDGESLHNIARHLQANNISSFSRRKDANGFSVHSVRTILRSETTIGTLPASQRNDRPAIPNYYEAAIDAATFNKAQEILDKNRKGRTPASDNPLTINIFKGLFRCQCGASVHPTGTKNKYAGVYRCNNHLDGRCDVQPLKRKPFDKWMIDNFLGMIDVGNDGEAEGKIASLQHEVEIVTARIKKATALLLEMDDIDELKIQLKELNQKRTELQTTIDNMRRKASLTDKELPQLKDIDLTTKAGRVECQLILSKHLKGLTLGKDSVTVTLQNDTEITIPTNPLPLNDGSPIFEIADKELLEIDAYQL

SEQ ID NO: 6676 - protein, 507 aa, synthetic construct
MKRVISYIRFSSEKQAKGDSLRRQSKMVTDWLKAHPEYYLDESLTFRDLGVSGFTGKHLKGGLGDFLTAIEKGLVKAGDTLLIESLDRLSRQAVDRASELLRNILRSGVDVVTLSDGEHYTRESLRDPLALIKSILIMQRAHEESLRKAERIQAAWDAKKEAAKAGIKVSKRCPAWLKLNDDRKTFSVIPEKVETVRRCFQLRLEGKSIWAIVKALNDEGHQSMSQYKPGKFGQTSVQDLLKNRSVIGYFTPKGCEEISGYYPAIIDETTFYKVQQLSYARYGRKPASDKPMAVNLFKGVIRCSECGHALIITGFSDTRNGIYRCPLRNENRCSAKGLSRKQTDGTLLALLSRLDRFDSDTTNTIDTLKLHREHISSNIEKLVQLSLEIEDLSAITSKLKQLKGELSQVDADIEKETQRLKSIDVGCLSDCDLTTKAGRIEAQLIIKSAVKEVVLNTAKRRCKVTFHNGKAITLPITENPSEDVTEAIQSLSEVTERGLIDVDVVEI

SEQ ID NO: 6677 - protein, 507 aa, synthetic construct
MKRVISYIRFSSERQAKGDSLRRQSKMVNDWLKAHPEYYLDQDLSFRDLGVSGFTGKHLKGGLGDFLTAIEKGLVKAGDTLLIESLDRLSRQDVDQASELLRNILRSGVDVVTLSDGEHYTKESLRDPLSLIKSILIMQRAHEESLRKAERIQAAWDAKKEAAKAGIKVSKRCPAWLKLNDDRKSFSVIPEKVETVKRCFQLRLEGKSIWEIVRTLNDEGHQTLNQYKAGKFGQSSVQDLLKNRSVIGYFTPKGCEEISGYYPAIIDETTFYKVQQLSYARYGRKPASDKPLSVNLFKGVIRCSECGHALIITGFSDTRSGIYRCPLRNENRCSAKGLSRKQTDGTLLTLLSRLDRFDSDMTNVIDALKLHREHISNNIEKLVQLSLEIEDLSAITSKLKQLKGELSQVDADIEKETQRLKSIDVGCLSDCDLTTKAGRIEAQLIIKSAVKEVVLNAAKRRCKVTFHNSKSITLPITENPSEDVTEAIQSLSEVTERGLIDVDEVII

SEQ ID NO: 6678 - protein, 507 aa, synthetic construct
MKRVISYIRFSSERQAKGDSLRRQSKMVNDWLKAHPEYYLDQDLSFRDLGVSGFTGKHLKGGLGDFLTAIEKGLVKAGDTLLIESLDRLSRQDVDQASELLRNILRSGVDVVTLSDGEHYTKESLKDPLALIKSILIMQRAHEESLRKAERIQAAWDAKKEAAKAGIKISRRCPAWLRLNDDRKTFSVIPEKVATVKRCFQLRLEGKSIWEIVRTLNAEGHRSMNQYKPGKFGQTSVQDLLKNRSVIGYFTPKGCEEISSYYPSVIDETTFYKVQQLSHSRYGRKPVSDKPLSVNLFKGVIRCSECGHALIITGFSDTRNGIYRCPLRNENRCNAKGLSRKQTDGTLLALLSRLDRFDSDMTNVIDALKLHREHISNNIEKLVQLSLEIEDLSAITIKLKQLKGELSQVDADIEKETQRLKSIDVGCLSDCDLTTKAGRIEAQLIIKSAVKEVVLNTAKRRCKVTFHNSKSITLPITENPSEDVTEAIQSLSEVTERGLIDVDEVII

SEQ ID NO: 6679 - protein, 507 aa, synthetic construct
MKRAISYIRFSSEKQSRGDSLRRQSKMVNDWLKAHPEYYLDQDLSFRDLGVSGFTGKHLKGGLGDFLTAIEKGLVKAGDTLLIESLDRLSRQDVDQASELLRNILRSGVDVVTLSDGEHYTRESLKDPLALIKSILIMQRAHEESLRKAERIQAAWDAKKEAAKAGIKISRRCPAWLRLNDDRKTFSVIPEKVATVKRCFQLRLEGKSIWEIVRTLNAEGHRSMNQYKPGKFGQTSVQDLLKNRSVIGYFTPKGCEEISSYYPSVIDETTFYKVQQLSHSRYGRKPVSDKPLSVNLFKGVIRCSECGHALIITGFSDTRNGIYRCPLRNENRCNAKGLSRKQTDGTLLALLSRLDRFDSDMTNVIDALKLHREHISNNIEKLVQLSLEIEDLSAITIKLKQLKGELSQVDADIEKETQRLKSIDVGCLSDCDLTTKAGRIEAQLIIKSAVKEVVLNTAKRRCKVTFHNGKSITLPITENPSEDVTEAIQSLSEVTERGLIDVDVVEI

SEQ ID NO: 6680 - protein, 547 aa, synthetic construct
MKLLVTYIRWSTKEQDSGDSLRRQTNLIDAFYAKHKNDYYLLPAHRYVDKGKSGFHQQHKAQGSDFRRMFENVMSGVIPEGSLIVVENFDRFSRADIDTAIDDVRQILRKGVSILTLGDGELYDKSALTDPVKLIKHIIIAERAHQESLVKQKRIAQVWNHKTQLARELKKPMGKQAPGWLELSEDGSHYIVDEDKASLVNIIYDKRLSGMSMFAICKWLNEQGYPTINQRKVRISKTKKPDGNWSALSVKHILTSRSVLGYLPAKISTEDRKTVLREEIESFYPQIVTDSKFYAVQQLLEETGKGKTSSGEHWLYVNILKGLIRCKCGLVMTPTGIRKPVYQGTYRCNGNKESRCSYGTVSRKLLDTQLCSRLFSKLSQLHDEATDTAKLDELQRRLNTVDSELEKLTETLIQLPNITQIQEALRVKQEEKDELTFQLSREKARVKSVSSLDLSGLDMESVEGRTEAQIIIKRLVKEIVVSGNEKLVDIYLHNGNMIRGFPLDGKDDHTLTLEEATDEMQSLDDMLIFGEPVTRIYPAGDMEEVDA

SEQ ID NO: 6681 - protein, 494 aa, synthetic construct
MLYHIYSRISSTKQTQGVGLDRQEQLAVDYAKRNNFEVANISSDVASAYHSKHMEGKLGAFMESIATKEIVVPCGLIVESLDRLGREHELTALSRFIDIVQSGVEIHEVSTGIIYNQKDTHLLHVALSIMTRAYNESLMKAKRSNDAIQRKLGEAQNGKIIRTNVPAWIDVQGDKLVLNEHQTTVKSIFDMYLSGMSLRPIARTLNTGNVPYMAPKIAKKGPNNGSYNWTSSRILTVLASSAVYGVYTPKTGEPIENYYPACVDEATWLKAKEIRESRKVHAAKVNDLLSVLSSCCVCSLCGLSYIANLRSWETKEGKQTSVGMRCNSRQMGSTCKGKLVPNEHLEKYILPLVPNLDITKLNRTKMKTLDNLKARHQQLTEQQSTLLDLVVMGSAAAKEKFIQLEEKIEILKEKIEKAQARIVVDATEDVSLLALDTQNLEIRRKVNTALQLMELKVHVECTQTGTAKIKMQLKNVTVHEGTLKWSRKKRIDSK

SEQ ID NO: 6682 - protein, 547 aa, synthetic construct
MKLLVTYIRWSTKEQDSGDSLRRQTNLIDAFYAKHKDDYYLLPAHRYVDKGKSGFHQQHKNQGSDFRRMFENVMSGVIPEGSLIVVENFDRFSRADIDTAIDDVRQILRKGVSILTLGDGELYDKSALTDPVKLIKHIIIAERAHQESLVKQKRIAQVWNHKTQLARELKKPMGKQAPGWLELSEDGSHYIVDEDKASLVNIIYDKRLSGMSMFAICKWLNEQGYPTINQRKVRISKTEKPDGNWSALSVKHILTSRSVLGYLPAKISTEDRKTVLREEIESFYPQIVTDSKFYAVQQLLEETGKGKTSSGEHWLYVNILKGLIRCKCGLVMTPTGIRKPVYQGTYRCNGNKESRCNYGTVSRKLLDTQLCSRLFSKLSQLHDEATDTAKLDELQRRLNTVDSELEKLTETLIQLPNITQIQEALRVKQEEKDELIVQLSREKARVKSVSSLDLSGLDMESVEGRTEAQIIIKRLVKEIVVSGNEKLVDIYLHNGNMIRGFPLDGKDDHTLTLEEATDEMQSLDDMLIFGEPVTRIYPAGDMEEVDA

SEQ ID NO: 6683 - protein, 602 aa, synthetic construct
MKQERILPGSKPAYLYIRYSTPQQADGSSYERQTNPARKFIEEQGWTLAGELLDAGKSGFHGTNRKEGGALYEFEEKAKAGHFLNGAVLVVENIDRLTRQGARAALRLIWELNDWGVDVATLDDQRIYRLDDANDLANTVTGSLNGDRGKSESDRKRTYALSSWEAKYAAIEAGTTKAITKMVPAWLTVNRRKEFIVNERRKLVVREIFDWYNAGDGLHTIIRRLNDRKEPTFSGRDNAKGWSKSAVNHILSNRSVLGEFYTQNGKHIPTLYYPQIIDPETFKLAEAIRLTKTRIGVSSKYIGNNLFAGIARCEHCEGVMGFIRTGGNSTYVNKAGEKIVYDNPVKPYLICDNARRKNGCDNKLHLRYDTLESAVIERLLWATIQETTFDPKAEALKADMSAVEHRIEMNNMTIANIWESMEKVSSKSGAERAAKLEADNEGLLVELDILKKRLLVQTAQPSAFDDLEELRSLNAALNSEDRDTRVEARVRANAAFRRLIDSLTVSRDGSVALLVMDVAVWEFDRMGKVIGGQASRERKQPLACAPTSLQSRASSNSSIDQLDIRPTSQKGRTGIFDRQAVDIYVATNTLLHSREISRRGFA

SEQ ID NO: 6684 - protein, 507 aa, synthetic construct
MKRAISYIRFSSEKQSRGDSLRRQSKMVNDWLKAHPEYYLDQDLSFRDLGVSGFTGKHLKGGLGDFLTAIEKGLVKAGDTLLIESLDRLSRQNVDRASELLRNILRSGVDVVTLSDGEHYTRESLKDPLALIKSILIMQRSHEESLRKSERIQAAWNRKKELISEGIKISKRCPAWLRLNDDRKSFSVIPEKVETVKRCFQLRLEGKSIWEIVRTLNDEGHQTLNQYKAGKFGQTSVQDLLKNRSVIGYFTPKGCEEITGYFPSIIPETDFYKVQQLSYSRYGRKPVSDKPLSVNLFKGVIRCSECGHALIITGFSDTRSGIYRCPLRNENRCSAKGLSRKQTDGTLLTLLSRLDRFDSDMTNTIDMLRLHREHISSNIEKLVQLSLEIEDLSAITSKLKQLKGELSQVDADIEKETQRLKSIDVGCLSDCDLTTKAGRIEAQLIIKSAVKEVVLNTAKRRCKVTFHNSKSITLPITENPSDNVTEAIQSLSEVTERGLIDVDVVEI

SEQ ID NO: 6685 - protein, 524 aa, synthetic construct
MIAAIYSRKSKFTGKGDSIENQIQMCKEYGIKNLNIDKFLIYEDEGFSGGNTNRPKFKELLSDIKEKKFNVLICYRLDRISRNVADFSSTLQLLQCSDISFVSIKEQFDTSTPMGKAMVYIASVFAQLERETIAERVRDNMLQLAKTGRWLGGQTPLGFKSEKIVYIDEEYKERSLYKLSPIKEELEIVKYIYSTYLETHSLRKTASRLYEKKFKTKNGGDWGVSQVQNILSSPTYVKSSKKIKDFLISQGMSFAGKVNGNGIFIYNKKKGKTKHRDINEWIAAVGKHKGIIESDIWLEVQCFLNSKRFKRGRLGTGSNSLFSGLIKCGKCGCNMTIIHGGVSKGTRKHYYTCSLKRASKGIKCNNNNLTVDTTDKLIINHIKNIKIKDIKKELSYLYIKKNHTNEIQIIENAIKDEEKAIKNLTMQLSTISKSLASKPIINLLEKKTSRLEKLKNQYKQLKNNLTKTQLHLGNINNLADNLNNFKFMIDKTENIEQKKMLINSVIEDVIVTDEKIEINIKNSK

SEQ ID NO: 6686 - protein, 529 aa, synthetic construct
MKAAIYSRKSVFTGKGESIENQVQMCKNYAKRILSINEFIIYEDEGFSGSNINRPKFKELLLDVKKKKFNVLICYRLDRISRNVADFSSTLELLQSNNISFVSIKEQFDTSTPMGKAMVYIASVFAQLERETIAERIRDNMLELSKTGRWLGGQTPLGFNSKKITYFDNELKERSFNKLTPIDNELILVRLIYNKYLETHSIHKTLKYLLSNNIKGKNGGEFASISINDILRNPVYVQSNELVVNYLKSKGIQVCGTPNGNGILTYNKKNSKYKSKNINSWIAAISNHNGIISPDSWLEVQSLLDKNAKKSNPRRGTSKRGLLSGILKCAICGFPMRVCYGKPRKDGSKNYYYTCTMKAHSGKIRCKNPNVRGDYLENEVIRYLNKVDISLLINYLKYYKKDINNETSFLIKSQIEVKEKELNTLIDNLSKVQNPITSKYVIDKIDKLGDDLRKLELSLKQASYNKRNDLDLNTLINSIDNFKSFFDNMKTFKTQDIIVEMKRYLIETIVEKVTFDGNSNEIVIFFRGS

SEQ ID NO: 6687 - protein, 516 aa, synthetic construct
MYRIAIYSRKSKETDTGESIKNQIDMCKSYFSRKDHCTFEIFQDEGFSGGNINRPSFQRMIELAKHKQFDIVAVYKVDRIARNIVDFVNIYDELEKHDVKLVSVTEGFDPSTPIGKMMMMMLASFAEMERMNIAQRVKDNMNALAKMGRWSGGTPPTGYASKTINNNGKKEVYLELIPEQKTLLKSIFSKAADGYTTYQIGKIINMPNKTIANILSNPTYVSADKMSANYLKSIGYEVFGDLNGKGYLVYNRRPRKKNGKKLFNAKGMFVAVSEHEAVIDSKTWISANENLKKRAVEGRPRVSTQSFLAHLVKCKCGSGMYITPGNVKKDGTRNVYFVCSKKKSSQEKECNSKWLRVDFVEKYVLDMLKKISLNPNSLENYLKKNNTSIDYSGLIKKVKDELNKNNIIIENLTEKLILLDGAAVNIISEKINNIANKNVKLNEKLLHLERERIFKEVDSGNLNLLTNNINSFLSNFDKLDITEKQNFIQSILECVIWDSDFNSNKKKGKLSLKFLN

SEQ ID NO: 6688 - protein, 538 aa, synthetic construct
MTVIAIYARKSLFTGKGDSIGAQIDTCKRFIDYKFANEQYQLKIFTDEGWSGKTTDRPEFNKMLKLIEEKKVNYIISYKLDRLGRTARDLHNFLYDIDKLNIIYLSATEPYDTTTSAGRFMISILAAMAQMERERLAERVKGGMLQLAKKGRWLGGQTPLGFDSVKEIYIDDMGKERQIMKLTSNKKEIKVVKLLFDKYLELGSMNQVKKWCIENNIKGKNGGEVSTNTLKQILSSPIYVKSSSKVIDYLENQGINVFGEPNGNGMLTFNKTKEIRIERDKSEWIAAVSKHKGIIDDTKWLKIQNQLELQSEKQIKSSGRQGTSDCLLSGLIKCAKCGSNMMIKAGHKSVKTGTTYKYYVCGKKDNSYGHKCNNKNIRTDEADEAVITQMKLYNKELLIKNLIAASKEANAVEEINKIIMLQDKISEKEKSVSNLIKKLSLVDDETISNAILNEVSNINKEIKELQLNLEKETIKNNEITTAKVDVDSYIQVLENFNENIDRVNINEKKVLLSSVLESVIWNGETCELEINLLGAKKK

SEQ ID NO: 6689 - protein, 521 aa, synthetic construct
MNKSITVIPARRRVGNTIKMEDKPKLRIAAYCRVSTDSDEQATSYESQIEHYTNFIQKNEEWQLSGVFADDGISGTNTKKRDEFNRMIEECMAGNIDMIITKSISRFSRNTLDCLKHIRLLKEKNISVYFEKENINSLDSKGEILLTIMASLAQQESESLSKNVKLGLQFRYQNGEVQVNHKRFMGYTKDDEGHLIIEPAEAAVVKRIYLEYLQGASLKQIGASLESDGILTAAGKARWRPETIKKILKNEKYIGDALLQKTYTVDVLTKKRVKNNGIVPQYYVENNHEAIIPRDIYMQVQEEMLRRANFHSGADRKKRVYSSKYALSSIVYCSKCGDIYRRIAWNNKGKHSIVWRCCIRVEHGPSRCDAPTVGEMELQEAVIKAINMALGSKDDMLVALEQNIVSVLAMEDEGSIESINAKLEELQKELLKRANAKKDYNDLADEIDHLRELKQKAMAENAEREGLKQRIAEMQEFLAEQVEQIEEYDESLVRRMVEKVTVYEKKFSVEFKSGTSVDVER

SEQ ID NO: 6690 - protein, 519 aa, synthetic construct
MKRITKIEENKVLSAKKKIRVAAYCRVSTASDEQLISLDAQKAHYENYIKANDEWEYSGLYFDEGVTGTKKEVRSGLLSLIADCEKGIIDLVITKSISRFCRNTTDCLEIVRKLLDLNVYINFEKENLNTGSMESELMLSILSSLAESESVSISENEKWSIKKRFQNGTYIISYPPYGYANINGEMVIVPEQGEVVKQIFTDTLAGKSTHTIAKELNELGVKSKKGSKWTSGTINAIIRNEKYTGDVIFQKTYTDSSFNRHTNYGEQDQYLCTAHHEAIIGHEVFTKANEVMSQRGKEKGNGENTQRYQNRYGFSGKIRCGECGSVFKRRIHNKPSGKYVAWCCTHHIEDKNACSMKYITDDSIKVAFLTMMNKLIFAHQLVLRPLLRSLQGLDDKDRLLQIQEYETKLEKNMEQRQVLTSLMASGILEPALFNSENNTLIQEKEMLETEKNKLMHSVSGDRTKFDALEKLIKYVSRSEMLKEYEDEVFLAHVDKITVVSREEIIFLLKCGLELGERMA

SEQ ID NO: 6691 - protein, 529 aa, synthetic construct
MSTARSVTVIPPIVSKFTSGTTRAVTLKRVAAYARVSTDNDEQLSSYEAQVDYYTRHIKSNPTLDFVNVYSDEGISATSTKKREGFNRMITDALKGKIDLIITKSVSRFARNTVDTLTTVRKLKEKGVEVYFEKENIYTLDSKGELLITIMSSLAQEESRSISENVTWGQRKRFADGKVSLPYKQFLGYEKGEDGLPKIVEKEAKVVRLIYKLFLEGKTPSGIARYLTENKIPTPAGKEVWQPTTVKSILQNEKYKGDAILQKSFTVDFLTKKKKKNEGEIPQYYVENSHPAIISSEVFDLVQQEMKKREKLKGYKTSGSCFSSKIVCGECGSFYGSKVWHSNSKYRRVIWQCNSKFKNHKKCNTPHLYEDKIKQAFVEAFNSLIENKEEILKDYEDIIQALTDTSKLDKERVKLKNELEIVMEMLKKCVEENAHTALNQEEYEEKYKSLAERYESISKEIEGIDEKRLERNVKKENTVKFIKKLESREVLITEFDEELWLGTVEKVIVNTEEKIIFFFKDGMELEWNI

SEQ ID NO: 6692 - protein, 547 aa, synthetic construct
MKLLVTYIRWSTREQDSGDSLRRQTNLIDAFYAKHKDDYYLLPAHRYVDKGKSGFHQQHKAQGSDFRRMFENVMSGAIPEGSLIVVENFDRFSRADIDTAIDDVRQILRKGVSILTLGDGELYDKSALTDPVKLIKHIIIAERAHQESLVKQKRIAQVWNHKTQLARELKKPMGKQAPGWLELSEDGSHYIVDEDKASLVNIIYDKRLSGMSMFAICKWLNEQGYPTINQRKVRISKTKKPDGNWSALSVKHILTSRSVLGYLPAKISTEDRKTVLREEIESFYPQIVTDSKFYAVQQLLEETGKGKTSSGEHWLYVNILKGLIRCKCGLVMTPTGIRKPVYQGTYRCNGNKESRCSYGTVSRKLLDTQLCSRLFSKLSQLHDEATDTARLDELQRRLNTVDSELEKLTETLIQLPNITQIQEALRVKQEEKDELIVQLSREKARVKSVSSLDLSGLDMESVEGRTEAQIIIKRLVKEIVVSGNEKLVDIYLHNGNMIRGFPLDGKDDHTLTLEEATDEMQPLDDMLIFGEPVTRIYPAGDMEEVDA

SEQ ID NO: 6693 - protein, 507 aa, synthetic construct
MKRVISYIRFSSERQAKGDSLRRQSKMVNDWLKAHPEYYLDQDLSFRDLGVSGFTGKHLKGGLGDFLTAIEKGLVKAGDTLLIESLDRLSRQDIDIASELLRNILRSGVDVVTLSDGEHYTRESLRDPLALIKSILIMQRAHEESLRKAERIQAAWDAKKEAAKAGIKVSKRCPAWLKLNDDRKSFSVIPEKVETVKRCFQLRLEGKSIWEIVRTLNDEGHQSMSQYKPGKFGQTSVQDLLKNRSVIGYFTPKGCEEISGYYPAIIDETTFYKVQQLSYARHGRKPASDKPLSVNLFKGVIRCSECGHALIITGFSDTRSGIYRCPLRNENRCSAKGLSRKQTDGTLLTLLSRLDRFDSDMTNTLDTLKLHREHISSNIEKLVQLSLEIEDLNAITNKLKQLKNELSQVDADIEKETQRLKSIDVGCLSDCDLTTKAGRIEAQLIIKSAVKEVVLNTAKRRCKVTFHNGRIIDLPITENPSEDVTEAIQSLSEVTERGLIDVDEVII

SEQ ID NO: 6694 - protein, 507 aa, synthetic construct
MKRVISYIRFSSEKQAKGDSLRRQSKMVTDWLKAHPEYYLDQDLSFRDLGVSGFTGKHLKGGLGDFLTAIEKGLVKAGDTLLIESLDRLSRQDIDIASELLRNILRSGVDVVTLSDGEHYTRESLRDPLALIKSILIMQRAHEESLRKAERIQAAWDAKKEAAKAGIKVSKRCPAWLKLNDDRKSFSVIPEKVETVKRCFQLRLEGKSIWEIVRTLNDEGHQSMSQYKPGKFGQTSVQDLLKNRSVIGYFTPKGCEEIAGYYPAIIDETTFYKVQQLSHSRYGRKPVSAKPLSVNLFKGVIRCSECGHALIITGFSDTRNGIYRCPLRNENRCSAKGLSRKQTDGTLLTLLSRLDRFDSDMTNTIDTLKLHREHISSNIEKLVQLSLEIEDLNAITNKLKQLKNELSQVDADIEKETQRLKSIDTGSLSDCDLSTKAGRIEAQLIIRSAVKEVVLNTAKRRCKVTFHNGKVIDLPITENPSEDVTEAIQSLSEVTERGLIDVDEVII

SEQ ID NO: 6695 - protein, 507 aa, synthetic construct
MKRVISYIRFSSEKQAKGDSLRRQSKMVTDWLKAHPEYYLDESLTFRDLGVSGFTGKHLKGGLGDFLTAIEKGLVKAGDTLLIESLDRLSRQAVDRASELLRNILRSGVDVVTLSDGEHYTRESLRDPLALIKSILIMQRAHEESLRKAERIQAAWDAKKEAAKAGIKVSKRCPAWLKLNDDRKTFSVIPEKVETVRRCFQLRLEGKSIWAIVKALNDEGHQSMSQYKPGKFGQTSVQDLLKNRSVIGYFTPKGCEEISGYYPAIIDETTFYKVQQLSYARYGRKPASDKPMAVNLFKGVIRCSECGHALIITGFSDTRNGIYRCPLRNENRCSAKGLSRKQTDGTLLALLSRLDRFDSDTTNIIDMLRLHREHVSSNIEKLVQLSLEIEDLNAITSKLKQLKGELSQVDADIEKETQRLKSIDVGCLSDCDLTTKAGRIEAQLIIKSAVKEVVLNTAKRRCKVTFHNGKAITLPITENPSEDVTEAIQSLSEVTERGLIDVDVVEI

SEQ ID NO: 6696 - protein, 553 aa, synthetic construct
MLCYSYVRFSTPDQAKGDSYRRQMEFASNYCKLHNLTLVEDLSFKDLGVSAYKGNNLKNGALGKFLELVVSGQIPSGSTLVIESFDRLSRQTAIKAQAVFFEIISAGITIVTAMDNRSYNLQSVADNPFDLMYSLMIMIRANEESETKSKRVKEAIKSKIDNKKIIPSKLPYWIKHNKNEDVLELIPERAQIISYIIERYLSGFGINKLTRHLNETIPPFAGKSWYPLYLQKLLRSVSLYGERQFNMNDTLYIMDDYYPAIIDKSKFAVIQENLDSRAPTRGGKIPSAITGIRRAYCGYCQGVLVSQSTKRNGKIVDGLRRARCGTNNNAGSCITSSFRISIVESAIAEYCSQHFDLSLLAPESNSSKLDLAKYRLELKQLDTIIANYVKFISDGNISPAIISALDEAEKNKKKLQQKIQKSELNTLTKSKCEITAKWKTIKTNLSVYDEENILKLRELIRGSIKRILVFQYGLWAKTGKITTPSGKIIQPHNGNFTIQITFNNGVRKTLELGENVKDQEVDTINRTITENGNTYTSDEYILMIQKTLTKQST

SEQ ID NO: 6697 - protein, 547 aa, synthetic construct
MKLLATYIRWSTREQDSGDSLRRQTNLIDAFYSKHKNDYYLLPAHRYVDKGKSGFHQQHKAQGSDFRRMFENVMSGAIPEGSLIVVENFDRFSRADIDTAIDDVRQILRKGVSILTLGDGELYDKSALTDPVKLIKHIIIAERAHQESLVKQKRIAQVWNHKTQLARELKKPMGKQAPGWLELSEDGSHYIVDEDKASLVNIIYDKRLSGMSMFAICKWLNEQGYPTINQRKVRISKTKKPDGNWSALSVKHILTSRSVLGYLPAKISTEDRKTVLREEIESFYPQIVTDSKFYAVQQLLEETGKGKTSSGEHWLYVNILKGLIRCKCGLVMTPTGIRKPVYQGTYRCNGNKESRCSYGTVSRKLLDTQLCSRLFSKLSQLHDEATDTAKLDELQRRLNTVDSELEKLTETLIQLPNITQIQEALRVKQEEKDELIVQLSREKARVKSVSSLDLSGLDMESVEGRTEAQIIIKRLVKEIVVSGNEKLVDIYLHNGNMIRGFPLDGKDDHTLTLEEATDEMQSLDDMLIFGEPVTRIYPAGDMEEVDA

SEQ ID NO: 6698 - protein, 507 aa, synthetic construct
MKRVISYIRFSSEKQAKGDSLRRQSKMVTDWLKAHPEYYLDQDLSFRDLGVSGFTGKHLKGGLGDFLTAIEKGLVKAGDTLLIESLDRLSRQDVDQASELLRNILRSGVDVVTLSDGEHYTRESLKDPLALIKSILIMQRAHEESLRKAERIQAAWDAKKEAAKAGIKVSKRCPAWLRLNDDRKTFSVIPEKVATVKRCFQLRLEGKSIWEIVRTLNAEGHRSMNQYKAGKFGQTSVQDLLKNRSVIGYFTPKGCEEISSYYPSVIDETTFYKVQQLSHSRYGRKPVSDKPLSVNLFKGVIRCSECGHALIITGFSDTRNGIYRCPLRNENRCNAKGLSRKQTDGTLLALLSRLDRFDSDMTNVIDALKLHREHISNNIEKLVQLSLEIEDLSAITIKLKQLKGELSQVDADIEKETQRLKSIDVGCLSDCDLTTKAGRIEAQLIIKSAVKEVVLNTAKRRCKVTFHNGKSITLPITENPSEDVTEAIQSLSEVTERGLIDVDVVEI

SEQ ID NO: 6699 - protein, 507 aa, synthetic construct
MKRVISYIRFSSEKQAKGDSLRRQSKMVTDWLKAHPEYYLDESLTFRDLGVSGFTGKHLKGGLGDFLTAIEKGLVKAGDTLLIESLDRLSRQAVDRASELLRNILRSGVDVVTLSDGEHYTSESLKDPLALIKSILIMQRAHEESLRKSERIQAAWDAKKEAAKAGIKVSKRCPAWLKLNDDRKSFSVIPEKVETVKRCFQLRLEGKSIWEIVRTLNDEGHQTLNQYKAGKFGQTSVQDLLKNRSVIGYFTPKGCEEISGYYPAIIDETTFYKVQQLSHYRYGRKPVSDKPLSVNLFKGVIRCSECGHALIITGFSDTRNGIYRCPLRNENRCSAKGLSRKQTDGTLLALLSRLDRFDSDTTNTIDTLKLHREHISSNIEKLVQLSLEIEDLSAITSKLRQLKGELSQVDADIEKETQRLKSIDVGCLSDCDLTTKAGRIEAQLIIKSAVKEVVLNTAKRRCKVTFHNGKVIDLPITENPSEDVTEAIQSLSEVTERGLIDVDEVII

SEQ ID NO: 6700 - protein, 507 aa, synthetic construct
MKRVISYIRFSSEKQAKGDSLRRQSKMVTDWLKAHPEYYLDESLTFRDLGVSGFTGKHLKGGLGDFLTAIEKGLVKAGDTLLIESLDRLSRQDIDIASELLRNILRSGVDVVTLSDGEHYTRESLRDPLALIKSILIMQRAHEESLRKSERIQAAWDAKKEAAKAGIKVSKRCPAWLRLNDDRKSFSVIPEKVETVKRCFQLRLEGKSIWEIVRTLNDEGHQTLNQYKPGKFGQTSVQDLLKNRSVIGYFTPKGREEIAGYFPPIIPETDFYKVQQLSHSRYGKRSVSDKPLSVNLFKGVIRCSECGHALIITGFSDTRNGIYRCPLRNENRCNAKGLSRKQTDGTLLALLSRLDRFDSDTTNIIDTLRLHREHISSNIEKLVQLSLEIEDLSAITSKLKQLKGELSQVDADIEKETQRLKSIDVGCLSDCDLTTKAGRIEAQLIIKSAVKEVVLNTAKRRCKVTFHNGKSITLPITENPSEDVTEAIQSLSEVTERGLIDVDVVEI

SEQ ID NO: 6701 - protein, 506 aa, synthetic construct
MRHVITYLRYSSAIQGAEGADSTRRQNDLFKQWLKKNSDAQVVASFSDEGLSGYKGKHLTGQFGDMLARIESGEFPAGTILLVESIDRIGRLEHLETEALMNRILGNGIEIHTLQDGLIYTKDALADDLGISIIQRVKAYIAHQESKQKSFRVSQKWEQRAKLALAGEQRLTKMVPGWIDPDTFKCNEHAETVRLIFKLLLDGESLHNIARHLQANNISSFSRRKDANGFSVHSVRTILRSVTTIGTLPASQRNDRPAIPNYYEAAIDAATFNKAQEVLDKNRKGRTPASDNPLTINIFKGLFRCQCGASVHPTGTKNKYAGVYRCNNHLDGRCDVPPLKRKPFDRWMIDNFLGMIDVGNDGEAEGKIAALQHEVEIVTARIKKATALLLEMDDITELKTQVKGLNQKRTELQTTIDNMRRKASLTDKELPQLKDIDLTTKAGRVECQLILSKHLKGLTLGKDSVTVTLQNDTEITIPTDPLPLNDGTSIFEIAEKNLLNIDTFQL

SEQ ID NO: 6702 - protein, 506 aa, synthetic construct
MRTVITYLRFSSAIQGAEGADSTRRQNDLFKQWLKKNSDAQVVASFSDEGLSGYKGKHLTGQFGDMLARIESGEFPEGTILLVEAIDRIGRLEHLETEALMNRILGNGIEIHTLQDGLVYTKDALADDLGISIIQRVKSYLAHQESKQKSFRVSEKWKQRAKLALAGKQRLTKMVPGWIDPDTFKLNEHAETVRLIFKLLLSGESLHNIARHLQANNISSFSRRKDANGFSVHSVRTILMSETTIGTLPASQRNDRPAIPNYYEAAIDAATFNKAQEILDKNRKGRTPASDNPLTINIFKGLFRCQCGASVHPTGTKNKYAGVYRCNNHLDGRCDVPPLKRKPFDRWMIDNFLGMIDVGNDGEAEGKIASLQHEVEIVTARIKKATALLLEMDDIDELKIQIKELNQRRTELQTTIDNMRRKASLTDKELPQLKDIDLTTKAGRVECQLILSKHLKGLTLGKDSVIVTLQNDTEITIPTNPLPLNDGTSIFEIAEKELLEIDAYQL

SEQ ID NO: 6703 - protein, 506 aa, synthetic construct
MRTVITYLRFSSATQGAEGADSTRRQNELFKQWLRKNSDAQVVASFSDEGLSGYKGKHLTGQFGDMLARIEAGEFPAGAILLVESIDRIGRLEHLETEALMNRIIAHGIEIHTLQDGLIYTRDALSDDLGISIIQRVKSYLAHQESKQKSFRVSQKWEQRAKLALAGEQRLTRNVPGWIDPDTFKCNEHAETVRLIFKLLLSGESLHNIARHLQSNGIKSFSRRKDANGFSVHSVRTILRSETTIGTLPASQRNDRPAIPNYYEPAIDAATFNKAQEILDKNRKGRTPASDNPLTINIFKGLFRCQCGASVHPTGTKNKYQGVYRCNSHLDGRCDVPPLKRKPFDRWMIDNFLGMIDVGNDGEAEKEIASLQHEVETVTARIKKATALLLEMDDITELKTQVKELNQKRTELQTTINTMKRKTSLSDKGLPQLKDIDLMTKAGRVECQLILSKHLKGLTLGKDSVTVTLQNDTEITIPTNPLPLNDGTSIFEIAEKNLLNIDTFQL

SEQ ID NO: 6704 - protein, 507 aa, synthetic construct
MKRVISYIRFSSEKQAKGDSLRRQSKMVTDWLKAHPEYYLDESLTFRDLGVSGFTGKHLKGGLGDFLTAIEKGLVKAGDTLLIESLDRLSRQDIDIASELLRRILRAGVDVVTLSDGEHYTRESLRDPLALIKSILIMQRAHEESLRKAERIQAAWDAKKEAAKAGIKISRRCPAWLKLNDDRKSFSIIPEKVETVKRCFQLRLEGKSIWAIVKALNDEGHQTLNQYKAGKFGQTSVQDLLKNRSVIGYFTPKGCEEIAGYYPAIIDETTFYKVQQLSHSRYGKRSVSDKPLSVNLFKGVIRCSECGHALIITGFSDTRSGIYRCPLRNENRCSAKGLSRKQTDGTLLALLSRLDRFDSDMTNTIDTLKLHREHISSNIEKLVQLSLEIEDLSAITIKLKQLKGELSQVDADIEKETQRLKSIDVGCLSDCDLTTKAGRIEAQLIIKSAVKEVVLNTAKRRCKVTFHNGRAITLPITENPSEDVTEAIQSLSEVTERGLIDVDEVII

SEQ ID NO: 6705 - protein, 547 aa, synthetic construct
MKLLATYIRWSTREQDSGDSLRRQTNLIDAFYSKHKNDYYLLPAHRYVDKGKSGFHQQHKAQGSDFRRMFENVMSGAIPEGSLIVVENFDRFSRADIDTAIDDVRQILRKGVSILTLGDGELYDKSALTDPVKLIKHIIIAERAHQESLVKQKRIAQVWNHKTQLARELKKPMGKQAPGWLELSDDGSHYIVDEDKASLVNIIYDKRLSGMSMFAICKWLNEQGYPTINQRKVRISKTKKPDGNWSALSVKHILTSRSVLGYLPAKISTEDRKTVLREEIESFYPQIVTDSKFYAVQQLLEETGKGKTSSGEHWLYVNILKGLIRCKCGLVMTPTGIRKPVYQGTYRCNGNKESRCSYGTVSRKLLDTQLCSRLFSKLSQLHDEATDTAKLDELQRRLNTVDSELEKLTETLIQLPNITQIQEALRVKQEEKDELIVQLSREKARVKSVSSLDLSGLDMESVEGRTEAQIIIKRLVKEIVVSGNEKLVDIYLHNGNMIRGFPLDGKDDHTLTLEEATDEMQSLDDMLIFGEPVTRIYPAGDMEEVDA

SEQ ID NO: 6706 - protein, 559 aa, synthetic construct
MKTKLYSYIRFSSMKQADGSSYERQKRTAAEIAAKYDLELVTSYQDFGVSAFKGANSRTGALSRFLDEIGRSVPVGSWLVVENLDRISRQSIIEAQELFLSIIRRGITIVTGMDGKVYSKESVNANPIDLLLSVMLFARANEESQTKRNRTNSSALIKIKAHQENPQNPAVAIEEIGKNMWWTDTTSGYVCPDPVFFPIVQEVVELRRNGRSTAEILDHLNATYTPPPAASHKRHSNWSRAMIERLFHTRALIGIKEISVDGVKYELKDYYPRVLDDAEFYHLKKSIGVRACNYGDKEEVKPIPLLSGVGLLKCEHCGSAMVKVKGTNKRPNQYRYSCDAMRSSRIACVHTNWSFRGNQLEKAVLQLLADKIWIAEDKANPVPALKVQIDEISRKIDNLITLSAMTGATKELADQITTLNSERETLYNQIKMSEEEMYSVDSQGWEKLAEFDLEDVYNEDRIKVRFKIKQALKRIGCSRIDKYKNLFVLEYIDGKTQRVVIENSRGPRKGRIFVDLKTINDRQILESNGLVLHPCLDMLTDKNWKPEEEIPGPLQEFGI

SEQ ID NO: 6707 - protein, 506 aa, synthetic construct
MRSVITYLRFSSAIQGAEGADSTRRQNDLFKQWLKKNSDAQVVASFSDEGLSGYKGKHLTGQFGDMLARIESGEFPEGTILLVEAIDRIGRLEHLETEALMNRILGNGIEIHTLQDGLVYTKDALADDLGISIIQRVKSYIAHQESKQKSFRVSEKWKQRAKLALAGEQRLTRNVPGWIDPGTFTLNEHAETVRLIFKLLLSGESLHNIARHLQANNISSFSRRKDANGFSVHSVRTVLRSESVIGTLPASQRNDRPAIPNYYEAAIDAATFNKAQEILDKNRKGRTPASDNPLTINIFKGLFRCQCGASVHPTGTKNKYAGVYRCNNNPDGRCDVPPLKRKPFDKWMIDNFLGMIDVGNDGEAEGKIASLQHEVEIVTARIKKATALLLEMDDIDELKIQLKELNQKRTELQTMIDNMRRKASLTDKELPQLKDIDLMTKAGRVECQLILSKHLKGLTLGKDSVTVTLQNDTEIIVPTDPLPLNDGTSIFEIAEKELLEIDAYQL

SEQ ID NO: 6708 - protein, 506 aa, synthetic construct
MRSVITYLRFSSAIQGAEGADSTRRQNDLFKQWLKKNSDAQVVASFSDEGLSGYKGKHLTGQFGDMLARIESGEFSEGTVLLVEAIDRIGRLEHLETEALMNRIIAHGIEIHTLQDGLIYTRDALSDDLGISIIQRVKSYVAHQESKQKSFRVSQKWKQRAKLALAGEQRLTKMVPGWIDPDTFKCNEHAETVRLIFKLLLDGESLHNIARHLQSNDIKSFSRRKDANGFSVHSVRTVLRSESVIGTLPASQRNDRPAIPNYYEAAIDASTFNKAQEILDKNRKGRTPASDNPLTINIFKGLFRCQCGASVHPTGTKNKYAGVYRCNNHLDGRCDVPPLKRKPFDRWMIDNFLGMIDVGNDGESERKIAALQHEVEIVTARIKKATALLLEMDDIDELKIQLKELNQRRTELQTTIDSMRRKTSLTDKELPQLKDIDLTTKAGRVECQLILSKHLKGLTLGKGSVTITLQNDTEIIVPTDPLPLNDGTSIFEIAEKELLDIDAYQL

SEQ ID NO: 6709 - protein, 481 aa, synthetic construct
MFTTNKVAIYVRVSTTNQAEEGYSIEEQKDKLSSYCNIKDWSIYNIYTDGGFSGSNTARPALENLIKDAKKKKFDTVLVYKLDRLSRSQKDTLYLIEEVFIKNGIEFLSLQENFDTSTPFGKAMIGLLAVFAQLEREQIKERMQLGKLGRAKSGKPMMWSKPAYGYIYHKESGELIVNELEAIVVREIFKSYLEGMSITKLRDKVNEKYPKTPAWHYRIIRGILANPVYCGYNQYKGQVFPGNHEPIISEEVFNKTQEELKIRQQTAAEKFNPRPFQAKYMLSGIAQCGYCHAPLTIIMGMIRKDGTRFIRYECKQRYPRKTKGVTVYNNNEKCHSGAYEKSDIEEYVLKEISKLQNDKDYLDEIFSDSNTETIDRESYQKQIEELSKKLSKLNDLYIDDRITLEDLKKKSYEFTSMRTLLETELENDPALKKQKRKDDMKKILSAEDIFSMDYEGQKIMVRGLINKVQVTADDVFIKWKI

SEQ ID NO: 6710 - protein, 449 aa, synthetic construct
MKQAIGYLRQSTTKQQSLAAQKQTIEALAKKHNIQYITFYSDKQSGRTDKRNGYQQITELIQQGQCDVLCCYRLNRLHRNLKNALKLMKLCQKYHVHILSVHDGYFDMDKAFDRLKLNIFISLAELESDNIGEQVKNGIKEKAKQGKMITTHAPFGYHYHNGTFTIDTVKAPTVKAVFNYYLQGYGYKKIAQYLEADDKFINRKPYQVRNIILNPNYCGRVINQYGQYENMFPAIVSTTIYEEAQVTRTQKPVKRKPSENQLKQKIKCPYCDSTLTNMTIRKKHHTLRYYVCPQNMNASRFVCEFKGINAQELETSVLATCQDFFQNQQLYSKINHTIQQRLKRQRDIETKTTLNHEQLIEKLAQDKIDAETFREQAQSLRQQSKPISSISTYQIRKAFQNIIQQRFTLNMLYPYIDEINISKNKSLAGIYFKNEPLNIVKQTMELSIV

SEQ ID NO: 6711 - protein, 599 aa, synthetic construct
MSKIIPYGYLRVSSLEQVRTGGGLDTQDEEVRRYITQKSDVFDIDKMVMMSDEGLSAYSGRNIKEGELGRFLADVNAGLIPAGSALVCYSVDRLSRQNPWVGTQLISTLIGAGIEIHSVAENQILRSDDPVGAIMSTIYLMRANNESVIKSERAKHGYTKRLNESIANKKVLTRQMPRWLYDNDGKYAIDPNMQKVIDFTFDSYIAGQSTGYIAKELNDMGLKYGDTSWRGSYVAKLIRDERLIGKHIRYSKQIKGVKREIIETIPDFYPVTIDTDKFHIANNMLTSVSKNIRGRTRITYGDTSILRNLFNGVIKCGVCSGETSVVQNTRKKIINGVVTYVPYKTFLRCRNRYELKTCTQGDIRYEVIERAILNHLMGLDIATLLAAPVDNKIERYRTELELCKAEEEELQVIIKERENEGKRPRPQTLKSYEDVADRIDELTQLIESHVEDNFIPHFNVDLDSITDVSNVSERSLIKKGITTIADSICYKRISDFILVEIKYRNLNDKHVLVINNKNSEMVVNFSIEYNEENKVYICNSFVMEYDNLSCEFTVSKTTMEDYAHMMNFVDYVSDDESYNAKEFLVNNFTHIKFIDKSNE

SEQ ID NO: 6712 - protein, 518 aa, synthetic construct
MPKAISYIRFSTKIQSVGDSTKRQSKYINDWLKRNPDYYLDESLRFQDLGISGFSGANAKSGAFGEFLAAVDSGYIEANSVLLVESLDRVSRQDIDTAGEQLRKILRAGVEVVTLVDNEWYTKESLKDSLSMIKAMLVMERAHEESAMKSTRLRSVWAAKRERAANGEIMSKRCAAWLKVSEDRSHFEFIPENVKAVQRVFQLRLEGLSHVKIAKQMNDEGFSTLNQFKSVTGGWSQSSVTELLSNRSVIGFKVPSKSMAVKGVSEIPNYYPSIITDEQFYAVQQLKQGSGRRPSSEKPLLTNLFKGVLRCSECGFIMVVAGVTAKRSGIYKCSMKSEGRCNSVGFSRLQTDKALVQGLLYNTNRLLLNRDNGSAIGALQSELEQLQKQRERLIKLSMLTDDTESMAKDLKALNSQIKDAERAVSEVHQREQSSQLETISHLDLTVKKDRIEAQIIIKRIVKEIRLNTAAKKCDVFLHNGLKLYNFPLDRVVDGEIFLEVLPLLEADEFDFDTYRVIE

SEQ ID NO: 6713 - protein, 534 aa, synthetic construct
MEQVRNGMWDSSILVVESIDRFSRQNPFDVMGYINALMAHNVAIHDVMANIVISRSNSKDLPFVMMNAQRAYDESKYKSDRIRKGWAKKREQAFNKGTIITNKRPQWIEVDNDKYVLNEKAAVVKEIFALYQTGMGCPTIAKQLQRKEGEQYKFNRPWTGELVHKILTNRRVTGKIFISEIIRNHDDIENPVTQKKYDMDVYPVVINEEEFELVQELLKSRRSNAGRITVKKDGQEEVLIKSNLFSGIARCTECGGPMYHNVVRAKRTPKKGDPKIEEYRYIRCLNERDGLCENKAMTYETVERFVVEHLLGMDLSTVMKEQEFNPEIEVLRIQIDQVKDQIANYENGIERRKSTGKPISFEMREELDDAKSELERLLARQASLATVQVDVPVLQDVNVTELYDVNNVDIRTRYENELNKIVSNIRLKRNGTYYTIDINYKQNELKRHVLFVENKKKELTLISEVIIEDVDGGKFYYTPSFMIRLKDGEIRFQQTNEDLSIVDYSLLLNYVDAIDRNDAVGVWMRNQFNFLTSN

SEQ ID NO: 6714 - protein, 589 aa, synthetic construct
MSAHVTILRNTVLPVKFNTMNRPRLYSYIRYSSERQGKGSSIERQKSYIAEMAKQIATEYDLEIFEEYQDLGVSAYKGKNVQEGALSDFIDQVESGLIPKGSFLLIESLDRFSRQNAMQAVNLFTSLLLNGITVITGIDKQVYRQTEVNTETLQQLMFSVMLFSRANEESSTKSHRTIASALSKIRRHQERKPGDPVVAIKELGSDKWWTDSSTGYVNPHPVLFPIAKKIIQLKQDGWSNRMILQHLKNNYDGPVIGNKKSKGIWNMQHCSRILEPAIYGRKVITVNNAEYVLDDYYPAIISKDEYEALKLQVGNKGFAPNRESNPEIPLLSGIGILHCAHCSCYMVKAKSTLKNHPHAYRYQCASRDLHQDCNKWGFRASTLERTILQLIADRIFLQTKYQPSGLEGKIADIQSQIENYVLAIGSAKSPEIINSLTSQIDQLEQEKQSLIVEKRLYDESIVQMNTEGWDKFKKFDIDDALNPLRTKIRANIKTVIMRVDCSRIDKKHNLFTITYRDQHKQRIVIENNSGWKKGKIYVEAQTINDIQILESEGLILHDHIDILINRDKFMTEAKKRLDHPRTLIDELTE

SEQ ID NO: 6715 - protein, 517 aa, synthetic construct
MRHVITYLRFSSKPQERGDSIRRQTDLFDRWLKTNPDAEVIDQFKDEGQSAFHGRHLKGDFGRMLQNIEDGKYIAGQTVLLVESEDRLNRQKARNTESLVDLITGKGIDVICLASGKVYNAENIDELGTSIQLKIAAHIAYKQSKDKSDKVSDAWGQRAKLALSGEQQLTKMVPGWIDPETRKLNEHAQTVKDIFSLLLSGDSLHNIARHLQASGTKSFSRRKDANGFSVHSVRTILRSESTIGTLAASKHNDRPAIPDYYEAAVDIATFNKAQELLSKNRKGRTPASDNPITINLFKGLMRCQCGASVHPTGVKNTYQGVYRCNNVVDGRCTVPTIKRKAFDTWMINNAVGMLEQSGDNDTERKKAELQYQIDMLSKRIAKGSALLIELDDVAELKEEVKKHSDQRKQLQSELDKLNQRETFSDKSLPHLADIDLTTKAGRIEAQLLLSKYIKGIVVHPSTFTVSLRNGNTYENLSLAPHEVYPDEEALSIRNRMQQLIDDELGIIEPTLKGQMKW

SEQ ID NO: 6716 - protein, 606 aa, synthetic construct
MKKVFVYHRVSSDQQFGGSGIARQAELLEAYLKRTNILAEMDDPEPVIITESGGVSAFKGHNMLITSGLGAWMQEVRASKWDGSHLVYENGDRFSRQNPFLVIGYINDLINHNITIHDATMNIIISREKSAMLPMVLMNAQRAYDESKYKSDRIRKGWAKKREQAFNKGTIVTNKRPQWIEVEKDKYVLNERAAVVKEIFALYQTGMGCPTIAKQLQRKEGEQYKFNRPWTGELVHKILTNRRVTGKIFISEIIRNHADIENPVTQKKYDMDVYPVVINEEEFELVQELLKSRRPNAGRVTVKKDGQEEVLIKSNLFSGIARCTECGGPMYHNVVRAKRTPKKGDPKIEEYRYIRCLNERDGLCQNKAMPYETVERFVVEHMLGMDLSTVIKEREFNPEIEVLRIQIDQVKDQITNYENGIERRKSAGKPISFEMREELDDAKSELERLLARQASLATVQVDVPVLQDVNVTELYDVNNVDIRTRYENELNKIVSNIRLKRNGTSYTIDINYKQNELKRHVLFVENKKKEQSLISEVIIEDIDGAKFYYTPSFMIRLKEGEIRFQQTNEDLSIVDYSLLLNYVDAVDRNDAVGVWMRNQFNFLTSN

SEQ ID NO: 6717 - protein, 559 aa, synthetic construct
MKTKLYSYIRFSSMRQNDGSSYERQIRMAREVAAKYDLELVNDYQDLGVSAFKGANSKTGALSRFLDAIGRSVPVGSWLFIENLDRLSRADIVSAQELFLSIIRRGITIVTGMDNKIYSLDTVTANPMDLMFSILLFIRGNEESQTKRNRTNSSALIKIKAHQENPQNPAVAIEEVGKNMWWTDTTSGYVLPHPVYFPVVQEIVELRKNGRSTAEILDHLNETYAPPPAVSNKKHSKWSRAMVERLFHTRALIGIKEVSVDGVNYELKDYYPRVIDDATFYHLKKNIGARAWNFGDKEEAKPIPLLSGIGLLKCDHCGCAMVKVKGTNKRSDQYRYTCDATRSRRLDCEHPNWSFRGDQLEKAVLQLLADKIWIAEDKANPVPALKVQVDEISRKIDNLIALSAMTGATKELADQITTLNSERETLYNQIKMAEEEMYSVDSQGWEKLAEFDLEDVYNEERLKVRFKIKQALKRIGCSRIDRNKNLFVLEYIDGKTQRVVIENSRGTRKGRIFIDLKTINDRQILESNGLVLHPCLDMLTDKNWKPEEEIPGPLQEFGI

SEQ ID NO: 6718 - protein, 603 aa, synthetic construct
MYNNNTIGTQNANIKGSGYVKEVEVIKARNDLQTRTRGKTIELMRVGAYCRVSTDSADQLNSYKSQVAYYTDLIKKNKEWVLADIYADEAITGTQVTKREDFQRMINDCMNGEIDMVITKSISRFARNTLDTLKYVRMLKERNIAVYFEDEKINTLTMDGELLLVVLSSVAQQEVENISANVKKGLKMKMKRGELVGFQGCLGYDYHKDTKTITVNEEEAEIVRYIFNRYIEGAGGSVIAHELENLGYKTKYGSSTWVQSTVLGIIKNEKYKGDLLLGKTFTVDPISKRRLENFGEEDKFYIRNHHEPIISEEVFEKAQEILARRNVNRGKIGEGNTKREKYSRKYAFSCLLECGFCGGTLTRRNWHSSSQYSKVIWQCVTATKKGKKFCKHSKGIPETAIEEAFVESYRLLCGDNKDVLEEFLQRMEDTLSSSVVSKQLDKAEKEIDALEKKKSKLVDMRLEEIIDKETYENKYADLVSKQEQLIEERKKLQETSDNEKDIKKRLKEFKKTLEQNEVLDKFDRYVFESIVEKVIVGGLDENGNVDPAQLTFVYKTGLKNSVDGAKFKPQRKNARGRHRTAELCSHDSNEVDGMCSNSSNDTL

SEQ ID NO: 6719 - protein, 506 aa, synthetic construct
MRHVITYLRYSSATQGAEGADSTRRQNELFKQWLRKNSDAQVVASFNDEGLSGYKGKHLSGQFGDMLSRIESGEFPEGTLLLVEAIDRIGRLEHLETEALMNRIIAHGIEIHTLQDGLIYTRDALSDDLGISIIQRVKSYLAHQESKQKSFRVSEKWKQRAKLALAGEQRLTKMVPGWIDPETFKLNEHAETVRLIFKLLLDGESLHNIARHLQANNISSFSRRKDANGFSVHSVRTILRSETTRGTLPASQRNDRPAIPNYYEAAIDASTFNKAQEILDKNRKGRTPASDNPLTINIFKGLFRCQCGASVHPTGTKNKYAGVYRCNNNPDGRCDVPPLKRKPFDKWMIDNFLGMIDVGNDGEAEVKIASLQHEVEIVTARIKKATALLLEMDDIDELKIQIKELNQKRTELQTTIDNMRRKASLTDKELPQLKDIDLTTKAGRVECQLILSKHLKGLTLGKDSVTVTLQNDTEITIPTNPLPLNDGSPIFEIADKELLDIDAYQL

SEQ ID NO: 6720 - protein, 519 aa, synthetic construct
MKAAIYARYSSDKQSETSLDDQISVCQSRALREGWQVLATHSDTAVSGSTKVAARPGGKALLADMMAGRFDVLLLESLDRLSRDQVEQESIVRRLEHRNIRIICVADGYDSQHQGRKVMRGVRGLINELYLDDLRHKTQRGLHGQVDRGYIAGGKSYGYDIERDDQGSKFVINELQAHWVHWIFEQVAKGRAYRHIVYDLNDKGVPSPRGSSWAVSAIYGSPVKGSGIINNPLYVGRYVWNRSQWIKDPDTGKRQRIERPRHEWREADLPELRIIDDVLWQRVRSRIDFGRNAAGRKAEQRPISALLSGVLRCPHCAGPLTSFGSTRYGCSRSHDRGKTVCPGFAIGRIRTEKRMLAAVREELLSDDAAAAFEILVSERLKSVRAAGQAQALKARHVEIQEEIGRLVEAIARMGMSAPIEQRIRQSERELATISAEIARAEAADAPMMDVRKTFKALLMDLGTALQSSPMEARAAVGEILGTVNIELKGREVWAQIATGPALQIAVGANGCNDGCGGRI

SEQ ID NO: 6721 - protein, 492 aa, synthetic construct
MTVVSSGEILRAALYLRVSTARQAAQDVSIPDQHRQGEAWCATHGYELVETFVDAGVSATSDRRPEFQRLIEAASKRPAPFDIILVHSFSRFSRDHFELEFHIRKLARNGVKLISITQEVGDDPMQVMMRRVMTLFDEYQSRENGKHTLRAMKENARQGFWNGSLPPIGYRIVEAERRSAKVKKALAIDPMHADTVRLIYRLALSGDGTTGPMGVKAIVEYLNYRRICTRDGGRWGIGQTHKILTRTTYVGRHQFNMHGKGKTRKSDDEVITVAVPPLINQATFDAVQAHLRARNPKTLAPRLVNSPNMLTGLLHCAQCGGPMVMRTGKAGRYRYYVCQKKAGTDTARCSGIAIPMDALDALGAKHLTARLLDQNRLKIVLTQILERRRERIVRDGEDRLDELTRRGEEVRLRLKRLLRAIGMGALSLDEPALQERLAYLQALQTRTAEEIRSLHVELNHAGILTISPSLVRRIIKAAEQRLLERGHGFRRG

SEQ ID NO: 6722 - protein, 614 aa, synthetic construct
MKIKDKRFKITALYERLSKDDEVQGESNSIVNQKRMLTQYAEQHGYENIEHYTDDGWTGTNFDRPDWKRMLADIEAGKVGTVIVKDMSRIGRDYLQVGFYTEVMFREKGVHFIAISNGVDSERRESAEFAPFLNIMNEWYVRDTSRKITAVLKTRGMSGKAHTNNRCCYGYKKSADNPDKWEIDEEAAEVVRRIFNMCLNGKGPYQIARELAEDKVERPEYYLGMRGRGANVKSFDMEHPYAWRGGTVKTILTRMEYIGCTVNFRTKKESYKDKRPTKVDSSEWVIFENTQEPIIDKHTWETVQKLLDTPRRIGVFEESNPLTGKVFCADCGAKMYNHRHSKGVWKKNYFKAGEMVYHAPEDRYSCSNNALGKQMYEKVCSSHSISTKALKTLVLETIKRTCDYAVENEAEFREKVCSISEEQQGELSVRLEKRLAKKQKRVSEINRLIRKLYEDNISGKLNDKRFNAMLSDYELELEALEADIDRDNAELEGMSAKKTDVDVFMELVKKHTTFEELTPAILNEFVDKIMVYKAVGSGANRTQDVDIYLNYIGRFVVPEVVVELTEEEKLAEAKRQEKLEKKRASNRKYMARKREEARKAWAEIEAEKAKAVGQ

SEQ ID NO: 6723 - protein, 586 aa, synthetic construct
MSDVQVIKANKSENRFRGRKVEILRVAAYCRVSTDSEDQLNSYKSQVMYYTDLIKKKHDWSLVDIYADEAITGTQVTKREDFQRMINDCMNGDIDMVITKSISRFARNTLDTLKYVRMLKEKGIAVFFEDENINTLTMDGELLLVVLSSVAQQEVENISSNVKKGLKMKMKRGELVGFQGCLGYDYHKETKSISVNEKEAEIVRYIFNRYIEGAGCTVIANELENLGYKTKYGSSRWVQSTVIGIIKNEKYKGDLLLGKTFTVDPISKRRLENFGEEDKFYIQNHHEPIISEEVFEEAQKILAKRNVNRGVHQEGQKRNKFSRKYAFSCMIKCGFCGGTLTRRNWHSSSAYTKTIWQCVTATKQGKKYCPHCKGIPEEVIEKAFVKSYQLLCSDQHQVVEEFLQKVEGVLNEDTSLKRLPKIEKGMNDLRKRKEKLLDLRLDTTIDRDIYESKNQELSEQLKKLQEEQEQLLELSKNRESTKTRLREFRKNLSSGEILENFDRVVFESVVEKIIIGGYNEEGVEEPLKITFVYKTGIHSNFNGKDFKPKRRNAAALHSDIELCSYASDEATELCSYSSPDTCGNCS

SEQ ID NO: 6724 - protein, 588 aa, synthetic construct
MKKDVKVIKGDTTLKRTASGCVERSIKRVAAYCRVSTDTEDQINSYNSQVEHYTEFIQKNKEWTLAGIYADEAITGTQVDRRIDFQRLINDCMNGDIDMIITKSISRFARNTLDTLKYVRKLKEFNVAVFFEEENINTLTMDGELLLTILSSVAQQEVENISANVKKGLRMKMERGEMVGFQGCLGYDYNPETKSISVNEKEAEIVRYIFRRYIEGVGGMVISRELEEQGYLSPRGNKRWTETTVLGIIKNEKYKGDLMMGKTYTVDPISKRRLDNFGEQDKFYIESHHEPIISKEDFEKAQGIRLRRSKNRNTVANNGGKREKYSRKYAFSSMLECGFCGHNLSRRNWHSSSEYTKVIWQCVNATKNGKKYCPHSKGIEEAAIEKAFMESYRQVCHNNVEITNEFLKTVEEELKDNSLAKDLKKISNQLDKIIKKEKDLVELRLNESISMDIYQDKYNEIAISKEKLLAEKRTLEVTLTDEKALKKRLEGFKKLLESNKYLEEFDRAVFESIVDKIIIGGTNDEGEIDPAMITIIYKTGKKDSQDGRLFKSRRKNAKEVNEETGGKLYPQSSDEVNNLYSYPIDNTL

SEQ ID NO: 6725 - protein, 540 aa, synthetic construct
MKQPYNTTIYNTALYMRLSRDDELQGESGSIQTQRMMLRQYAAEHGLNVIDEYIDDGWSGTNFDRPDFQRMIDDIEDGKINCVVTKDLSRLGRNYILTGQYTEIYFPSKGVRYIAVNDNVDTINGENELAPFLNILNEMHARQTSKKVKAAMRTRFANGAHYGAYAPLGYVKDPDKKGHLLIDPETRWIIEKIFDLAVHGRGAASITRILVEEKVPTPGWLNFQRYGTFANIYAGAPEEKAYAWTIAQVKSILKEETYIGHSVHNKQTNISFKNKKKVRKPKEEWYRVENTHEAIISEDVFRQVQEQICNRRRRQKNGTTQIFSGLVKCADCGWSLAYGMNSQNKNPYAHYHCSKYGQGLHQCSMHYIRYDVLYAYVLSRLQYWSVLAQQDGDKLLKRLLNASDKERNTARKRQTAELKKAEKRKAEVDTLFAKMYEDWSAGRITEYNFNMLSEKYQGEQRELDAKIERLHEAMEVAAQTAVDAEKWIGLMKQYVNPTELTAELLNTLIEKILVHEAVKSEDGSREQEVEIFYRFIGKIE

SEQ ID NO: 6726 - protein, 558 aa, synthetic construct
MKKEKIKVYTYKRVSTAMQIDGYSLDAQRARMKAYADFNDYEIVGEYEDAGKSGKSIEGRLQFRQMMEDVKSGKDNISYVLVFKLSRFGRNAADVLSTLQVMQDFGVNLICVEDGIDSSKDAGKLMISVLSAVAEIERENIRVQTMEGRIQKAREGKWNGGFAPYGYQLVNGKLEINEEEAVAVRTIYDQYVNTDIGSNGISKYLENHGIRKIQRQNGKNPLFDAHLVRLILKNPVYCGKIAYGRRKTEKVHGTRNEYHLVEQDNFLLVDGLHEAIIPEDVWNAAQVKLVAQAKKYEHVNKGKNERTHLLSGIVKCPICDAGMYGNKSIKHKKDGTKYKDFFYYGCKHRSMQRGHKCDYKKQIREELLDDAVAEVIVKLVSNPNFATMMQEKINMKVDTTAIDQEIENYEKQLRQDYSIKSKLMEEIDNLDPDDRHYIRRKADLDDRLYRMYDKIEELESQLIDARAKKTSIEAEKITGDNIYKVLICFDKLYFAMNDVERRQLIEALIAEIQIYEERKPNGQWLKSIRFKLPIIENDLRIGLDNSEHVETVAKIIKQ

SEQ ID NO: 6727 - protein, 537 aa, synthetic construct
MKQQIYNTALYLRLSRDDELQGESSSITTQRSMLRLYAKEHHLNVIDEYIDDGWSGTNFERPSFQRMIEDIEAGKINCVVTKDLSRLGRNYIMTGQYTELYFPSHNVRYIAIDDGVDSEKGESEIAPFKNIINEWVARDTSRKVKSAFKTKFAEGAHYGAYAPLGYKKHPDIKGKLLVDDETKWIVEKIFSLAYQGYGSAKITKVLREEKVPTASWLNFTRYGTFAHIFEGKPESKRYEWTIAHVKAILKSEVYIGNSVHNMQSTVSFKSKKKVRKPESEWFRVENTHEPIIDKEVFYRVQEQIKSRRRQTKEKATPIFAGLVKCADCGWSMRFATNTANKTPYSYYACSYYGQFGKGTCSMHYIRYDVLYQAVLKRLQYWAKAVQQDEEKVLNKIQKAGNAERIREKKKKASAFKKAENRQNEIDRLFAKMYEDRACEKITERNFVMLSSKYQKEQIELEQQITNLREELSKMEQDMIGAEKWIELIKEYSVPKELTAPLLNAMIEKILIHEAITNEDNERIQEIEVYYRFIGKVD

SEQ ID NO: 6728 - protein, 558 aa, synthetic construct
MKKEKIKVYTYKRVSTAMQIDGYSLDAQRARMKAYADFNDYEIVGEYEDAGKSGKSIEGRLQFRQMMEDVKSGKDNISYVLVFKLSRFGRNAADVLSTLQVMQDFGVNLICVEDGIDSSKDAGKLMISVLSAVAEIERENIRVQTMEGRIQKAREGKWNGGFAPYGYQLVNGKLEINEEEAVAVRTIYDQYVNTDIGSNGISKYLENHGIRKIQRQNGKNPLFDAHLVRLILKNPVYCGKIAYGRRKTEKVHGTRNEYHLVEQDNFLLVDGLHEAIIPEDVWNAAQVKLVAQAKKYEHVNKGKNERIHLLSGIVKCPICGAGMYGNKSIKHKKDGTKYKDFFYYGCKHRSMQRGHKCDYKKQIREELLDDAVAEVIVKLVSNPNFATMMQEKINMKVDTTAIDQEIENYEKQLRQDYSIKSKLMEEIDNLDPDDRHYIRRKADLDDRLYRMYDKIEELESQLIDARAKKTSIEAEKITGDNIYKVLICFDKLYFAMNDVERRQLIEALIAEIQIYEERKPNGQWLKSIRFKLPIIENDLRIGLDNSEHVETVAKIIKQ

SEQ ID NO: 6729 - protein, 584 aa, synthetic construct
MKEVEIIKKNDNLENRRRGKYIDRKRVAAYCRVSTDSEDQLNSYKSQVSYYTDLINNNIEWCMVDIYADEAITGTQVNKREDFQRMINDCMNNEIDMIITKSISRFARNTLDTLKYVRMLKEKNIAVYFEDEKINTLTMDGELLLVVLSSVAQQEVENISANVKKGLKMKMRRGELVGFQGCLGYDYHKEDKTLTINEKEAEIVRYIFNRYIEGAGGSIIGQELENLGYKTKYGSTTWSNSTVLGIIKNEKYIGDVLLGKTFTVDPISKRRLDNLGEEEKYYVKNNHEPIISREIFDKAHEILNRRSKNRGKYEAGVTKREKYSRKYAFSCMMECGFCGGTLTRRNWHSGSEYSKVIWQCVVATKKGKKYCPESKGIPERVIENAFVESYRLLCDEKKSVLEELLNRINDIVGSSEVNNKIKKIEKELSVIEKKINNLVDMRLDDIIEKETYEIKYQELIDNQEKLLNERNKLNVVAKNENSMKQRLKEFKKTLEENEVLDKFDRGVFESVVEKVIIGGKNKDGENDPTKITFIYKTGFKNTLSSDEFKIPRKNARGRHKRKELCLHGNNEVENLCSYSSSNTL

SEQ ID NO: 6730 - protein, 532 aa, synthetic construct
MKAAIYSRKSRFTGKGDSIENQIQLCIDYAKSIGVKDFLIYEDEGFSGSNIDRPQFKKMMQDAKDKKFSYLVCYRLDRISRNVSDFSTLIEKLNELNISFISIKEQFDTSTPMGRAMMFISSVFAQLERETIAERIKDNMYELARSGRWLGGNTPHGFNSEKITFLDENLKERSMYKLQVNDEQMEIVKLIYNKYLELRSLSKLYKYVYNNGIRGPRGGKFDPSSLSRILRNPAYVKANDEILDYLKNSGMDVVGTPDRKCGILTYAKNTSNSIAAIAKHHGVIEPEIWLEVQNQLDKNRDKTPRISTGKTALLSGLIKCGKCGSNMRITYKGKKTDKDLKYYYICGTKKTLGSDSCNCKNLNGPLVESLVIDKIKNCKEESIISAFNSNNIKTDNVFNIFKSETNLLKNQILDKEKLIKNLVIELAKNTGSTASDYIVSQIESLNNEISILKDKINTLESSNINISSDSINIDIIVSNLKRFNDEVDNASLDDKRLLLSTIINSIVWDSSLGNLNIVYMGAEVDNSVSLSN

SEQ ID NO: 6731 - protein, 519 aa, synthetic construct
MKKVTKIENNHPSKAVKKKIRVAAYCRVSTASDAQLESLETQKSHYESYIQSREDWEFAGLYFDEGITGTKADKRPMLMQMIADCKAKKIDFVITKSISRFSRNTTDCLELVRTLLNLNIPIFFEKENINTGSMESELFLSILSSMAEGESTSISENNKWSIKKRFENGTYKLGYVPYGYSWEDGKIKVNPEQAEIVKKIFAELLSGKGMDAIARALNDELVPTKKGGRWNSNSIRGILANEKYTGDCIFQKTYTDSNYNRHKNDGVLDKYFVPEHHEAIISHEDFEAAAGLIKQRAVEKGIQRGSAKYQQRYAFSGKIICGECGDTLRRRIHKSTYASYVAWVCNTHLADTSKCSMLYLRDDDLKLSFATMLNKLIYCYKLVLKPYLEALQTNTSDEALLRIQHLETLLEQNAEQRETLHKLMAQGYIDQILFTQENNALLSQANDFRSDIEALNRSQTLDTTKVYETERLIHFCERGEMLQEYRENLFELFVDHIHVYSRQEVGFVLRCGLTFKERI

SEQ ID NO: 6732 - protein, 520 aa, synthetic construct
MGNVMVIPARRQVGNTARQQEDKPKLRVAAYCRVSTDSDEQATSYEAQVEHYTEYIQKNPEWEFAGIYADDGISGTNTKNREEFNRMIEECEAGNIDMIITKSISRFARNTLDCLKYIRQLKEKNIPVFFEKEAINTMDSKGEVLLTIMASLAQQESQSLSQNVKLGLQFRYQNGQVQVNHNHFLGYTKDEEGNLVIDPEQAEVVKRIYREYLEGYSMDKIAKGLEEDGILTGAGKTKWWTSTINKILRNEKYIGDALLQKTYTTDFLNKTRVKNNGIVPQYYVEGNHEAIIPKDIFLRVQEELVRRRVVKTSANGKKRSYSCKHCFAQIVICGECGEMFRRIHWNNRGCKSIVWRCISRLEPGLECHARTVNETILEDVVVQAINKLLGDKSTYQAQLQQNIAKVIREAQQTTADGIDERLQELQKELLKKANNKEAYDEIADEIFKLREQRQQNTVDTAARDAQIGRINELQDYIKDQDATLTEFDEALVKRWLKQITVFEDHFTVELKSGLTIDIEG

SEQ ID NO: 6733 - protein, 648 aa, synthetic construct
MNREGKKCVLYPRVSTEMQVDGYSLEGQKNSLKRFADREEMEIVGVYEDAGKSGKSIEGRPAFKKMLSDIKNGLEIDYILVYKLSRFGRNAADILNSLEFVQSYGINLICIEEGIDSSQTSGKLLISVLSAVAEIERENIIEQTMNGRREKARQGGWNGGFAPYGYYLENNQLLIEETEAKAIRIIFEKFGNSDIGLGGVAKYLNLQGIKKIPRQNGKLETWSSHFIRQILDNPVYCGKIAYGRRTREKVKGTKNEYKQVHTDDYILEDGQHEGIVSAELWEKVRAKRIATGIKQPSKVGKDRSHLLTGVLKCPMCGSSMYTNKHAWTNKDGTYKEVYYYICGRNKQERGHHCDYKASLRKTDIEPLVIEAVKELVSDKYFAREIKSRIGIQTDTGNVDKEIANYESKLKEVDLNKARLEREIDNLPADARYRERKIHDMTLRLDGLYDTIVELEERIEDAKLRRSSIEMEAITLENVYKIMKNFGKLYAIMSDEEKKSVISYLIKEIQIYPNGESEMPLKSIEFNFPIYRDGKEVRKVLWERGNTVETVALLSKLDVDKHIDVEIKLDELDLTSAESKATYAQIKEYVLEKFGLKVSTLYIAQIKKKCGIEMREHYNKSKKDNQAIPQCTPEKEEAIMDALRHFKMI

SEQ ID NO: 6734 - protein, 502 aa, synthetic construct
MEFIREDCIYARQSVDRKDSISIESQIDFCKYELKGGSCRVFKDKGYSGKNTDRPEFQKLLGEIRKGKVRRVIVYKLDRISRSILDFATMMELFQEYDVEFVSSTEKFDTSTPMGRAMLNICIVFAQLERETIQKRVTDAYYSRCLKGFHMSGQAPYGYQLEPTVVEGIRTKKMVADPIAADHVRLMFEMYAEPETSFGDITRYFEEHDIKIYGKSMFRTFLSQLLRNPVYAQADLELYEFFKSQGAAIVNDASDFAGTNGCYLYQGRDVKEDKDRCLKDQILVIAPHEALISSDTWLKCRKKLMANTTFQQGRKPKNTWMAGKIKCGHCGYALKATHVPNSTGYFRCTKRTENKGCPGCGKIRKEEFEQFIFSAMQEKFKDFQILHGREEKVNPKLTAYQVELAQVEAEIEKLLDTLTGANATLLAYANKKIEELDTRRQTISKAIAELSVETISPQQIKKLSYYLDNWDSIDFDDKRKAADGLISTIKATSDRVQIEWKI

SEQ ID NO: 6735 - protein, 521 aa, synthetic construct
MVTAKAVVYARFSSDNQRDESIDAQLRAIEEYTDKNNIQIVKVFVDRAKSATSANRPEFQNMIKYCEADNTGISMVIVHKLDRFSRDKYDSAMYKQKLKLKGIRVVSVLENLDNSPESLILESVIEGMAQYYSANLAREVAKGQKENALKSLHNGGDAPLGYDVAFDKTYLINEEEAQVVKIIFDMYVNGYSYSNIIDKLNGLGYKTKRGNKFGKNSLYSILSNEKYTGVYVFNKTQRKGVNGKRNGHKQKSEDEIIKVEGGMPQIIDKEVFRQAQEMMQKRKKTPGSHKATTLYLLTGIIRCGECGHAMQGNKRKDKYGNDYISYRCGCRKQKRDCKNKEIKRDYLEEFVLTELEKHVLNDEAIPALSKELNERIKTKSNDNQEMLNNLKSKLEKVNKEIENILNAIMSGIVNNMIKDKLDELEQVKVNLEVKINELSIESNGSEAINIMEDQIRSMFGKFKEFVLTRNLPECKKFISDYVKEVIVYKDHIEVIFNVVFSFVDNEITYDLHITTSREKIK

SEQ ID NO: 6736 - protein, 558 aa, synthetic construct
MKKEKIKVYTYKRVSTAMQIDGYSLDAQRARMKAYADFNDYEIVGEYEDAGKSGKSIEGRLQFRQMMEDVKSGKDNISYVLVFKLSRFGRNAADVLSTFQVMQDFGVNLICVEDGIDSSKDAGKLMISVLSAVAEIERENIRVQTMEGRIQKAREGKWNGGFAPYGYQLVNGKLEINEEEAVAVRTIYDQYVNTDIGSNGISKYLENHGIRKIQRQNGKNPLFDAHLVRLILKNPVYCGKIAYGRRKTEKVHGTRNEYHLVEQDNFLLVDGLHEAIIPEDVWNAAQVKLVAQAKKYEHVNKGKNERTHLLSGIVKCPICGAGMYGNKSIKHKKDGTKYKDFFYYGCKHRSMQRGHKCDYKKQIREELLDDAVAEVIVKLVSNPNFATMMQEKINMKVDTTAIDQEIENYEKQLRQDYSIKSKLMEEIDNLDPDDRHYIRRKADLDDRLYRMYDKIEELESQLIDARAKKTSIEAEKITGDNIYKVLICFDKLYFAMNDVERRQLIEALIAEIQIYEERKPNGQWLKSIRFKLPIIENDLRIGLDNSEHVETVALLRRK

SEQ ID NO: 6737 - protein, 584 aa, synthetic construct
MKEVEIIKKNDNLENRRRGKYIDCKRVAAYCRVSTDSEDQLNSYKSQVSYYTDLINNNIEWCMVDIYADEAITGTQVNKREDFQRMINDCMNNEIDMIITKSISRFARNTLDTLKYVCMLKEKNIAVYFEDEKINTLTMDGELLLVVLSSVAQQEVENISANVKKGLKMKMRRGELVGFQGCLGYDYHKEDKTLTINEKEAEIVRYIFNRYIEGAGCSIIGQELENLGYKTKYGSTIWSNSTVLGIIKNEKYIGDVLLGKTFTVDPISKRRLDNLGEEEKYYVKNNHEPIISREIFDKAHEILNRRGKNRGKYEEGVTKREKYSRKYAFSCMMECGFCGGTLTRRNWHSGSEYSKIIWQCVVATKKGKKYCPESKGIPERVIENVFVESYRLLCDEKKSVLEELLNRINDIVGSSEVNNKIKKIEKELSVIEKKINNLVDMRLDDIIEKETYEIKYQELIDNQEKLLNERNKLNVIAKNENSMKQRLKEFKKTLEENEVLDKFDRGVFESVVEKVIIGEKNKDGENDPTKITFIYKTGLKNTLSSDEFKIPRKNARGRHKRKELCLHGNNEVENLCSHSSSNTL

SEQ ID NO: 6738 - protein, 616 aa, synthetic construct
MTDYSKITALYSRLSVGDEDRDGGESNSIQNQKIFLENYAKGQHLTNIRHYIDDDESGRFFDRSAYSRMMDDVENGKIGVCIMKDLTRWGRDYLQVGNAMEIFRRNNVRFIAVNNGIDSEKPDTLEFAPFINIMSEWYAKDISKKVKTGIKTKGMSGKPIVTEAPYGYVKDPDNKDFWIIDEEAAEVVRLIFRLFIGGKNRNQIAVYLTQEQIPSPTFYMKDRGRGTCKNKTLNEDNRCKWNKVTLTNILTRQEYCGDVVNFKTTKHFRDKHNHYVDRSQWHITENVHEPIISRSDFETVQRILENAPVRRPNGDGEIHPLSGLLFCKDCGAKMHIRIDYRNGGKRHIAFCSEYHKGKAKNPKCHSPHIMDADLLMQTIAEVLKKIEDYSISNRAEFEALVKKNLAMQQTDQTKKQQKRIPQITTRLEQIDKVLNKLYEDNALGTIPQDRYEQMSQKYSEEYYALKAELATLQEQLSAYENAGGRAQKFLKLTERHAAFTELTPAILNEFISRIEVHERDQKRARYAIQHISIYFNYIGKFENEVTQLAEPTEQEIRQMREKIEEAKKEKSRAYHRQYSREYRARNLEKQREYDRMKAREYRARRKAQAAAAQPTQ

SEQ ID NO: 6739 - protein, 532 aa, synthetic construct
MKAAIYSRKSRFTGKGDSIENQIQLCIDYAKSIGVKDFLIYEDEGFSGSNIDRPQFKKMMQDAKDKKFSYLVCYRLDRISRNVSDFSTLIEKLNELNISFISIKEQFDTSTPMGRAMMFISSVFAQLERETIAERIKDNMYELARSGRWLGGNTPHGFNSEKITFLDENLKERSMYKLQVNDEQMEIVKLIYNKYLELRSLSKLYKYVYNNGIRGPRGGKFDPSSLSRILRNPAYVKANDEILDYLKNSGMDVVGTPDRKCGILTYAKNTSNSIAAIAKHHGVIEPEIWLEVQNQLDKNRDKTPRISTGKTALLSGLIKCGKCGSNMRITYKGKKTDKDLKYYYICGTKKTLGSDSCNCKNLNGPLVESLVIDKIKNCKEESIINAFNSNNIKTDNVFNIFKSETNLLKNQILDKERLIKNLVIELAKNTGSTASDYIVSQIESLNNEISILKDKINTLESSNINISSDSINIDIIVSNLKRFNDEVDNASLDDKRLLLSTIINSIVWDSSLGNLNIVYMGVEVDNSVSLSN

SEQ ID NO: 6740 - protein, 540 aa, synthetic construct
MKQPYNTTIYNTALYMRLSRDDELQGESGSIQTQRMMLRQYAAEHGLNVIDEYIDDGWSGTNFDRPDFQRMIDDIEDGKINCVVTKDLSRLGRNYILTGQYTEIYFPSKGVRYIAVNDNVDTINGENELAPFLNILNEMHARQTSKKVKAAMRTRFANGAHYGAYAPLGYVKDPDKKGHLLIDPETRWIIEKIFDLAVHGRGAASITRILVEEKVPTPGWLNFQRYGTFANIYAGAPEEKAYAWTIAQVKSILKEETYIGHSVHNKQTNISFKNKKKVRKPKEEWYRVENTHEAIISEDVFRQVQEQICNRRRRQKNGTTQIFSGLVKCADCGWSLAYGENRQNSKPYGHYHCSKYGQGLHQCSMHYIRYDVLYAYVLSRLQYWSVLAQQDGDKLLKRLLNASDKERNTARKRQTAELKKAEKRKAEVDTLFAKMYEDWSAGRITEYNFNMLSEKYQGEQRELDAKIERLHEALEAAAQTAVDAEKWIGLMKQYVNPTELTAELLNTLIEKILVHEAVKSEDGSREQEVEIFYRFIGKIE

SEQ ID NO: 6741 - protein, 481 aa, synthetic construct
MNEINKVALYVRVSTTSQMEEGYSIEEQKAKLESYCDIKDWHIYKVYTDGGFSGSTTERPALEQLIKDARSKLFDTVLVYKLDRLSRSQKDTLYLIEDIFLKNNIEFVSLLENFDTSTPFGRAVIGLLSVFAQLEREQIKERMQLGKLGRAKAGKSMMWAKTSYGYNYDKETGSMTINEYEALAVKEIFTSYLAGMSITKLRDKINEEYPKQPAWSYRTIRGILANPVYCGLNQYKGQTFQGTHKPIISLVDFEQTQRELAKRQQTAKELSNPRPFQAKYMLSGLAQCGYCHAPLKVILGAVRKDGSRFKRYECYQRHPRTTKGVTVYNNNKKCDSGYYDMELLEHYVLTRISQLQNDPDKIQELFSDDTSPAIDKQGIQKQIDSLTLKLSKLNDLYLDDRITLDELRTKSADFIKQRNALEDEIKKASNDKQAGQREKIEKLLDASSVLDMSYDNQKVIVRELIDKVQVTSDKVVIRWKI

SEQ ID NO: 6742 - protein, 480 aa, synthetic construct
MIATNKVAIYIRVSTTNQAEEGYSIEEQQEKLKAYCAIKDWSIYDVYIDGGFTGSNTDRPELKRLVKEAKNKKFDTVLVYKLDRLSRSQKDTLYLIEEVFTKNNIAFLSLLENFDTSSAFGKAMIGILSVFAQLEREQIKERMQLGKVGRAKSGKSMMWAKPSYGYIYHKETGKMTVDEYESIAIKFIFSSYLAGRSITKLRDDLNKKYPKEIAWNYKMVRHILDNPVYCGDIRFKDEIYSGNHEAIISKEDFEKVQEELAIRQRTAAENSNPRPFQAKYMLSGIAQCGYCKAPLKIIMGAIRKDGTRFIRYECYQRHPRKIKGVTVYNDNKKCNSGYYDKKELEQYVLKEVSKLQEDKEYLESLFNVPDKSIERDKIQGQVNILENKISRLNDLYIDDRISLDELKIKSDNFLKMKAILETELKNDPATKQQKKKENMEKILKTKDILSMNYEQQKAVIRALITKVQVTAERIIIKWKI

SEQ ID NO: 6743 - protein, 563 aa, synthetic construct
MTQRISIYARYSSDLQSDASIEDQIRLCSEKAASEGWEVINCYTDAGISGASLMRSGIQALLAAAMKGEFDILLAEALDRLSRDQEDIAGIYKRMEFAGVKIITLSEGEISSLHIGLKGTMNAMFLKDLADKTRRGLRGKVENGKSGGGLAYGYKVVKQFNASGDAIKGDREIDEAQADIVRRIFHEYAYENTSPKAIAAGLNEDGIACPSGKAWGQSTINGNRRRGTGILNNHLYIGELVWNRQRFIKDPSTGRRVPRLNPENQWIRQSVPELRIISESLWNAAKARQKELDKRSGHLGTRKRPQYLLSGLLVCGACGGGFSKINSERYGCSAARNKGDSVCENRKTIKRSELESTVLNALQSHLMRDDLVQVFCEEYTRHMNSLRAAQNSSLARYKAEATKLARERENIIQAIKDGVPADMIKDELERVTSRQSELTELMKDQSTEPQPFLHPAMAHRYQEEVAALRKALTEQQAGEAREHVRALIEKIVLTPRADRDDLSIDLYGDLAGILKISMRNKPMKFKGNKEKRLEPMTANDNHNFEPSVQLVAGAGFEPTTFGL

SEQ ID NO: 6744 - protein, 574 aa, synthetic construct
MKVAIYARKSTDDDRNEDNKSVKRQVRSAKAYAKKMQWTVDDDHIYIDDGISGAEYQNRPGFTRLLTNLKEFDILLMSESSRLGRDMLRNAYHVGEIIDKGVRIFYYLTGEEEKADTPEQKIMITLKSYASEVEREKASQRSRDALERKAMKGYNTGGVVYGYDNHQVMVTNAQGEEVKSHTEFRINDDQADVIRSIYRMYADGHGHTTIARTLNGDPRYKHKSEKYFKGQTPPSPRKGTGSWAPSSIRAILYNIRYTGVIPFGKHKKAYRNGTKKRIKQESYHQIEVPELRIVSEKLWSEVQKRLESVKKTYIRDTNGNLWGRPGMGRESKYLLTGLGRCACCGSNITLIGGKSGSPGKRKSVYYYGCSYHKNRGQTVCANDHKEQMDVLDNAVLDAIEQQILTPEAVAYTVEKALEIVEQQLKTDPDQMPRLEAERTKLRGELDRFMNLIASGKAPEAVLEQITQREERIKALEMELGQLGTAETASELDLKRLRKALEERMGRFKDLVYSDVPLARQALRKLLVEPIEFRPVVRNGRKTYSFEGKTRIGDLLDPGYIAMASPRGVEPLLPA

SEQ ID NO: 6745 - protein, 541 aa, synthetic construct
MPKAISYIRFSSRIQASGDSTKRQNKYINEWLKNNPDYQLDESLRFQDLGISGYSGANAKSGAFGEFLAAVESGVIEAGSVLLVESLDRVSRQDIDTARERLRKILLAGVDVVTLADNSWYKKESLNDPLSLIKAVLIMQRANEESATKSKRLRSAWDAKREEAAKGKIMSRRCVAWLRVSDDMSHFELIPDNVKAVQRVFQLRLEGLPFVRIARQMNEEGFYTLNQRNPVKGAWSHTTVKALLDNRSVIGFKVPSNCTVTKGVKEIPNYYPAVISEEHFYAVQQLKQGAGRRPSSEKPLLTNLFKGVMRCAECGFVTIVNCATEKWHGVYRCSMRYEGRCHAKSINRRLADKALVQGLLYNTNRLSLNRDNGSAIGSLQSELEHLQKQRERLIKLAMLADDTESMAKDLKALNSQIKDAEKAVSEVHQREQSSQLETISHLDLTVKKDRIEAQIIIKRIVKEIRLNTAGKKCDVFLHNGLKLLNFPLDRVVDGAQWLEVLPLIDGDEFDFAEFTTKPRHIALEEAPEWVKEMEEQPNQSL

SEQ ID NO: 6746 - protein, 506 aa, synthetic construct
MRTVITYLRFSSATQGAEGADSTRRQNELFKQWLRKNSDAQVVASFNDEGLSGYKGKHLSGQFGDMLSRIESGEFPEGTILLVEAIDRIGRLEHLETEALMNRIIAHGIEIHTLQDGLIYTRDALSDDLGISIIQRVKSYLAHQESKQKSFRVSEKWKQRAKLALAGKQRLTKMVPGWIDHDTFKINEHAETVRLIFKLLLSGESLHNIARHLQSNGIKSFSRRKDANGFSVHSVRTILRSETTIGTLPASQRNDRPAIPNYYEAAIDAATFNKAQEILDKNRKGRTPASDNPLTINIFKGLFRCQCGASVHPTGTKNKYAGVYRCNNHLDGRCDVPPLKRKPFDKWMIDNFLGMIDVGNDGESERKIAALQHEVEIVTSRIKKATALLLEMDDIDELKIQLKELNQKRTELQTTIDNMRRKASLTDKELPQLKDIDLTTKAGRVECQLILSKHLKGLTLGKDSVTVTLQNDTEIIVPTDPLPLNDGTSIFEIAEKELLEIDAYQL

SEQ ID NO: 6747 - protein, 514 aa, synthetic construct
MKKVYSYIRFSSTKQAFGDSHRRQSKAIQDWLANHPDHILDESLSFEDLGRSAFHGDHLKEGGALRAFLEAVKQGLIPSDSVLLVESLDRVSCQSISHAQETIRGILEQGITVVTLSDGETYNRQSLDDSLALIRMIILQERSHNESVIKSDRIKKAWSHKRQQFEQDGTKITGNCPGWLKLNSDKKSFSLIPHHIETIHRIFDEKLSGKSLHAIARDLNLENIPTITNKRVDTGWTPTRVRDLLLKESLIGVAYGVSDYFPPAISKEKFHAVQMIRGQGKGKKPTSRQPSSIDILKGICKCAECGSTLRQRNTKKTPEGRYPRGYLECRNRQLRRCNSKAFNRSLIEDILIQKVFPTLQYLSLKSNGDNISVTTLKADITSLEKGINNLISLAEKGLGDLDTLAQRITNNRVELESKKKDLRQAEAILSLRSDNDIQDSDRKTVEGRIKLQLAIKSFVKEIIFDYDKQEITIRLLNGKSFSGISVAREDKDFDHSSMFEVLQKSLLDVDGVCL

SEQ ID NO: 6748 - protein, 503 aa, synthetic construct
MNNRIDAIYARQSVDKKDSISIESQIEFCKYELKGGNCKEYTDKGYSGKNTDRPKFQELVRDIKRGLIAKVVVYKLDRISRSILDFANMMELFQQYNVEFVSSTEKFDTSTPMGRAMLNICIVFAQLERETIQKRVTDAYYSRSQRGFKMGGKAPYGFHTEPIKMDGINTKKLVVNPDEAANIRLMFEMYAQPTTSYGDITRYFAEQGILFNGKELIRPTLAQMLRNPVYVQANLDVYEFFKSQGTIIVNDAADFTGMNGCYLYQGRDVKPSKKNDLKDQMLVLAPHEGIVPSDIWLTCRKKLMNNMKIQSARKATHTWLAGKIKCGNCGYALMSIFNPSGKQYLRCTKRLDNKSCPGCGKIITSELETVVYQQMIKKLASYKTLTGRKKAAKANPKIAALQVELAHVDGEIEKLVDSLTGANNVLLSYVNVKIAELDGRKQELLARIAELTVEAISPEQVSQISGYLDTWEDVSFDDKRRVVDLMITTIAATSDSLNITWKI

SEQ ID NO: 6749 - protein, 452 aa, synthetic construct
MLRVALYIRVSTEEQVLNGDSIRTQIEALEQYSKENDFNIVGKYIDEGCSATNLKRPNLQRLLRDVEKDKVDLVLMTKIDRLSRGVKNYYKIMETFEKHKCDWKTILENYDSSTAAGRLHINIMLSVAENEAAQTSERIKFVFQDKLRRKEVISGTIPIGYKIENKHLVIDKEKKYIVKAIFDEYEKSGSVRTLIETINNLHGELYSYNKIKNILRNELYIGIYNKRGFYVEDYCEPIISKKQFKQIQRILEKNKKTTPNKNIHYHIFSRLLKCKECGYTLKGNSSNVREKIYLSYRCSTFYLNKNCIHNVTHNEKHIENYLLTNLKPQLHKHMVKLEAQNEKIRQNKKSNKKDEKKKIMKKLDKIKDLYLEDLIDKETYRKDYEKLQSQLDNITEEQESQIIDTSYIKKFLDIDINEMYNNLSRVERRRFWLSIIDYIEIDNDKNITINFI

SEQ ID NO: 6750 - protein, 576 aa, synthetic construct
MSKEKIKVYLYTRVSTSIQIDGYSLEAQKSRMKAFALYNDYEIVGEYEDAGKSGKSIEGRVQFTRMMEDIKSGKDGVSFVLVFKLSRFARNAADVLSTLQIMQDFGVNLICVEDGIDSSKDAGKLMISVLSAVAEIERENIRVQTMEGRIQKAKEGKWNGGFAPYGYQLIDGKLIINEEEAIAIRTIFDQYVNTSIGANGLSKYLENHGIRKIPRQNGKNPLFDAGLIRKILKNPVYNGKIAFGRRTLEKVHGTRNEYRQVEQDDYLVAEGIHEAIIPDELWQAAQVKLKAQAKKYEHVNKGKNMRTHLLSGIVKCPICGAGMFGNKSIKYKKDGTKYKDFYYYGCKHRLMNRGHKCTYNKQIREELLDDAVAEVIIKLVSNPKFASMIQEKINMKVDTSAIENEIDNYQNELRKSHSTKYKLIEEIDNLDVEDKHYKRRKNDLDDRLYRMYDKIEELESQLIEAKAKKETIEVEKLTGDNIYKVLIYFDKLYKVMNDVERRQLIEALISEIQIYEEKQPNGQWLKSITFKLPIIDEDLNISLENDEQVDSCTMCGKMCSMRTVKKILNNEELNLI

SEQ ID NO: 6751 - protein, 606 aa, synthetic construct
MKEVKVIKARNDLQTRTRGKTIELMRVGAYCRVSTDSADQLNSYKSQVAYYTDMIKKNKEWVLADIYADEAITGTQVAKREDFQRMINDCMNGEIDMVITKSISRFARNTLDTLKYVRMLKERNIAVYFEDEKINTLTMDGELLLVVLSSVAQQEVENISANVKKGLKMKMKRGELVGFQGCLGYDYHKDTKTITVNEEEAEIVRYIFNRYIEGAGGSVIAHELENLGYKTKYGSSTWVQSTVIGIIKNEKYKGDLLLGKTFTVDPISKRRLENFGEEDKFYIRNHHEPIISEEVFEKAQEILARRNVNRGKIGEGNTKREKYSRKYAFSCMLECGFCGGTLTRRNWHSSSQYSKVIWQCVTATKKGKKFCKHSKGIPETAIEEAFVESYRLLCDDNKDVLEEFLQRMDDTLSSSVVSKQLAKAEKEIDALEKKKSKLVDMRLEEIIDKETYESKYADLVSKQEQLVEERKKLQETSDNEKDIKKRLKEFKKTLEQNEVLDKFDRYVFESIVEKVIVGGLDENGNVDPAQLTFVYKTGLKNSVDGAKFKPQRKNARGRHRTDELCSHDSNEVDKMCSDSSNDTCGDGMFIVQTSCKPTYRGGTSDG

SEQ ID NO: 6752 - protein, 489 aa, synthetic construct
MKAGIYVRVSTDKESQETSLEYQEIACRDFANANGFEVYNVYHDVFTGTKSGRYNKRNGYNKMIEDALAKNIDVIIVKDLSRLSRNSLELEFLRNRVISKNFHIVTLNGDIDSIKGNISLFSTYILIYSEESKVTSIRTKQSKKTMAKNGIFTGSIPPYGYYTIDGKLYIRDDDSPKIVKRIFNNYISGESAESIAKNLTEENIPTPSQLANKKNASSKWHATTIRKMLVNQHYIGNLVQGKTEAVNTLYKSRVNNSKDDYIVVKNTHEPIISKEQFNLVNDTIESRKPNTKVSRKTHLLSNLIYCETCGRAISLRNNNYICSGRLKHGKKVCCTKKINKIDLVNLLTKNIIEKIDNCESDFLLKYVERKLNKNISSHKSTLNNLHTEKNKLENRKKEALNMHLDGDISRDEYNMVVTESNNTIDNLLKNIRSIESMLSVKDKIDLSRDFNLLKSRITKSVSLNPEILNYFIKRIEVTKLGEPKIYYRF

SEQ ID NO: 6753 - protein, 560 aa, synthetic construct
MSKEKIKVYLYTRVSTSIQIDGYSLEAQKSRMKVFALYNDYEIVGEYEDAGKSGKSIEGRVQFTRMMEDIKSGKDGVSFVLVFKLSRFARNAADVLSTLQIMQDFGVNLICVEDGIDSSKDAGKLMISVLSAVAEIERENIRVQTMEGRIQKAKEGKWNGGFAPYGYQLIDGKLIINEEEAIAIRTIFDQYVNTSIGANGLSKYLENHGIRKIPRQNGKNPLFDAGLIRKILKNPVYNGKIAFGRRTLEKVHGTRNEYRQVEQDDYLVAEGIHQAIIPDELWQAAQVKLKAQAKKYEHVNKGKNMRTHLLSGIVKCPICGAGMFGNKSIKYKKDGTKYKDFYYYGCKHRLMNRGHKCTYNKQIREELLDDAVAEVIIKLVSNPKFASMIQEKINMKVDTSAIENEIDNYQNELRKSHSTKYKLIEEIDNLDVEDKHYKRRKNDLDDRLYRMYDKIEELESQLIEAKAKKETIEVEKLTGDNIYKVLIYFDKLYKVMNDVERRQLIEALISEIQIYEEKQPNGQWLKSITFKLPIIDEDLNISLENDEQVETCVLLQRRTM

SEQ ID NO: 6754 - protein, 654 aa, synthetic construct
MAGIKEEKKIYSVGIYCRLSKDDGTENESASIATQKSILTDYVKKQGWHLAKTYVDDSYSGTNFQRPSFQNMIKDIENGLINCVITKDLSRLGRNYLDCGLYLEVFFPENNVRYIAVNDGVDTLNKSAMDITPFRNILNEMYSADVSVKIKSAYRARFQQGKFMGTYAPYGYIKDPADHNHLLIDDKVAHVVREIFDLALAGNGLAKIRKHINSQHILRPAAYAAEQGAAGYERYFEGNEENRYIWSENSVRGILRSPIYAGNLAGYKRIAANMKSKKRPSKLPEEWEVIPDTHEGIVTQEEFDIVQQLMTSRRREKNKGGFENIFSGVIKCADCGYALRAMSANRRKRPDIIDCIQYTCNNYGRYGNVMCTAHAIEARDLFNAVLADINRFADMAVNDERAVRAIEKRLTETDQSKAKAMEKERKKLNKRLAELDRLFSSLYEDKVMERITERNFEMMSGKYQKEQLEIEARLKEVTETLNESYEKSQGIRDFLSLIRNYQGLKELDATVVNALIDKILVSEREKSADGTVKQEIKIYYKFIGFVGELHITPTKRWTALPAKHCTVCGIEYVPGSGISKYCPACAKKIQREKSNESKRRSREQKRMACIELSAKNDRLIWCRKRDTYLSLHRERGYDFETIRLPKDDTVSVGL

SEQ ID NO: 6755 - protein, 558 aa, synthetic construct
MLQQSNSTNTSVYPMGNQTEKLTALYCRLSQDDKQEGDSNSIINQKKILKRYATEHGYQSYVFFVDDGFSGTNFNRPDFQRMIAEIEAGRVERVIVKDMSRLGRDYLQVGMYTEIMFPNMDVHFIAVNDGVDSHMGDNEFTPFRNIINEWYAKDTSKKIRAVKRSKGMAGEHIGSHAPYGYIKNPDNKKEWIVDEEAAEVVREIFRLCVNGYGPTRIANILTERKILCPTYYALKHGEKSRTILPPNKYLWNATVVSHILDRMEYLGHTVNFKTHIKSYKNRKKIKNSPEQWKIFENTHEAIIDKETFEIVQKIRSGKRRPTKMGEMPIFSGLLYCADCGSKMTFHRKVSETAEKHNFVCGNYRHNSRACTMHYIRNVVVEQIVLENLKEVIRYVANYEDEFVQMVMDTDMRQRNKELSQKKKRLAEIQSRIQELDKIFQRIYEDNISGKLSDERFMKLSRGYEKEQHTLQIEQTSLKEELQKKEKQSVDIKQFLSVVRKYTDLTELTPEIVHEFIDKIIVHAPDKSSGKRLQEIEIIYNHIGVFDHSKVTLWKGKAV

SEQ ID NO: 6756 - protein, 591 aa, synthetic construct
MQEVEVIKAKNVLARQARGKAIERLRVAAYCRVSTDSEDQLNSYKSQVQYYTDMIKKNKEWVLADIYADEAITGTQVTKREDFQRMINDCMNGEIDMVFTKSISRFARNTLDTLKYVRMLKERNIAVYFEDEKINTLTMDGELLLVVLSSVAQQEVENISANVKKGLKMKMKRGELVGFQGCIGYDYHPEDKTITVNQEEAEIVRYIFNRYVDGAGGSVIGQELESLGYKTKYGSSTWAPSTVIGIIKNEKYKGDILLGKTFTVDPISKRRLENMGEEDKFYMKDHHEPIISEEVFEKAQEILNRRNKNRTTVGSGKREKYSRKYAFSCMLECGFCGGTLTRRNWHSGSKYSKVIWQCVTATKKGKKFCKHSKGIPETAIEEAFVESYRLLCDDNKDVLEEFLQRMDDTLSSSVVSKQLAKAEKEIDALEKKKSKLVDMRLEEIIDKETYESKYADLVSKQEQLVEERQKLQETSDNEKDIKKRLKEFKKTLEQNEVLDKFDRYVFESIVEKVIVGGLDENGNVDPAQLTFVYKTGLKNSVDGAKFKTQRKNARGRHRTNELCSHDSNEVDKMCSDSSNDTCGDGSTIVQT

SEQ ID NO: 6757 - protein, 504 aa, synthetic construct
MDESIDAQIRAIEEYADKNGIRIVKTFIDRAKSATSANRPEFQNMIKYCEADNTGISMVIVHKLDRFSRDKYDSAMYKQKLKVKGIRVVSVLENLDNSPESLILESVIEGMAQYYSANLAREVAKGQKENALKALHNGGDAPLGYDVAFDKTYLINEEEAQAVKIIFDMYVNGYSYSNIIDKLNDLGYKTKRGNKFGKNSLHGILSNEKYTGVYVFNKTQRKGINGKRNGHKQKSEDEIIKVEGGMPQIIDKEVFLQAQDMMQKRKKAPGSHKATTLYLLTGIIKCGECGHAMQGNKRKDKYGNDYISYRCGCRKQKRDCKNKEIKRDYLEEFVLTELEKHVLNDEAIPALSKELNKRLKTKSSNNNEMLNNLRNKLEKVNKEIENILTAIMNGIVNNMLKDKLDELEQVKLNLDLKINELSIESNGVESIDITEDQIRGMFGKFKEFVLTRNLPECKKFISDYVKEVIVYRDHIEVIFNVVFSFVNNEITHDLHIATSREKIK

SEQ ID NO: 6758 - protein, 523 aa, synthetic construct
MEKIKAVAYGRYSSDNQRDESIDAQLRAIDEYTRKNNIQIVKTFIDRAKSATSANRPEFQNMIKFCESDTSGITMVIVHKLDRFSRDKYDSAMYKQKLKLKGIRVVSVLENLDNSPESLILESVIEGMAQYYSANLAREVAKGQKENALKALHNGGDAPLGYDVAYDKTYTVNEEEAQAVKIIFDMYVKGYSYSNIIDELNELGYKTKRGNKFGKNSLHGILSNEKYTGVYVFNKTQRKGVNGKRNGHKQKSEDEIIKVEGGMPQIIDKETFNQAQEMMKRRKKSPGAHKATTTYLLTGIIRCGECGHAMQGNKRKDKYGNDYISYRCGCRKQKRDCKNREIKRDYLEIFILQELEKNILNDDAIPVLSKALNEKLKESKDNNAELLKSLENKLEKVNKEINNILNAIMNGIVNSMLKEKLDELEQVKLNLDLKMSELKIEHKDIDTVGVTEEQIKAMFSKFRKFVLDRNIPECKKFIGDYIKEVIIYKDYIEVIFNVVFSFVDDKITHDLHITVEREKIVLK

SEQ ID NO: 6759 - protein, 558 aa, synthetic construct
MLQQSNNTITSIYPIGNQTEELTALYCRLSQDDKQEGDSNSIINQKKILKRYAIEHGYQPYVFFVDDGFSGTNFNRPDFQRMIAEVEAGRIKRVIVKDMSRLGRDYLQVGMYTEIMFPNLDVHFIAVNDGVDSHVGENEFTPFRNIINEWYAKDTSKKIRAVKRSKGMAGEHIGSHAPYGYMKNPDNKKEWLIDEEAAEVVREIFRLCVNGYGPTRIANILTERKILCPTYYALEHGEKPRTVLPPDKYLWSATVVSHILERMDYLGHTVNFKTHVKSYKNRKKIDNSPEQWRIFENTHEAIIDKETFEIVQKIRSGKRRPTKMGDMPMFSGLLYCADCGSKMTFHRQMAQSAEKHNFVCSNYRHNSKSCTMHYIRNVVVEQIVLENLKEVIRYVSDYEDEFVQMVMDTDMRQRNKELSQKKKRLTEIHSRIQELDKIFQRIYEDNISGKLSDERFMKLSKGYEEEQHTLQEEQTSLEKELQKEEKQSVDVKQFLSVVRKYTNLTELTPEIVHEFIDKIIVHAPDKSSGKRLQEIEIIYNHIGVFDHSKVTLWKGKAV

SEQ ID NO: 6760 - protein, 533 aa, synthetic construct
MLKQQANNKEKVALYSRLSRDDGLDKESNSIANQREMLKRYAKENKFYVYDEYIDDGFSGTTFNRPALNRMFEDIEAGKVNVVLVKDMSRLGRNNALFMYYVEEVFPDLDVRFIAINDMVDTAQDDNEIMPFKSVLNEYYARDISKKIRSSIRTTALTGGFTGAFAPYGYLVDPENKKKLIVDPETAPIVKRIFELSQQGTSTHQIARILCKDGILVPRAYRAKKKGILEQSKGFTFPTDWVGKNVKMILENQVYLGHMVSHKSQTKSFKNKKIVPVPKEDWIVVENTHEAIIDKETFEIVQKFISVKKQPNKTGKPNIFVGLVKCPDCGRNLAYSNPNGNEPRFRCRTYARNTELCTTHAISYKALYEIVQNDIKNHVNSMEELGDHFIKEMRELSETSGSQKIHQFNQELVSLEKRIDEIDSIFTKLIEQNALGKITDERFSKMSMNYETEQAEVVQSYRELKSKIKSEEEKVQGTDRFLETISKYKDVTELNRSMLCELIDSIYVYQAEGIGKERTQKVEINYRFLAVSH

SEQ ID NO: 6761 - protein, 574 aa, synthetic construct
MIATHYTCLFGCRKGGLMLQSNKITALYCRLSQEDMQAGESGSIQHQKMILQRYADEHHFLNTKFFVDDGFSGVSFEREGLQAMLQEVEAGRVATVITKDLSRLGRNYLKTGELIEIVFPENGVRYIAINDGVDTAREDNEFTPLRNWFNEFYARDTSKKIRAVKQAQAQKGERVNGEYPYGYIPDPNNRHHLIPDPETAPIVKQVFAMFVSGVRMCEIQKWLAENKVLTIGALRYQRTGQARYQRAMIAPYTWPDKTLYDILARQEYLGHTITAKTHKVSYKSKKTRKNEEEQRYFFPNTHEQLVDEETFELAQKRIATRHRPTKAAEIDIFSGLLFCAGCRHKMYYQQGVNIEPRKFSYSCGAWRNRARTGSECTSHYIRKNVLLDLVLEDMRRVLRYVKEHEQDFICKATEYGDMEARKALAQQQKELFKAQARMTELDTLFRKLYEDNALGRLTDERFVFLTSGYVDEKKSLAARIDELQQQIATVTERKRDISRFIQIVGKYSDIQELTYENVHEFIDRILIHELDRETNTRKIEIHYSFVGQVDTEQEPTQVVNHDRRNMVDVKSIAI

SEQ ID NO: 6762 - protein, 584 aa, synthetic construct
MKEVEVIKARNDLQTRTRGKTIELMRVGAYCRVSTDSADQLNSYKSQVAYYTDMIKKNKEWVLADIYADEAITGTQVTKREDFQRMINDCMNGEIDMVITKSISRFARNTLDTLKYVRMLKERNIAVYFEDEKINTLTMDGELLLVVLSSVAQQEVENISANVKKGLKMKMKRGELVGFQGCLGYDYHKDTKTITVNEEEAEIVRYIFNRYIEGAGGSVIAHELENLGYKTKYGSSTWVQSTVIGIIKNEKYKGDLLLGKTFTVDPISKRRLENFGEEDKFYIRNHHESIISEEVFEKAQEILARRNVNRGKIGDGNTKREKYSRKYAFSCMLECGFCGGTLTRRNWHSSSQYSKVIWQCVTATKKGKKFCKHSKGIPETAIEEAFVESYRLLCDDNKDVLEEFLQRMDDTLSSSVVSKQLAKAEKEIDALEKKKSKLVDMRLEEIIDKETYESKYADLVSKQEQLVEERKKLQETSDNEKDIKKRLKEFKKTLEQNEVLDKFDRYVFESIVEKVIVGGLDENGNVDPAQLTFVYKTGLKNNVDGAKFKPQRKNARGRHRTEELCSHDSNEVDKMCSDSSNDTL

SEQ ID NO: 6763 - protein, 588 aa, synthetic construct
MKEVEVIKARNDLQTRTRGKTIELMRVGAYCRVSTDSADQLNSYKSQVAYYTDMIKKNKEWVLADIYADEAITGTQVAKREDFQRMINDCMNGEIDMVITKSISRFARNTLDTLKYVRMLKERNIAVYFEDEKINTLTMDGELLLVVLSSVAQQEVENISANVKKGLKMKMKRGELVGFQGCLGYDYHKDTKTITVNEEEAEIVRYIFNRYIEGAGGSVIAHELENLGYKTKYGSSTWVQSTVIGIIKNEKYKGDLLLGKTFTVDPISKRRLENFGEEDKFYIRNHHEPIISEEVFEKAQEILARRNVNRGKIGEGSTKREKYSRKYAFSCMLECGFCGGTLTRRNWHSSSQYSKVIWQCVTATKKGKKFCKHSKGIPETAIEEAFVESYRLLCDDNKDVLEEFLQRMDDTLSSSVVSKQLAKAEKEIGALEKKKSKLVDMRLEEIIDKETYESKYADLVSKQEQLVEERKKLQETSDNEKDIKKRLKEFKKTLEQNEVLDKFDRYVFESIVEKVIVGGLDENGNVDPAQLTFVYKTGLKNNVDGAKFKPQRKNARGRHRTEELCSHDSNEVDKMCSDSSNDTCGNCS

SEQ ID NO: 6764 - protein, 502 aa, synthetic construct
MEFIREDCIYARQSVDRKDSISIESQIDFCKYELKGGSCRVFKDKGYSGKNTDRPEFQKLLGEIRKGKVRRVIVYKLDRISRSILDFATMMELFQEYDVEFVSSTEKFDTSTPMGRAMLNICIVFAQLERETIQKRVTDAYYSRCLKGFHMSGQAPYGYQLEPTVVEGIRTKKMVADPVAADHVRLMFEMYAEPETSFGDITRYFEEHDIKIYGKSMFRTFLSQLLRNPVYAQADLELYEFFKSQGAAIVNDASDFAGTNGCYLYQGRDVKEDKDRCLKDQILVIAPHEALISSDTWLKCRKKLMANTTFQQGRKPKNTWLAGKIKCGHCGYALKATHVPNSTGYFRCTKRTENKGCPGCGKIRKEEFEQFIFSAMQEKFKDFQILHGKEEKVNPKLTAYQVELAQVEAEIEKLLDTLTGANATLLAYANKKIEELDTRRQTISKAIAELSVETISPQQIKKLSYYLDNWDSIDFDDKRKAADGLISTIKATSDRVQIEWKI

SEQ ID NO: 6765 - protein, 620 aa, synthetic construct
MSSEKIIVLYERLSREDENLGESYSISNQKKLLEDYCREKGWTRFRHFTDDGISGTTFERPSFKAMMELVEDGEVETIILKDMSRLGRDYLVVGQLREFFRKKGVRLIAINDNHDSYNGDDDFLVFRDVMNEMYAKDISKKIKSTFKSKGKSGKHVASVTPYGYLKDENDGNHWIVDEEAAEIVRQIFKWTIDGLGPYQIATLLQEKKVEIPAVHMARFGQGNNRHKTFKDIYGWCSSTVVGILKKREYLGHTVNFKTQKHFKDKKSHYVSEDNWVIFENTQEPIIDQQTFDTVQKLRANVRRYPDGWGEHHVLTGLMYCADCGAKMYVHRTSNGKRIPQYTCSAYSKVPVGTLCNTQHRINESVVLELIGDMLKAIFEYAKYDRSEFIETIATAQSTQEDAEVKKVRARITVAKNRCEELEKLICRIYEDNILGKLPDSRYEVLDKQYAKEKAELDVELKELEVKLTEYEKSKNSASKFMALIDKYEKFKELTPAMINEFVDKVLVHERDRKGSIQTTQEIEIYFNFVGRYVPPAMMTEPTPEEQAEIDRINRIKDRRHQQYLRRKESGWQRKYEERVKSEKRAKIEAMKEEIRRQDRENGVYATVGSLALEPKIGTPV

SEQ ID NO: 6766 - protein, 986 aa, synthetic construct
MIDKILKEIKGLFKVQDKAKFLKQNIPYLAFFYVGNIFSHHVRAYTGGDVIDKIFQGILELNIMSFLPSLHPTDILIGIGVAALIKFIVYTKGKNAKKFRQGKEYGSARWGTRKDIEPYMDEKFQNNILLTQTERLTMNGRPANPKYARNKNVLVIGGSGSGKTRFYVKPNLMQMHSSYCVTDPKGTIVLECGKMLEDNGYEIKILNTINFKKSMKYNPFAYLRSEKDILKLVQTIIANTKGEGEKAGEDFWIKAEKLYYTALIGYIFYEAPREEKNFATLLDMIDASEVREDDETYMNPIDRLFEALEKREPTHFAVKQYKKYKLAAGVVCFKRLLNQAVGKSLRTHNLKPKKGAQAMRKNEKITALYERLSRDDFGKDDDQQRESNSISNQKAMLEEFAARQGFTNIVHFTDDGISGTCFDRPGFLTMMKEVEAGNVEYLCIKDMSRLGRDYLKVGQIMEILRQRGVRLIAINDGVDSARGDDDFTPFRNIMNEYYARDTSRKIRSTFQSKGKTGKHLTGTVIYGYLWNEKRDQWLVDPEAAEVVKRIFAMTIDGYGPYQIANKLKEEKVLIPSAYLAQHGEGVNKNKTFKDVYGWGSSTICNILEKREYLGHTINFKTRKHFKDKKSHYVPEDEWTIFENTHEPIIDQQTFDLVQKIRSKVRRYPDGWGEVAPLTGLLYCADCGGKMYVHRTNNGKRISQYTCSQYTKVPVGTLCKTQHRINEDVVLSLVSEMLKAIAEYAKHDRAEFVRVVQEAQSSQQTAEVRKQRTRLATAKQRVSELEVLLCKIYEDNILGKLSDSRYATLDAQYEKEQSELTAEISALEKAVRSYEKHEKDADRFIALIDKYENFDKLTIAMLNEFIEKILVHERDRKGSIQTTQEVEIYFNFVGRFVPPAFGEVELIPEELEEIRKREERKDRLHQNYLKRKASGAQKRYEDKIKEKKKAEIEAKKAAIRAEDIAKGVFVPVGSLPQREPQKGAQIA

SEQ ID NO: 6767 - protein, 560 aa, synthetic construct
MKKEKIKVYTYKRVSTAMQIDGYSLDAQRARMKAYADFNDYEIVGEYEDAGKSGKSIEGRLQFRQMMEDVKSGKDNISYVLVFKLSRFGRNAADVLSTLQVMQDFGVNLICVEDGIDSSKDAGKLMISVLSAVAEIERENIRVQTMEGRIQKAREGKWNGGFAPYGYQLVNGKLEINEEEAVAVRTIYDQYVNTDIGSNGISKYLENHGIRKIQRQNGKNPLFDAHLVRLILKNPVYCGKIAYGRRKTEKVHGTRNEYHLVEQDNFLLVDGLHEAIIPEDVWNAAQVKLVAQAKKYEHVNKGKNERTHLLSGIVKCPICGAGMYGNKSIKHKKDGTKYKDFFYYGCKHRSMQRGHKCDYKKQIREELLDDAVAEVIVKLVSNPNFATMMQEKINMKVDTTAIDQEIENYEKQLRQDYSIKSKLMEEIDNLDPDDRHYIRRKADLDDRLYRMYDKIEELESQLIDARAKKTSIEAEKITGDNIYKVLICFDKLYFAMNDVERRQLIEALIAEIQIYEERKPNGQWLKSIRFKLPIIENDLRIGLDNSEHVETCVLLQRRTM

SEQ ID NO: 6768 - protein, 503 aa, synthetic construct
MNNRIDAIYARQSVDKKDSISIESQIEFCKYELKGGNCKEYTDKGYSGKNTDRPKFQELVRDIKRGLIAKVVVYKLDRISRSILDFANMMELFQQYNVEFVSSTEKFDTSTPMGRAMLNICIVFAQLERETIQKRVTDAYYSRSQRGFKMGGKAPYGFHTEPIKMDGINTKKLVVNPDEAANIRLMFEMYAQPTTSYGDITRYFAEQGILFHGKELIRPTLAQMLRNPVYVQADLDVYEFFKSQGTVIVNDAADFTGMNGCYLYQGRDVKPSKKNDLKDQILVLAPHEGIVPSDIWLTCRKKLMNNMKIQSARKATHTWLAGKIKCGNCGYALMSIFNPSGKQYLRCTKRLDNKSCPGCGKIITSELEAVVYQQMVKKLASYKTLTGRKKAAKANPKIAALQVELAHVDSEIEKLVDSLTGANNVLLSYVNVKIAELDGRKQELLARIAELTVEAISPEQVNQISGYLDTWENVSFDDKRRVVDLMITTIAATSDSLNITWKI

SEQ ID NO: 6769 - protein, 540 aa, synthetic construct
MTRQTTQKLITALYPRLSHEDTLQGESNSISNQKRILEAYAKQNGFSNLKWYTDDGFSGANFQRPGFQSMLADIEAGLVGTVIVKDMSRLGRNYLQVGMYTEMIFPQNGVRFIAINDGVDSAQGDNDFAPLRNIFNEWLVRDTSKKIRAVKRSKGMSGKPVTSKPVYGYLMDEDENFIIDEEAAPVVRQIYSLCLAGNGPTKIARMLTEQEIPTPGTLEYRRTGSTRRYHPGYECKWAANTVVHILENREYTGCLVNFKTTTQSYKCSKIIYNSEDKQAIFENHHEQIIDKDTWERVQELRKQRKRPNRYDEVGLFSGLLFCADCGSVMYQQRYQTDKRKQDCYICGSYKKRTADCTAHFIRTDLLTAGVTENLRKVTSYAARHEARFMKLLTEQTEDGSKRRNAAKKKELEAAEKRIAELSAIFKRLYEDSVTGRISDERFTELSADYEAEQKELKEKAAALQSELSKTLEATANAEKFMKVVRKYTSFEELTPTLLREFVEKIVIHESEALDGKRRGKLRRQEIEIYYSFVGKVELPD

SEQ ID NO: 6770 - protein, 537 aa, synthetic construct
MKQQIYNTALYLRLSRDDELQGESSSITTQKSMLRLYAKEHHLNVIDEYIDDGWSGTNFERPSFQRMIEDIEAGKINCVVTKDLSRFGRNYIMTGQYTELYFPSHNVRYIAIDDGVDSEKGESEIAPFKNIINEWVARDTSRKVKSAFRTKFAEGAHYGAYAPLGYKKHPDIKGKLLIDDETKWIVEKIFSLAYQGYGSAKITKILREEKVPTASWLNFTRYGTFAHIFEGKPESKRYEWTIAHVKAILKSEVYIGNSVHNMQSTVSFKSKKKVRKPESEWFRVENTHEPIIDKEVFYRVQEQIKSRRRQTKEKATPIFAGLVKCADCGWSMRFGTNTANKTPYSYYACSFYGQFSKGYCSMHYIRYDVLYQAILERLQYWAKAVQQDEEKVLHKIQKAGNAERIREKKKKASALKKAENRQNEIDRLFAKMYEDRACEKITERNFVMLSGKYQKEQIELEQQITSLREELSKMEQDMIGAEKWVELIKEYSVPKELTAPLLNAMIEKILIHEATTNEDNERIQEIEIYYRFIGKVD

SEQ ID NO: 6771 - protein, 534 aa, synthetic construct
MKQQQYNTALYMRLSRDDELEGESASISTQKQILRDYANEQGFLVVDEYVDDGFSGTNFERPSFKRMIEDIEDGKINCVVTKDLSRLGRNYILTGQYTELYFPSKGVRYIAIHDGVDTIREDNDIAPFKNIVNEWQAKETSRKVKNAMKAKFKNGEYIAPVVPIGYKINPAEKNRLVVDEETKWIVEKIFALAAHGYGANKICRTLAAEKVPIPAWWASQKNGYKANIFEGQPEGKKYLWNIVTVSKILQNEIYLGNTVHYQIQKLSYKSKKNVKRPKEDWMRVENTHEPLVDRETWDLVQGHINSRKRSRKDDEPQIFAGLLKCGECGWSLSAANTKNKSRYYRCTQYSAHGKEACSLHFITYNLLYAFVLGRLQYWLMAVKENEDAILERLLQSSKKQRRTENARDEKELKRAQTRRQELNNLFAKMYEDRVKGLLDEENYSMLSVKYRTEQQQLDETMKTVSARLEDAKAETDDAKRWVDLIQKYSAIDELTAPLLNELIEKIAVHQWRKDENGKKVWDIEIYYRFVGKID

SEQ ID NO: 6772 - protein, 584 aa, synthetic construct
MKEVEIIKKNDNLENRRRGKYIDRKRVAAYCRVSTDSEDQLNSYKSQVSYYTDLINNNIEWCMVDIYADEAITGTQVNKREDFQRMINDCMNNEIDMIITKSISRFARNTLDTLKYVRMLKEKNIAVYFEDEKINTLTMDGELLLVVLSSVAQQEVENISANVKKGLKMKMRRGELVGFQGCLGYDYHKEDKTLTINEKEAEIVRYIFNRYIEGAGGSIIGQELENLGYKTKYGSTTWSNSTVLGIIKNEKYIGDVLLGKTFTVDPISKRRLDNLGEEEKYYVKNNHEPIISREIFDKAHEILNRRSKNRGKYEAGVTKREKYSRKYAFSCMIECGFCGGTLTRRNWHSGSEYSKVIWQCVVATKKGKKYCPESKGIPERVIENAFVESYRLLCDEKKSVLEELLNRINDIVGSSEVNNKIKKIEKELSVIEKKINNLVDMRLDDIIEKETYEIKYQELIDNQEKLLNERNKLNVVAKNENSMKQRLKEFKKTLEENEVLDKFDRGVFESVVEKVIIGEKNKDGENDPTKITFIYKTGFKNTLSSDEFKIPRKNARGRHKRKELCLHGNNEVENLCSYSSSNTL

SEQ ID NO: 6773 - protein, 556 aa, synthetic construct
MAMMNEMEYRTIGKALAGGYRAAVYCRLSKDDDLQGESASIANQRDMLEKYCEKQGWEVVAVYQDDGFTGLNMERPDLQRMLRAIERRQINLVITKDLSRLGRNYLQTGHLIEDFFPRNGVRYIAMNDGIDTLRDNNDIAPFKNILNEMYSKDISKKVHSSYLLKAQKGQFTGCLAPFGYRKDPEDKNHLLIDEETAPIVRLIFGYALNGHGPNYIRRRLEEEKIPCPTWWNRERGLRNTRTKWEKKDPENGRYMWDFSVIKDLLMNPVYTGAIASQKKDYRFKIGTIGEKKPEDWIVVEGQHEPLIDRMSFDIVQNKLKSRQRPGQTNEISLFAGLIKCGECGKSLTIRYTNAKHPQQIYSCKTYNAFGKNHCTQHRIDYDTLYSHVLRKIRECARAALMDGEAVADRLTNTCEAEQREQREAMERSLTRDEERIEVLDKMVMRLYEDMIAGRISEQNFNTMLEKTQTEQAELKAKVSEGRKRLSDEVQLANDAKQWVEAIQEYANITELDAATLNRLIKEIVVHERIDEDKTRHISIEIHFNLKPIPEVEQVTA

SEQ ID NO: 6774 - protein, 542 aa, synthetic construct
MQQLKTKRVGIYVRVSTEMQSTEGYSIDGQINQIKEYCDFHHFEVKDIYADRGISGKSMNRPELQRMLKDAKEGNIDCVMVYKTNRLARNTSDLLKIVEDLHKQNVEFFSLSERMEVNTSSGKLMLQILASFSEFERNNIVENVFMGQTRRAQEGYYQGNLPLGYDKIPNSKHELMINQHEANIVKYIFESYAKGHGYRKIANALNHKGYVTKKGKPFSISSITYILANPFYIGKIQFAKYKDWSEKRRKGLNDKPVIAEGKHSPIINQDLWDKVQMRKKQVSQKPQVHGKGTNLLTGIIHCPQCGAPMAASNTTNTLKDGTKKRIRYYSCSNFRNKGSKVCSANSVRADVIEDYVMKQILEIVKSDKVIQRVVTHVNQENQVDGAALHHDIAYKQQQYDEVQIKINNLIKTIEDNPDLTSVIRPSIQKYEKQLNDITNQINQLKNQQNEDKTLFDAKEISKLLQHIFHDIKHIEKSRLKALYLSVIDRIDIKKDGNHKKQFYVTLKLNNEIIKQLFNNKQLDEVHLSTSSLFLPQTLYLTI

SEQ ID NO: 6775 - protein, 449 aa, synthetic construct
MKQVIGYLRQSTMKQQSLAAQKQAIEAIAEKHHIQHINFYSDKQSGRKDNRSGYRQMTQLIQQGQCDILCCYRLNRLHRNLKNALKLIKLCQTYRVHILSVHDGYFDMDQAFDRFKLNIFISLAELESDNIGEQVRNGLQEKAKQGRLITTHAPFGYEYHNGTFIINQNESPTVKAVFNYYIKGHGYKKIAQLLEEDNTYINRQPYQVRNIIINPNYCGRVNNQYGQFDNMFPSIVSTSIYEQAQRLRLQKQTKQTPSDNQLKQKIKCPCCNATLTNMTIRKKNHTLRYYVCPKNMNASRFVCDFKGINAQTLEDKVLEVCRDFYQNQRIYTKIKSAIDKRIKRQRNIEKHHTLTQEQLIEKLAQGIIDAETFREQTQSLRQQPQRTTSINGHQIQHIIQNIIQKRFTLNILYPYIETIHITKDKNLIGIYFKNEPLNIVNQTMQSSIA

SEQ ID NO: 6776 - protein, 554 aa, synthetic construct
MATEGRRPAASRRAAIYARFSTELQRDQSIEDQVALCRATAHRDGFSVVATYEDRARSGASMFGRPGLEQLLRAAEGREFDVIFVEALDRLSRDMADLAGIHRQLTFLSIEIRAVHDGVADTVTVGLRGLVGQLFREDGVKKIRRGMAGVIREGRYAGGRSYGYRPTPGEPGRPQVVAEEAAIVRRIFLEYADGRSPRDIAHDLNREGVPPPRGTAWNASTINGNGERGNGILQNPLYVGELVWNRVRMVKDPSTGRRISRPNPSSEWQRADAPQLAIVDRETWERAAERKRASLARGPEPRGPRRYQRSLLSGLLRCGACGSGMAKHDNANGRPRIRCSRATESGSCDNHRSYYLDRIEAGVVEALRAEIDQPELIAEFVRAYHEERRRLAGDTSRERAKAETRLGEVVRQIERMVEAIAQGGAAFDALRTKLEALDRERRDLEAALAADAAPASVVALHPAAIAAFRAMLEALAARLGARESPIAHPAFRQLVERVVVHPAPKGEDPRVEIVGKLAAILDLSGLGAPAAHRNGTHGGFLVAEEGLEPPTQGL

SEQ ID NO: 6777 - protein, 561 aa, synthetic construct
MKKTGVYLRVSTEEQRERHTIATQRRAAERYLQQQHGVQVQWYEDNGVSGMIPLADRPAGGQLLHDAREGVIDRVVVYKLDRLGRDPLVILTAVSELEALHIILESMTETLDHNSPSGKFLLAILSAAAGLERDVFLERSIEGTNRLAQEGAWLGGIVPYGYRVTGKQRDARLCISDERIEGCEYSEADIVRLIYHLTVEENKSCFAIATHLNDLGISPVYARDQRTMLRGKRQCRTSGKWTPGRVRSMIVNTTYKGIHYYGRRSKKVRDVIERAVPAIVEASTWEQAQQVLQGHQLFSKRNAKRQYLLRGLMKCAHCGLTYVGTGTDGKRDSYYYACSGRHSRSLFHARGEKCFAKAVSGAEIEALIWNDVEMFLRHPGALLSQFETQMRAQAANYDQLLQCIASEEAVIQEKDQEKQSVIGLFRRGRISESDPDQQLDEIEAETQQVRDRLAQVQEQVSLLQTHSSSLQTAEEVLYALRRRLHERLEQPLSWEIKRREIEALVKQIQLETVEGNDGKKTVRVSVTYRFGEAIDLCKTYPSPQASQASQEAKEHVLLGSS

SEQ ID NO: 6778 - protein, 521 aa, synthetic construct
MENRVKRVIIYARVSSDRQDVDLSISAQLKALRDYAARNGYVVVKEFVDEAESGRSTARPSFREMIGLARTKQAPFEMILVWKLSRFARNREDSIIYKSLLRKQGIQVVSINEPIEDTPTGRLMEGIIEVIDEFYSSNLGQDIKRGMRENASRGFFNGSRPPFGYLRKKIKDGDKERNSLEPDPKLVPIVQRIFNEITNEKGLKEIAKGLNRDGIPAPAGGKWGKQRLHKILTNETYTGRLIWGKIHKGKTSLPPVIKDNAWPAIVDKSVFENVQVTLSERAPKVTHPRVASSNYLLSGLVRCRNCGASYIGYGAKSGQFHYYVCGTAYSKGKEACPSQHLPQEKLERFVTDKIKGYILTDGHLLDLIKQSNEAFDVADNKRKERVGVIDKEIEQWEGRLERLYDFVETKKIEPDRMAQRIADVQDKLNLMRQAKLDLENGHGANRAAYIDPQKVLSYVAELRHFLDERGLFERKAFLRSFIEQIRVGDNKVTLDYTLPLPPNNSTQETVSVLDIVSSAPP

SEQ ID NO: 6779 - protein, 554 aa, synthetic construct
MNKHTFGNVVRSGNAAPKRAVLYLRVSTGRQATNDVSLPSQRDITTAHCTANGWLVIDEFVEAGATATDDRRPAFQDMMERACDPSRPYDVIVIYAFNRLYRNGVELELAVRKLRKNGVEVASVTQPTGNDPSQELMRQLIGVFDEHTSREIGKNTKRAMMQSAKQGFWNGATPPLGYKIVEAERRGQKIKKKLDTDPVEAETIRLIFRLYLEGDGNTGPLGVKETTKWLNSHGYRTRRGSTFGVGPVHKILTNTCYATGLWVYGKRDSRNGGLNDPSTVVEIPIPTLIELAIFDRVQAKLSNNNPRTTAPRIVNGPSLLTGIAICASCGAGMTRTGTNRRGKSYSYYSCAGCHRKGETACKGRHIPTGTLDEIVVSNLKQRLFAPERLAELLQTLADRRSAKSLAEDNRLVSLRHQLTETEERLKRLYRSIEDGIIELDDILRERTSTLKSEHERAKAALDRARSQGGAEILIDADKIDTFSRLMTEKLDHGDVNSKKAYIRAVVSAIEVDDTAIRIIGSKHMLQAVIAGKQATNENVRGFVRKWRARRDSNS

SEQ ID NO: 6780 - protein, 568 aa, synthetic construct
MTVKSKKIADPSTTLHIYTRVSSLAQANEGTSLSTQHQLGLKKAKQLSFTPNHWNEGGKSSHHEDTNGRPILLNLYEAMKRGEVKHLWVYDQSRLSRNDQVASIFRYECIKQGVTLYTKDGQFNLSNPQDKLMKMILDGMGEFENSIRAERTRLGKLNRAREGFWFGGPPPFGYKILEKKLVLNKDESTWVKKIFTETSKGASTLEVKKLLDSNGVLPRRRASTWSIGSIQALLKNTHYKGLYQYHDKKSDEKIEIECPAIVDTTTWTAVQKLKARKISRVSQQNRTKQFYLLRDLMVCGHCGRQMSARRKLDKNEQLYYCPNKERDWVENGGSKTPWKRGEGCGMSRSLNIPETDNLVWDSVVDIHKKSSILKEEVKWKILEESGAPLAKSEAELKTIERQIKHQQKVLIQTKESQAELLLNHTTGKIKAEIYNLALVRSNEEIHNLEVKIANLQLQLKGGNESRKWVNWLKDFGQDLNRKKELGDEERKQYLTGLIEEIKVKYDEKKNEHELSIQFQLPIVGDGISWKNPAKKKEGYKIKKGKQTSTLVVKKKDPRWSKTPTKVTP

SEQ ID NO: 6781 - protein, 558 aa, synthetic construct
MTKLYSYIRFSSMRQSDGSSYERQIRMAKEIADRYNLELVNDYQDLGVSAFKGANSKTGALSRFLDEIGRSIPVGSWLFIENLDRLSRQDIISAQELFLSIIRRGITIVTGMDNKIYSIETVTANPMDLMFSILLFIRGNEESQTKRNRTNSSALLKIKAHQQNPQNPAVAIEEIGKNMWWTDTTSGRVLPHPVYFPVLQKIVQLRQEGHSAGAILDYLNEHHEPPAPTSNKKHGKWSRAMVSRLFNTKALIGVKTVNVDGVEYELRDYYPRVLSDSEFYFLRKNIVKKAWDYSHDKEKVIPLLSGIGVLRCVHCGATMVKQTAANGKREQYRYCCDGRKSGRTDCPYPNWGFRAVTLEGAVLQLLADKIWIAEDKTNPIPEIQVKIDEISRKIDNLINLSAMMGATKELANQITDLNSQREALHEEIRLFEREMYSVDSRGWDKLAQFDLSDVQNEERLKVRMKIKGALHEIECSRIDSKKNLFVLVYLDGLRQRLVIENNRGLKKGQIFVDLKTINDRQILESAGMVLHPCIEMIIDADWKAPEEIPGLLSEEFGI

SEQ ID NO: 6782 - protein, 532 aa, synthetic construct
MKAAIYSRKSRFTGKGDSIENQIQLCIDYAKSIGVKDFLIYEDEGFSGSNIDRPQFKKMMQDAKDKKFSYLVCYRLDRISRNVSDFSTLIEKLNELNISFISIKEQFDTSTPMGRAMMFISSVFAQLERETIAERIKDNMYELARSGRWLGGNTPHGFNSEKITFLDENLKERSMYKLQVNDEQMEIVKLIYNKYLELRSLSKLYKYVYNNGIRGPRGGKFDPSSLSRILRNPAYVKANDEILDYLKNSGMDVVGTPDRKCGILTYAKNTSNSIAAIAKHHGVIEPEIWLEVQNQLDKNRDKTPRISTGKTALLSGLIKCGKCGSNMRITYKGKKTDKDLKYYYICGTKKTLGSDSCNCKNLNGPLVESLVIDKIKNCKEESIISAFNSNNIKTDNVFNIFKSETNLLKNQILDKERLIKNLVIELAKNTGSTASDYIVFQIESLNNEISILKDKINTLESSNINISSDSINIDIIVSNLKRFNDEVDNASLDDKRLLLSTIINSIIWDSSLGNLNIVYMGAEVDNSVSLSN

SEQ ID NO: 6783 - protein, 532 aa, synthetic construct
MKAAIYSRKSRFTGKGDSIENQIQLCIDYAKSIGVKDFLIYEDEGFSGSNIDRPQFKKMMQDAKDKKFSYLVCYRLDRISRNVSDFSTLIEKLNELNISFISIKEQFDTSTPMGRAMMFISSVFAQLERETIAERIKDNMYELARSGRWLGGNTPHGFNSEKITFLDENLKERSMYKLQVNDEQMEIVKLIYNKYLELRSLSKLYKYVYNNGIRGPRGGKFDPSSLSRILRNPAYVKANDEILDYLKNSGMDVVGTPDRKCGILTYAKNTANSIAAIAKHHGVIEPEIWLEVQNQLDKNRDKTPRISTGKTALLSGLIKCGKCGSNMRITYKGKKTDKDLKYYYICGTKKTLGSDSCNCKNLNGPLVESLVIDKIKNCKEESIISAFNSNNIKADNVFNVFKSETNLLKNQILDKERLIKNLVIELAKNTGSTASDYIVSQIESLNNEISILKDKINTLESSNINISSDSINIDIIVSNLKRFNDEVDNASLDDKRFLLSTIINSIVWDSSLGNLNIVYMGAEMDNSVSLSN

SEQ ID NO: 6784 - protein, 502 aa, synthetic construct
MEFIREDCIYARQSVDRKDSISIESQIDFCKYELKGGSCRVFKDKGYSGKNTDRPEFQKLLGEIRKGKVRRVIVYKLDRISRSILDFATMMELFQEYDVEFVSSTEKFDTSTPMGRAMLNICIVFAQLERETIQKRVTDAYYSRCLKGFHMSGQAPYGYQLEPTVVEGIRTKKMVADPVAADHVRLMFEMYAEPETSFGDITRYFEEHDIKIYGKSMFRTFLSQLLRNPVYAQADLELYEFFKSQGAAIINDASDFAGTNGCYLYQGRDVKEDKDRCLKDQILVIAPHEALISSDTWLKCRKKLMANTTFQQGRKPKNTWLAGKIKCGHCGYALKATHVPNSTGYFRCTKRTENKGCPGCGKIRKEEFEQFIFSAMQEKFKDFQILHGREEKVNPKLTTYQVELAQVEAEIEKLLDTLTGANATLLAYANKKIEELDTRRQTISKAIAELSVETISPQQIKKLSYYLDNWDSIDFDDKRKAADGLISTIKATSDRVQIEWKI

SEQ ID NO: 6785 - protein, 558 aa, synthetic construct
MLQTDKITALYCRLSQEDMQAGESESIQNQKLILQKYADEHHFFNTRFFVDDGFSGVSFEREGLQAMLHEVEAGNVATVITKDLSRLGRNYLKTGELIEIVFPEYEVRYIAINDGVDTAREDNEFTPLRNWFNEFYARDTSKKIRAVKQAKAQKGERVNGEAPYGYLIDPDNRNHLIPDPETAHVVKQIFAMYVRGDRMCEIQNWLRDNEILTVGELRYRRTGSNRHPRPQLNAWYNWPDKTLYDILTRKEYLGHTITGKTYKVSYKSKKTKKNPEEKRYFFPNTHEPLIDEETFELAQKRIATRQRPTKVDEIDLFSGLLFCGDCGYKMYAVRGAGTLERKHAYTCGNYRNRARNDMLCTTHYIRKSVLKELVLADLQRVTSYVKEHEQEFIETANECSAKAVQKTLTQQRKELDKAQNRMNELNILFRKLYEDNALGKLSDEQFAFLTSGYDEEKKTLTRRIAELTQEIDNATERSADVKRFVALVRRYTTITELTYENVHEFIDRILIHELDKETNTRKIEIFYSFVGRVDTGDKPTESISYFRQIGADVKSYAI

SEQ ID NO: 6786 - protein, 452 aa, synthetic construct
MLRVALYIRVSTEEQVLNGDSIRTQIEALEQYSKENDFNIVGKYIDEGCSATNLKRPNLQRLLRDVEKDKVDLVLMTKIDRLSRGVKNYYKIMETFEKHKCDWKTILENYDSSTAAGRLHINIMLSVAENEAAQTSERIKFVFQDKLRRKEVISGTIPIGYKIENKHLVIDKEKKYIVKAIFDEYEKSGSVRTLIETINNLHGELYSYNKIKNILRNELYIGIYNKRGFYVEDYCEPIISKKQFKQIQRILEKNKKTTPNKNIHYHIFSGLLKCKECGYTLKGNSSNVREKIYLSYRYSTFYLNKNCIHNVTHNEKHIENYLLTNLKPQLHKHMVKLEAQNEKIRQNKKSNKKDEKKKIMKKLDKIKDLYLEDLIDKETYRKDYEKLQSQLDNITEEQESQIIDTSYIKKFLDIDINEMYNNLSRVERRRFWLSIIDYIEIDNDKNITINFI

SEQ ID NO: 6787 - protein, 654 aa, synthetic construct
MAGIKEEKKIYSVGIYCRLSKDDGTENESASIATQKSILTDYVKKQGWHLAKTYVDDGYSGTNFQRPSFQNMIKDIENGLINCVITKDLSRLGRNYLDCGLYLEVFFPENNVRYIAVNDGVDTLNKSAMDITPFRNILNEMYSADVSVKIKSAYRARFQQGKFMGTYAPYGYIKDPADHNHLLIDDKVAHVVREIFDLALVGNGLAKIRKHINSQHILRPAAYAAEQGAAGYERYFEGNEENRYIWSENSVRGILRSPIYAGNLAGYKRIAANMKSKKRPSKLPEEWEVIPDTHEGIVTQEEFDIVQQLMTSRRREKNKGGFENIFSGVIKCADCGYALRAMSANRRKRPDIIDCIQYTCNNYGRYGNVMCTAHAIEARDLFNAVLADINRFADMAVNDERAVRAIEKRLTETDQSKAKAMEKERKKLNKRLAELDRLFSSLYEDKVMERITERNFEMMSGKYQKEQLEIEARLKEVTETLNESYEKSQGIRDFLSLIRNYQGLKELDATVVNALIDKILVSEREKSADGTVKQEIKIYYKFIGFVGELHITPTKRWTALPAKHCTVCGIEYVPGSGISKYCPACAKKIQREKSNESKRRSREQKRMACIELSAKNDRLIWCRKRDTYLSLHRERGYDFETIRLPKDDTVSVGL

SEQ ID NO: 6788 - protein, 558 aa, synthetic construct
MNREGKKCVLYPRVSTEMQVDGYSLEGQKNSLKRFADREEMEIVGIYEDAGKSGKSIEGRPAFKKMLSDIKNGLEIDYILVYKLSRFGRNAADILNSLEFVQSYGINLICIEEGIDSSQTSGKLLISVLSAVAEIERENIIEQTMNGRREKARQGGWNGGFAPYGYYLKDNQLLIEETEAEAIRIIFDKFANSDIGLGGVAKYLNLQGIKKIPRQNGTLETWSSHFIRLILDNPVYCGKIAYGRRTREKVKGTKNEYKQVHAEDYILEDGQHEGIISEELWQKVHAKRMATGIKQPSKIGKDRSHLLTGILKCPLCGSSMYTNKHAWTNKDGTYKEVYYYICGRNKQERGHHCDYKASLRKTDIEPLVIEAVKELVSDKYFAKEIEKRIGVQTDTTAIDKELANYESKLKEVDLNKARLEREIDNLPIDARFRERKIHDMTLRLDGLYDTIVELEERIEDAKLRKSSIEMETITLDNIYKLMLNFGKLYDIISDEEKKSLITYLIKEIQIYPNGESEQPLKSIEFNFPIYRDGQEVRRLLWEKGNTVETCVLLQRRTM

SEQ ID NO: 6789 - protein, 558 aa, synthetic construct
MSKEKIKVYLYTRVSTSIQIDGYSLEAQKSRMKAFALYNDYEIVGEYEDAGKSGKSIEGRVQFTRMMEDIKSGKDGVSFVLVFKLSRFARNAADVLSTLQIMQDFGVNLICVEDGIDSSKDAGKLMISVLSAVAEIERENIRVQTMEGRIQKAKEGKWNGGFAPYGYQLIDGKLIINEEEAIAIRTIFDQYVNTSIGANGLSKYLENHGIRKIPRQNGKNPLFDAGLIRKILKNPVYNGKIAFGRRTLEKVHGTRNEYRQVEQDDYLVAEGIHEAIIPDELWQAAQVKLKAQAKKYEHVNKGKNMRTHLLSGIVKCPICGAGMFGNKSIKYKKDGTKYKDFYYYGCKHRLMNRGHKCTYNKQIREELLDDAVAEVIIKLVSNPKFASMMQEKINMKVDTSAIENEIDNYQKELRKSHSTKFKLIEEIDNLDVEDKHYKRRKNDLDDRLYRMYDKIEELESQLIEAKAKKETIEVEKLTGDNIYKVLIYFDKLYKVMNDVERRQLIEALISEIQIYEEKQPNGQWLKSITFKLPIIDKDLNISLDNDKQVETVVKLIRE

SEQ ID NO: 6790 - protein, 508 aa, synthetic construct
MKKAIAYMRFSSPGQMSGDSLNRQRRLIAEWLKVNSDYYLDTITYEDLGLSAFKGKHAQSGAFSEFLDAIEHGYILPGTTLLVESLDRLSREKVGEAIERLKLILNHGIDVITLCDNTVYNIDSLNEPYSLIKAILIAQRANEESEIKSSRVKLSWKKKRQDALESGTIMTASCPRWLSLDDKRTAFVPDPDRVKTIELIFKLRMERRSLNAIAKYLNDHAVKNFSGKESAWGPSVIEKLLANKALIGICVPSYRARGKGISEIAGYYPRVISDDLFYAVQEIRLAPFGISNSSKNPMLINLLRTVMKCEACGNTMIVHAVSGSLHGYYVCPMRRLHRCDRPSIKRDLVDYNIINELLFNCSKIQPVENKKDANETLELKIIELQMKINNLIVALSVAPEVTAIAEKIRLLDKELRRALVSLKTLKSKGVNSFSDFYAIDLTSKNGRELCRTLAYKTFEKIIINTDNKTCDIYFMNGIVFKHYPLMKVISAQQAISALKYMVDGEVYF

SEQ ID NO: 6791 - protein, 513 aa, synthetic construct
MKAIILARVSTQEQKEAGNSLPAQVFRLKDYTERTPNLELDKEFTFDESAYKEGRQKFDDVINYLEQQKELVALCCDKVDRLARDFLVGLPKIEKLRREGKIELHFPGDNLVLTENSPATDLFHFNIAVSLAQYYSNAISDNTKRAMEEKIRKGEWIGQAPVGYLNLLDDKEKRTLILDCDREHLVHKSFKLYATGTHSVKTIQKEMKKLGLRHHRSEKVLSNSSIHKMLKNPFYYGVMRVKGQEYPHIYEPIITKHLFDKCQEVMASYKKSSAKKAAKPFSLKGILTCAQCGCTITAELKKGRYTYYSCTNGKGTCKRIYVREEELLEHVYKLLKGLRLPDDAISYLKIELKRTEDSEQLFHKNNMKALKTQYDRIETRVSKMYDDKLDGGITTEMYDKKLKEYKSEQKELLDEMQKHNYADESFYSAASTLLDVASRAYEIFDSSEPLEKQTLLGFLLQNSLLDGKKLTLKLKEPFNLLQKINLEQNEKPAYSADHSVWLPRRDSNPRSPN

SEQ ID NO: 6792 - protein, 558 aa, synthetic construct
MTKLYSYIRFSSMRQSDGSSYERQIRMAKEIADRYNLELVNDYQDLGVSAFKGANSKTGALSRFLDEIGRSIPVGSWLFIENLDRLSRQDIISAQELFLSIIRRGITIVTGMDNKIYSIETVTANPMDLMFSILLFIRGNEESQTKRNRTNSSALLKIKAHQQNPQNPAVAIEEIGKNMWWTDTTSGRVLPHPVYFPVLQKIVQLRQEGHSAGAILDYLNEHHEPPAPTSNKKHGKWSRAMVSRLFATKALIGVKTVNVDGVEYELRDYYPRVLSDSEFYFLRKNIIKKAWDYNHDKEKVIPLLSGIGVLRCVHCGATMVKQTAANGKREQYRYCCDGRKSGRTDCPYPNWGFRAVTLEGAVLQLLADKIWIAEDKTNPIPEIQVKIDEISRKIDNLINLSAMMGATKELANQITDLNSQRESLHEEIRLFEREMYSVDSQGWDKLAQFDLSDVQNEERLKVRMKIKGALHEIECSRIDSKKNLFVLVYLDGLRQRLVIENNRGLKKGQIFVDLKTINDRQILESAGMVLHPCIEMIIDSDWKAPEEIPGLLSEEFGI

SEQ ID NO: 6793 - protein, 507 aa, synthetic construct
MKRVISYIRFSSEKQAKGDSLRRQSKMVTDWLKAHPEYYLDQDLSFRDLGVSGFTGKHLKGGLGDFLTAIEKGLVKAGDTLLIESLDRLSRQDVDQASELLRNILRSGVDVVTLSDGEHYTRESLKDPLALIKSILIMQRAHEESLRKAERIQAAWDAKKEAAKAGIKISRRCPAWLRLNDDRKTFSVIPEKVATVKRCFQLRLEGKSIWEIVRTLNAEGHQTLNQYKAGSFGQSSVQDLLKNRSVIGYFTPKGCEEISSYYPSVIDETTFYKVQQLSHSRYGRKPVSDKPLSVNLFKGVIRCSECGHALIITGFSDTRNGIYRCPLRNENRCSAKGLSRKQTDGTLLTLLSRLDRFDSDMTNTIDTLKLHREHISSNIEKLVQLSLEIEDLSAITSKLKQLKGELSQVDADIEKETQRLKSIDVGCLSDCDLTTKAGRIEAQLIIKSAVKEVVLNTAKRRCKVTFHNSKSITLPITENPSEDVTEAIQSLSEVTEKGLIDVDVVEI

SEQ ID NO: 6794 - protein, 586 aa, synthetic construct
MQEVEVIKAKNVLSRQARGKAIERLRVAAYCRVSTDSEDQLNSYKSQVQYYTDMIKKNKEWVLADIYADEAITGTQVTKREDFQRMINDCMNGEIDMVFTKSISRFARNTLDTLKYVRMLKERNIAVYFEDEKINTLTMDGELLLVVLSSVAQQEVENISANVKKGLKMKMKRGELVGFQGCIGYDYHPEDKTITVNQEEAEIVRYIFNRYVDGAGGSVIGQELESLGYKTKYGSSTWAPSTVIGIIKNEKYKGDILLGKTFTVDPISKRRLENMGEEDKFYMKDHHEPIISEEVFEKAQEILNRRNKNRTTVGSGKREKYSRKYAFSCMLECGFCGGTLTRRNWHSGSQYSKVIWQCVTATKKGKKFCKHSKGIPETAIEEAFVESYRLLCDDNKDVLEEFLQRMDDTLSSSVVSKQLAKAEKEIDALEKKKSKLVDMRLEEIIDKETYESKYADLVSKQEQLVEERQKLQETSDNEKDIKKRLKEFKKTLEQNEVLDKFDRYVFESIVEKVIVGGLDENGNVDPAQLTSVYKTGLKNSVDGAKFKPQRKNARGRHRTNELCSHDSNEVDKMCSDSSNDTCGNCS

SEQ ID NO: 6795 - protein, 534 aa, synthetic construct
MSDICNERKWGEIVKKVTRIDGMSNPRFSNNKLRVAAYARVSTDSDEQLESLKAQREHYENYIETNPEWEFAGLYFDEGISGTKKEKRPELLRMIRDSENGRIDFIITKSISRFARNTMDCLELVRKLIDIDVYVYFEKENLNTGDMEGELMLSILSGFAAEESASISQNMTWSIQRKFQNGSYINGSPPYGYANVNGNMVIVPEEAEIVKRIFSECLSGKGGNLIAKGLNKDKIPAKRGNHWSSGTIIEMLRNEKYKGDVLFQKTYTDGSYNRHPNKGEKDQYYCKNHHEAIISKEVFSKAQKLISQRRKSRSKNTKSKAYQNRYALSGRIICGECGSKFKRRTNYSAGRSYIAWSCKGHIEDKNSCSMLFIRDGEIKATFATMMNKLAFSRKIILEPLYKTLSQIDEKSDLERVAVIDKRLEQLTEERNTLIGLMTKGFLEPVLFNKEKNALEIEINSLTTEKTNLVMSFTDGTSQADEVKELLDYVSGKAFIGEYTEEAFEKYVENIIVNTRDELTFKLKCGLSLKEEVVR

SEQ ID NO: 6796 - protein, 565 aa, synthetic construct
MTQNRNSSAMNPRVRVIPANMNMQRRGEGEEEPKVKVAAYARVSTLEEEQQSSYQLQVSYFEEYIERKPDWELYKVYSDEGVTGTNTKYRTGFNQMIKDAKEGKFDYIITKSISRFARNTLDCLTYVRMLKNLDKPVGIIFDKEGINTLDSQSETILVVIASVMEEESRTISANVSWGVQKRFSRGIPHIPTTYFLGYDEDEEGNLIINEEEAKIVRRIYREFLSGKGTPLIAKGLTKDKVKTARGNTKWTSDSVLKLIKNEKFCGHALCQKSVTLDPLTHKRVRNKNHKPQYFIRNNHPPIISEEDWNAAQKELERRSRMRHDPDGKYRRCYSNTAPFSNMLFCGECGVPVHRRRLTSKKNGQSYKFTVWQCRVSAMKMEADYECHTKYIWEEVIERAYNEMLLKMTKEIDQIRMEGEAAIREVSLSEEENARLEEVEEIIDRISDQITEMSMRESITNDPIYDATLRNLIYESQIYQQEHENLLKNKEESIFMKKNLDILIEYLQGLQDFETFDAKMFRETVERGLIYDDYQMEFIFKCGVKRKALGWRRGKDPVEPLGLDTL

SEQ ID NO: 6797 - protein, 539 aa, synthetic construct
MNRARVQVVPVQQPSVSVINNVDLHTSMGHVKPHKPRVASYCRVSSEEELQLGSLENQIIHYTNYIRSKPEWLYAGVYSDKGKSGTDMSKRTGFNRMIRKAMNGEIDIIICKSISRFARNVVDTLDIVRQLTEKGVQVIFEKERLNTKDITSSLLIKILATFAEEESRSTSENIEWALRKRFERGEVVAAQLFGYKTKKNKEWEIVEKEAAIVREAYAMFLSGYNLTDIAQHFIRRGYKKRSGEIDWTASNISSFLTNERYCGDALSRKTCTLDFRSHKTVVNRGHKPQYYVEDHHEGIVSKEDFQKVQEIMNENKTTQSNKGRYKRSAITSRIVCASCGKNYHRFGQKGKITRWRCSSNAKSGLLCKAQPIEETKIEELLIEGFEKRYGMDQRTNDGLLIKQLIKELSSAETVREREQNLLRVELEKCLIAENNAILKNLDVEDIKAKRKEVEETIAEKTKLWEAFDKDHVFREASLNKLKTLKGSDKAIYKILDISFIRAWVIHITVESPFLFTIKWIDGEETVVGQFRGGMYYDAK

SEQ ID NO: 6798 - protein, 588 aa, synthetic construct
MKEVEVIKARNDLQTRTRGKTIEFMRVGAYCRVSTDSADQLNSYKSQVAYYTEMIKKNKEWVLVDIYADEAITGTQVTKREDFQRMINDCMNGEIDMVITKSISRFARNTLDTLKYVRMLKERNIAVYFEDEKINTLTMDGELLLVVLSSVAQQEVENISANVKKGLKMKMKRGELVGFQGCLGYDYHKDTKTITVNEEEAEIVRYIFNRYIEGAGGSVIAHELENLGYKTKYGSSTWVQSTVIGIIKNEKYKGDLLLGKTFTVDPISKRRLENFGEEDKFYIRNHHEPIISEEVFEKAQEILARRNVNRGKTGEGNTKREKYSRKYAFSCMLECGFCGGTLTRRNWHSSSQYSKVIWQCVTATKKGKKFCKHSKGIPETAIEEAFVESYRLLCDDNKDVLEEFLQRMDDTLSSSVVSKQLAKAEKEIGALEKKKSKLVDMRLEEIIDKETYESKYADLISKQEQLVEERKKLQETSDNEKDIKKRLKEFKKTLEQNEVLDKFDRYVFESIVEKVIVGGLDENGNVDPAQLTFVYKTGLKNNVDGAKFKPQRKNARGRHRTEELCSHDSNEVDKMCSDSSNDTCGNCS

SEQ ID NO: 6799 - protein, 537 aa, synthetic construct
MKAAIYSRKSKFTGKGESVENQIELCKSYAKNNGYDDIYIYEDEGFSGGNINRPEFKSMMKDAAAKKFNAIICYRLDRISRNVSDFSTLIDELKVLGIDFISIREQFDTSSPMGTAMMFISSVFAQLERETIAERIKDNMYELAKTGRWLGGTPPFGFSSEPIYYLDNNSKQKKMMKLSPINEEISLVKLLFEQYLTLGSLGKLQKYLIQNDIKTKRNSAWDIKALQLLLRNPVYVKSSELVISYLSIKGATVFGDPNGNGILSYNKKDSKDKYKDISEWILSVSKHEGVIDDNLWIKVQRQLDKNKDLAPRLVNGSEYGVFNSVLHCAKCGGKMIQKQGHVSRKTGEILRYYICINKINPSDNTCDSKNIRLDKLEKSVMKELFKATDDKGSLIKAIEEYKKSLESEAVDKSSIKSYEKQISQKELQVKNLIDKLSLNPNIYDLLSSRIEELNKEIKELKFKKFELENTNSNLKTAIKEINASTSMLLNFKKLWENADYSMRKLLINSFIDYISYNSDTQEVVIKPFCTNKKKGAL

SEQ ID NO: 6800 - protein, 505 aa, synthetic construct
MPTIKIIDKRPENKLKVAAYCRVSTSDADQLASLDNQKKHYEEYIRAHPEWSFVGVYSDDGISGRSINRRDGFKQLVSDAIAGKIDFILTKSISRFARNTLDCLETVRTLAVKGIYVKFEQDNINTKDMDAELYMSVVSALAENESKSLSENIKWGIQKRFQDGTYKMVSPPYGYIYEEGVIKLDNEKAEIVKKIFTCGLDGLGGYAIAKKLNELSIPSPRGKKWDASTVKRIQNNIFYTGNIIFQSTYIGSDGKRHKNKNNVDAYYCEKHHDAIISQEVFDRLQKLAELREEAKEAPTKYKKRYAFSGKVCCGECNSVLRHKIQHTGDIKYPLLACPEHIRDKSKCSMKAIKEAALKDAFCTMVNKLICIKNRVLKTMLSDLSNTEIPHCENNESELDRLNSQEALLLEMQAKHNLSSSVILPELIKISKARDKIRVGENIRSKVDRKTALRELIGICDKKGVQKEFSDNIFTAIVDRVVVLSKKEIIFELKCGLRLRERLVRA

SEQ ID NO: 6801 - protein, 518 aa, synthetic construct
MARITTIPATRPLHGDIPPIAFKEMPKKRVAAYCRVSTDSEEQATSYDEQVRYYTDLINKEPQWELAGIFTDDGISGTNTKKREGFNKMIESCMSGNIDLIITKSISRFARNTVDCLKYIRMLKEKGVEIRFEKENIRTFDSQGEIMITIMASLAQQESESLSKNVKMGLKFRYQRGKISINHNWFLGYTKDEEGNLVVDPEQAEIVKRIYREYLDGSSMDQIKAGLERDGIKNGAGRKKWGTSNIRQILTNEKYVGDAMLQKTITVDVLNKTRIPNDGREVQYYIEDHHEPIISRAVFSRVQEEIQRRAEMKKMKRSYSAKHGLSNVCKCGNCGAVMNRVHWYIGGKKIMWRCRNRMDNGVDVCDLKSIDNRIVEDAVVKAINSLIEKRQDIMESVKANILKVVGTKGNSLTGTLDLRIKDLEQQVVDAVKSGNACGALLEKIDNLKEERSRMIKTDVDCKQEGELLSWIRDFLDSQSDGIKEYDDSLTRKLIRDIIIYEDKIEIVFKHGQMVEIEI

SEQ ID NO: 6802 - protein, 533 aa, synthetic construct
MDTGIIHRVALYARFSSDNQRTESLDAQIRAMKKYCREKHYLIVRTYTDSAKSGTTDKRPGFQQMIADSAKKEFDIILCHKLDRFARNRYDSAYYRKKLRKNNVSVYSVLENLNDSPESIILESLLEGMSEYYSKNLSREVQKGLKENALKCKHTGGLPPLGYSINEEKLMVINEDEAPIIRLIFDLYDKGFQYTYIMKKLYDLGYKTRRGNDFNKNSLHEILRNEKYCGTYFYSRTAAKSSDNKRNGHKYKPADQIIRIEDGCPAIIPKEQFLRVSKRLATKKYHQCGNNGREYYLLRGKVVCGVCGNRMSGSSRYSGNKKYYQSTYRCQKIRQICGNREINRIYLDQFVNQYMKEKIFTLESLKRIKTAYDVSIKERTMKRESDIGDLKVQVNSINNQIDSIVSIVEKGIINENIYAKLDSLNKRKQELEQNLHILSAFPVSNIAWSPEEVMEEFQRAEYGTEEYRNILQRFIKEVRVFPYEVQITLKAGEIDDRDIPGYLGQDFQIIISRKELYTKFGSKVVKATKERGA

SEQ ID NO: 6803 - protein, 747 aa, synthetic construct
MSKEKIKVYLYTRVSTSIQIDGYSLEAQKSRMKAFALYNDYEIVGEYEDAGKSGKSIEGRVQFTRMMEDIKSGKDGVSFVLVFKLSRFARNAADVLSTLQIMQDFGVNLICVEDGIDSSKDAGKLMISVLSAVAEIERENIRVQTMEGRIQKAKEGKWNGGFAPYGYQLIDGKLIINEEEAIAIRTIFDQYVNTSIGANGLSKYLENHGIRKIPRQNGKNPLFDAGLIRKILKNPVYNGKIAFGRRTLEKVHGTRNEYRQVEQDDYLVAEGIHEAIIPDELWQAAQVKLKAQAKKYEHVNKGKNMRTHLLSGIVKCPICGAGMFGNKSIKYKKDGTKYKDFYYYGCKHRLMNRGHKCTYNKQIREELLDDAVAEVIIKLVSNPKFASMIQEKINMKVDTSAIENEIDNYQNELRKSHSTKYKLIEEIDNLDVEDKHYKRRKNDLDDRLYRMYDKIEELESQLIEAKAKKETIEVEKLTGDNIYKVLIYFDKLYKVMNDVERRQLIEALISEIQIYEEKQPNGQWLKSITFKLPIIDEDLNISLENDEQVDTLVKIGREHRVSDLVDCFNMARRMGFDNINMDIILGLIDEELNMVKNTLEEIKKLSPESLTVHTLAIKRASNLNINMDRYKEHLTQYEEMVKMIDLSMKYAKDMGLNPYYMYRQKHMLGNLENIGYAKEGYECIYNIQIMEEKQSNYALGAGAISKFVYVDEDRIERVENVKNVEQYIERVDEMIKRKKEEVYKNVD

SEQ ID NO: 6804 - protein, 540 aa, synthetic construct
MKQPYNTTIYNTALYMRLSRDDELQGESGSIQTQRMMLRQYAAEHGLNVIDEYIDDGWSGTNFDRPDFQRMIDDIEDGKINCVVTKDLSRLGRNYILTGQYTEIYFPSKGVRYIAVNDNVDTINGENELAPFLNILNEMHARQTSKKVKAAMRTRFANGAHYGAYAPLGYVKDPDKKGHLLIDPETRWIIEKIFDLAVHGRGAASITRILVEEKVPTPGWLNFQRYGTFANIYAGAPEEKAYAWTIAQVKSILKEETYIGHSVHNKQTNISFKNKKKVRKPKEEWYRVENTHEAIISEDVFRQVQEQICNRRRRQKNGTTQIFSGLVKCADCGWSLAYGMNSQNKNPYAHYHCSKYGQGLHQCSMHYIRYDVLYAYVLSRLQYWSVLAQQDGDKLLKRLLNASDKERNTARKRQTAELKKAEKRKAEVDTLFAKMYEDWSAGRITEYNFNMLSEKYQGEQRELDAKIERLHEAMEVAAQTAVDAEMWIGLMKQYVNPTELTAELLNTLIEKILVHEAVKSEDGSREQEVEIFYRFIGKIE

SEQ ID NO: 6805 - protein, 528 aa, synthetic construct
MQGNKVVTVIPQKKKVKKDTHGQDTKKRRVAGYARVSTDLEQQQNSYQTQLEYYKTYINSRPDWEFAGMYSDEGITGTSTKRRDGFNHMIEDALAGKIDLIVTKSVSRFARNTVDSLSTVRKLKDAGVEVYFEKENIYTLDQKGELLITIMSSLAQEESRSISENTTWGQRKRMADGHGCIGFSHFLGYDRGPDGEFVINEEQAKIVKRIYNEYLDGKNTSQIARDLSNDGIKTVTGKDRWHPTTIISILKNEKYIGDCLMQKFYVEDFLTKKMVRNQGELQQYYVKGHHEPIISEEVYNAVQRKMKAIQKKKHQSGARDFSSMVICGDCGSYYGSKVWHSNDKYKKIVYRCNKKYNGDKCNTPAVDEDRLREVFIEAINKLLENKGEIVSNMERALAIKNETNYEEIIRRAVVELDKAEAAFRALIDRQKVTPIAFEEYEKKIRTAGKRYDKAKEEYDRLLEESQNRTRSIYEIEQFIKSLVEQNEVIVNYDYGLMKRTVKQITISNNSGAIFEFYDGSEIAVDKVR

SEQ ID NO: 6806 - protein, 400 aa, synthetic construct
MQITKLLLKKKEVSRRKVAAYARVSKDSDMLLHSLANQVSYYSELINSNPEWEFAGIYVDEGISGTKLKNRDGFLRMMEDARRGKVDLIITKSVSRFARNTVDLLQSIRDFQELNVEVRFEKDGISTFDGEGELMLSLIASFAQAEAESISENVKWGKRKQMQEGIYHHSSRCYGYEWQGDNFVIVPEEAKVVRYIFESYIAGMSPKHIAESIKATTTTGAPFSRIAVKDILKNQIYTGDRVLQKFYSPKVRKKTRNYGELPQYVLEGVHEGIVSHEIFDQVQEIMRERAEKTPKKTFTCFTGKVKCGHCGRSCCRRTIRGKRIWKCQGNEISKVCDARYIGEDELRSITFTILDDEDDFVRKVDRIDLYNDHVAFIMAEGKTIKRTRKTGRRHQKNAGK

SEQ ID NO: 6807 - protein, 551 aa, synthetic construct
MKPNLKSEPQVQRAVIYCRVSSVKQVEEGHGLQSQETRCRQYALEKGYSVEAVFPDGVSGGGDFMKRPGMVALLAYLEAQAGQKYTVIFDDLKRFARDTEFHIKLRRELAARSASVECLNFKFEDSPEGRFIETILAAQGELERAQNGRQVSQKMKARMMNGYWCFHAPSGYRYAKTKEHGKLLVRDEPLASVVQEMFERLANGSLQTVTEAVAFLGAQAGWRSLRSSAVNYQTIYDMLRRPLYAGYIEMATWDIPLQRGKHEPLVSFETWQKAQERLKGTTYAAARNDISDDFPLRGFVNCAKCDCAYTSGWSKSRDGTRHAYYRCKNNKCVSYGKSIRKAQLEGDFEAYLHSLEPQAGLLGLFKRMFNDAWSLRLSQADKIASKYTEKAQLIQTKIDSLLDRLVDVETATVVKAYESKINSMEREKLIALEKAQTLAPSTDTFDELFEHALTFLKNPAKLWASGIFELQRLVMRMAFSDRVGYCRETRSLNTKLSLPFSMLTHDYVGNERMVGDTGIEPVTPSMSTKCSPAELIAHPWRDTPHKAVCRQ

SEQ ID NO: 6808 - protein, 548 aa, synthetic construct
MTKKVAIYCRVSTVEQAEEGYSIDEQRRRNIEYCEKEGHEVFKVYEDRGISGKNISGRPGLKELLQDANSGKFDLVIVWKLNRISRKLIDILNIVDTLDKNKIAFRSLTESFETETPAGKLQLNIMGAIGEFERGTIAENVKMGMMARAREGKWNGGKVLGYDIVEIPSEGKKRKDTKLVINEKEAMTVRRIFELYSEGHGYKATVNRVNKEGHRSKKGNAFATATIKEILKNPVYIGKIRYNLRQDWNEKRRKNINPDPILVDGEHDAIIDTETWERVQIILKDRSKTHNRVYDSELILSGLLKCPVCGASMTVSRSTRKRKDGTKAVNEYYSCGNWKNKGTAVCNSNSVKAEVADEVVINKLIETVNNELLLKKVINNINKNKSSKLKPKLDEMNLVNKEIDKLNGKKNSSIELFEDGILAKSELAERVKKLNEEIDTLKFRLDEIKQDVMLAEGEPIPFELVSQVMKKFGEVFKESSTRQQRKQLLNLLVSKVTIDKSRKIDTIELQINEDVIRYLVKEGSSEEDEDPSFFHVSMFNCTTLKFVI

SEQ ID NO: 6809 - protein, 532 aa, synthetic construct
MKAAIYSRKSRFTGKGDSIENQIQLCIDYAKSIGVKDFLIYEDEGFSGSNIDRPQFKKMMQDAKDKKFSYLVCYRLDRISRNVSDFSTLIEKLNELNISFISIKEQFDTSTPMGRAMMFISSVFAQLERETIAERIKDNMYELARSGRWLGGNTPHGFNSEKITFLDENLKERSMYKLQVNDEQMEIVKLIYNKYLELRSLSKLYKYVYNNGIRGPRGGKFDPSSLSRILRNPAYVKANDEILDYLKNSGMDVVGTPDRKCGILTYAKNTSNSIAAIAKHHGVIEPEIWLEVQNQLDKNRDKTPRISTGKTALLSGLIKCGKCGSNMRITYKGKKTDKDLKYYYICGTKKTLGSDSCNCKNLNGPLVESLVIDKIKNCKEESIISAFNSNNIKTDNVFNIFKSETNLLKNQILDKERLIKNLVIELAKNTGSTASDYIVSQIESLNNEISILKDKINTLESGNINISSDSINIDIIVSNLKRFNDEVDNASLDDKRLLLSTIINSIVWDSSLGNLNIVYMGAEVDNSVSLSN

SEQ ID NO: 6810 - protein, 393 aa, synthetic construct
MNRSGKKCVLYPRVSTEMQVDGFSLDGQKNSLKRFADREEMEIVNIYEDAGKSGKSTEGRPAFMQMLSDIENGLGIDYVLVYKLSRFGRNAADILNSLEHIQSFGVNLICIEAGIDSSQTSGKLLISVLYAVAEIERENIIEQTMNGRKEKARQGGWNGGFAPYGYFLKDKQLFIQEDEAEAVRIIFDKYVNGNMGFYKIANYLNLQGIQKVKRDNGTLTQWSTHFVRMIIDNPVYMGKIAFGRRTREKVKDTKNEYRQVHQDDYILADCQHDGIISEELWTQAHEKREITGVKAPSKIGRDRAHLLSGILKCPKCGGPMYTNKHAWTNKDGTYKEIYYYVCSKARTTRGKSCDYKAMLKKTDIEPLVVEAIRDLIKNEDFAAEIKSKIGKHA

SEQ ID NO: 6811 - protein, 558 aa, synthetic construct
MNREGKKCVLYPRVSTEMQVDGYSLEGQKNSLKRFADREEMEIVGVYEDAGKSGKSIEGRPAFKKMLSDIKNGLEIDYILVYKLSRFGRNAADILNSLEFVQSYGINLICIEEGIDSSQTSGKLLISVLSAVAEIERENIIEQTMNGRREKARQGGWNGGFAPYGYYLENNQLLIEETEAKAIRIIFEKFGNSDIGLGGVAKYLNLQGIKKIPRQNGKLETWSSHFIRQILDNPVYCGKIAYGRRTREKVKGTKNEYKQVHTDDYILEDGQHEGIVSAELWEKVRAKRIATGIKQPSKVGKDRSHLLTGVLKCPMCGSSMYTNKHAWTNKDGTYKEVYYYICGRNKQERGHHCDYKASLRKTDIEPLVIEAVKELVSDKYFAREIKSRIGIQTDTGNVDKEIANYESKLKEVDLNKARLEREIDNLPADARYRERKIHDMTLRLDGLYDTIVELEERIEDAKLRRSSIEMEAITLENVYKIMKNFGKLYAIMSDEEKKSVISYLIKEIQIYPNGESEMPLKSIEFNFPIYRDGKEVRKVLWERGNTVETCVLLQRRTM

SEQ ID NO: 6812 - protein, 588 aa, synthetic construct
MKKEVKVIKGDTTLKRTASGCVERSIKRVAAYCRVSTDTEDQINSYNSQVEHYTEFIQKNNEWTLAGIYADEAITGTQVDRRIDFQRLINDCMNGDIDMIITKSISRFARNTLDTLKYVRKLKEFNVAVFFEEENINTLTMDGELLLTILSSVAQQEVENISANVKKGLRMKMERGEMVGFQGCLGYDYDPETKSISINEKEAEIVRYIFRRYIEGVGGMVISRELEEQGYLSPRGNKRWTETTVLGIIKNEKYKGDLMMGKTYTVDPISKRRLDNFGEQDKFYIENHHEPIISEEDFEKAQGIRLRRSKNRNTVANNGGKREKYSRKYAFSSMLECGFCGHNLSRRNWHSSSEYTKVIWQCVNATKNGKKYCPHSKGIEEEAIEKAFMESYRQVCHNNVEITNEFLKTVEEELKDNSLAKDLKKITNQLDKVLKKEKDLVELRLNESISMDVYQDKYNEIAISKEKLLAEKRTLEVTLTDEKALKKRLEGFKKLLESNKYLEEFDRAVFESIVDKIIIGGTNDEGEIDPAMITIIYKTGKKDSQDGRLFKSRRKNAKEVDEKTDNKLYPQSSDEVNNLCSYPMDNTL

SEQ ID NO: 6813 - protein, 415 aa, synthetic construct
MKEVEIINKNNHLENRRRGKYIDRKRVAAYCRVSTDSEDQLNSYKSQVSYYTDLINNNIEWCMVDIYADEAITGTQVNKREEFQRMINDCMNNEVDMIITKSISRFARNTLDTLKYVRMLKEKNIAVYFEDEKINTLTMDGELLLVVLSSVAQQEVENISANVKKGLKMKMRRGELVVFQGCLGYDYHKEDKTLTINEKEAEIVKYIFNRYIEGAGGSIIGQELENLGYKTKYGSTTWSNSTVLGIIKNEKYMVDVLLGKTFTVDPISKRRLDNLGEEEKYYVKNNHEPIISREIFDKAHEILNRRSKNRGKYEGEVTKREKYSRKYAFSCMMECGFCGGTLTRRNWHSGSEYSKVIWQCVVATKKGKKYCSESKGIPERVIENAFVESYRLLCDEKKSVLEELLSRINDTVGSS

SEQ ID NO: 6814 - protein, 548 aa, synthetic construct
MSKRIAIYCRVSTVEQAEEGYSVDEQRRRCIEYCEKEGHEVFKAYEDRGISGKNISGRPGLKDLLKDANDNKFDLVIVWKLNRISRRLIDILNIVDILDKNKIAFRSLTESFETETPAGKLQLNIMGAIGEFERGTIAENVKMGMIARAREGKWNGGKVLGYDIVEISSEGKKRKETKLVINEKEAMTVRRIFELYSTGHGYKATVSRVNAEGHRSKRGNPFATATIKEILKNPVYIGKIRYNLRQDWNEKRRRNINPDPILVDGEHEAIIDTETWEKVQIILKDRSKTHNRVYDSELILSGLLKCPVCGASMTVSRSTRKRKDGTKAVNEYYACGNWKNKGTAVCNSNSVRAEVADEVVINKLIETVNNELLLKKVINNINKNKSSKLKPKLDEMNLVNKEIDKLNGKKNSSIELFEDGILTKNELAERVKKLNEEIDTLKFRVDELRQEVMLAEGEPVPFELVSQVMKKFGQVFKESSTRQQRKQLLNLLVSKVTIDNSRAIDTIELQINEDVIRYLVKEGSSEEDEDSSFFHVSMLNCTCLKFVI

SEQ ID NO: 6815 - protein, 560 aa, synthetic construct
MSKEKIKVYLYTRVSTSIQIDGYSLEAQKSRMKAFALYNDYEIVGEYEDAGKSGKSIEGRVQFTRMMEDIKSGKDGVSFVLVFKLSRFARNAADVLSTLQIMQDFGVNLICVEDGIDSSKDAGKLMISVLSAVAEIERENIRVQTMEGRIQKAKEGKWNGGFAPYGYQLIDGKLIINEEEAIAIRTIFDQYVNTSIGANGLSKYLENHGIRKIPRQNGKNPLFDAGLIRKILKNPVYNGKIAFGRRTLEKVHGTRNEYRQVEQDDYLVAEGIHQAIIPDELWQAAQVKLKAQAKKYEHVNKGKNMRTHLLSGIVKCPICGAGMFGNKSIKYKKDGTKYKDFYYYGCKHRLMNRGHKCTYNKQIREELLDDAVAEVIIKLVSNPKFASMIQEKINMKVDTSAIENEIDNYQNELRKSHSTKYKLIEEIDNLDVEDKHYKRRKNDLDDRLYRMYDKIEELESQLIEAKAKKETIEVEKLTGDNIYKVLIYFDKLYKVMNDVERRQLIEALISEIQIYEEKQPNGQWLKSITFKLPIIDEDLNISLENDEQVETIVLIQKKNS

SEQ ID NO: 6816 - protein, 515 aa, synthetic construct
MYRPQELDVFIYLRKSRKDLEEEKKALEHGQHYDTLERHRTQLLELAHKEQHNIIDIFEEVVSGEYISERPMMQKLLREVETGIADAVLVMDLDRLGRGDMVDQGTIYRVFRYSETFIITPTEVINPNDENQELTFSIKSLIAREELKTIVKRMQRGRSASAKEGKSISRVPPYGYLRDDNLKLYPDPERSWVIPKIFEYMADGMGRQAIAQKLDRLGISPPEGEYWNPSTISSIIKNEVYLGHIIWGKIRYIKQNGKYIRKKVSKERWQRHNHAHPSLVSEELFQKANMAHSKRWRPPTTKTKKLSNPLAGILLCELCGHSMLYQPRKDRPNPQVRCVQPSCKGIQKGASLVLVEQRILDGLKQIIESFEIQENMVQKKKKENNIQLQQKNLEKKEQQVNDLQKQKSNLHDLLEKGVYDIDTFLERQKSIVIRLKTTQEEIEQLEHEFKHVLERERHIHEFVPKTKNVLEAYHATEDIEKRNRLLKSVLEKATYLRKKSWQRKDEFVVELYTRI

SEQ ID NO: 6817 - protein, 522 aa, synthetic construct
MKLSHILQPNMKAAFYGRHSTDKQDMDMQLNSVMEVIRKYDCIHTHSFLDKAVSARKNKITSRKELENMFEAAKRKEFDFVIVYKSDRLARDPLEHQTIRIVMKTLDIPIIISSTESVYNTDTDLIVQLMEDGFTKYEVDTIIARTRSGLENKAKQGKWLGGKPPFGYTYDKNSGQFIEHPEELCHVKEIFNLYLNGHGFQHIANTLPNGSRRGKDWGKENVKAIVLNPFYCGLLSWRRQTDGKQNARDIWIEAPNYYVKPIISRTTWESCWRIYSEKRNGNMVPKHYKTSFLLQGLLSCEKCQELMKTKNQQTVSSTNKQYGGKIYFCTNCKLRIDADLLHDKVVNQTLTDVKISGFQNVYHAIEQKIQYEIQELNNNIQKHQHLFENYTIKLHNITEELKQRMKNNDDKRFLKSLAIYRLDVQRKLDGIIQQMNDFKQQITLKEKIEKSKETWLHTLNEVFQDDVKLQEISNMDKRRFLLPLIQSVSIKENKKHNEYDISLQLRTDFSKRDVQNQISLIL

SEQ ID NO: 6818 - protein, 403 aa, synthetic construct
MNRSGKKCVLYPRVSTEMQVDGFSLDGQKNSLKRFADREEMEIVNIYEDAGKSGKSIEGRPAFMQMLSDIENGLGIDYVLVYKFSRFERNAADILNSLEHIQSFGVNLICIEEGIDSSQTSGKLLISVLSAVAEIERENIIEQTMNGRKEKARQGGWNGDFAPYGYFLKDKQLFIQEDEAEAVRIIFDKYVNGNMGFYKIANYLNLQGIQKVKRDNGTLTQWSTHFVRMIIDNPVYMGKIAFGRRTREKVKDTKNEYRQVHQDDYILADCQHDGIISEELWTQAHEKREITGVKAPSKIGRDRAHLLSGILKCPKCGGPMYTNKHAWSNKDGTYKEIYYYVCSKARTTRGKSCDYKAMLKKTDIEPLVVEAIRDLIKNEDFAAEIKSKIGKQIDTSTLDRERT

SEQ ID NO: 6819 - protein, 532 aa, synthetic construct
MKAAIYSRKSRFTGKGDSIENQIQLCIDYAKSIGVKDFLIYEDEGFSGSNIDRPQFKKMMQDAKDKKFSYLVCYRLDRISRNVSDFSTLIEKLNELNISFISIKEQFDTSTPMGRAMMFISSVFAQLERETIAERIKDNMYELARSGRWLGGNTPHGFNSEKITFLDENLKERSMYKLQVNDEQMEIVKLIYNKYLELRSLSKLYKYVYNNGIRGPRGGKFDPSSLSRILRNPAYVKANDEILDYLKNSGMDVVGTPDRKCGILTYAKNTSNSIAAIAKHHGVIEPEIWLEVQNQLDKNRDKTPRISTGKTALLSGLIKCGKCGSNMRITYKGKKADKDLKYYYICGTKKTLGSDSCNCKNLNGPLVESLVIDKIKNCKEESIISAFNSNNIKTDNVFNIFKSETNLLKNQILDKERLIKNLVIELAKNTGSTASDYIVSQIESLNNEISILKDKINTLESSNINISSDSINIDIIVSNLKRFNDEVDNASLDDKRLLLSTIINSIVWDSSLGNLNIVYMGAEVDNSVSLNN

SEQ ID NO: 6820 - protein, 586 aa, synthetic construct
MNDVQVIKANRNENRIRGRKVEILRVAAYCRVSTDSEDQLNSYKSQVMYYTDLIKKKPEWSLADIYADEAITGTQVTKREDFQRMINDCMNGDIDMIITKSISRFARNTLDTLKYVRMLKEKGIAVFFEDENINTLTMDGELLLVVLSSVAQQEVENISSNVKKGLKMKMQRGELVGFQGCLGYDYHKDTKSISVNEKEAEIVRYIFNRYIEGAGCTVIANELENLGYKTKYGSSRWVQSTVIGIIKNEKYKGDLLLGKTFTVDPISKRRLENFGEEDKFYIRDHHEAIISEEIFEEAQKILAKRNVNRGVHQEGQKRNKFSRKYAFSCMIKCGFCGGTLSRRNWHSSSAYTKTIWHCVTATKHGKKNCPHCKGIPEEVIENAFVKSYQLLCSDQHEVVSEFLQKVEDILKDDASLKRLPKIEKEMADLRRRKEKLLDLRLDNNIDRDIYDKKNQELSEQLKKLQAEQLQLVELSKNQESTKTRIREFRKNLNSGELLESFDRVVFESVVERIIIGGYNDEGVEDPLKITFVYKTGIHSNLNAKDFKPKRKNAVAVHTDAELCSYASAEDNKLCLHSSSDTCGNCS

SEQ ID NO: 6821 - protein, 515 aa, synthetic construct
MYRPQELDVFIYLRKSRKDLEEEKKAMEHGQHYDTLERHRTQLLELAHKEHHNIIDILEEVVSGEYISERPMMQKLLREVESGIANAVLVMDLDRLGRGDMVDQGTIYRVFRYSETFIITPTEIIDPNDENQELTFSIKSLIAREELKTIVKRMQRGRRVSAKEGKSISRVPAYGYLRDNNLKLYPDPEKSWVIPKIFELMANGMGRQAIAQELDRLGISPPEGEYWNPSTISSITKNEVYLGHIIWGKIRYTKQNGKYIRKKVQKERWQRHDHAHTPLVSEELFQKANIAHSNRWRPPTIKTKKLSNPLAGILLCKLCGHSMLYQPRKDRPNPQVRCVQPSCKGVQKGASLALVEQRILDGLKQIIESFEIQENMVQKRKPKNNIQLHQKALEKKEQQINDLQKQKNKLHDLLEKGVYDIETFLERQSSIVIRLKSTQEEIEQLEHEISCLLERERHIHEFVPKIKNILEVYYATEDVEKKNRLLKSVLEKVTYLRKKSWQRKDEFTIELYTRI

SEQ ID NO: 6822 - protein, 522 aa, synthetic construct
MKLSHILQPKMKAAFYGRHSTDKQDMDMQLNSVMEVIRKYECIHTHSFLDKAVSARKNKITSRKELENMFKAAKRKEFDFVIVYKSDRLARDPLEHQTIRIVMKTLDIPMIISSTESVYNTDNDLIVQLMEDGFTKYEVDTIIARTQSGLENKAKQGKWLGGKPPFGYTYDKNSGQFIEHPEELCYVKEIFNLYLNGHGFQHIANTFPNGSRRGKDWGKENVKAIVLNPFYCGLLSWRRQTDGKLNARDIWIEAPNHYVKPIISRNIWEACWRIYSEKRSGSIVPKHYKTSFLLQGLLSCEKCQELMKTKNQQTVSSTNKQYGRKIYFCTNCKLRIDTDLLHDKVVNQTLTDVKISGFHNVYQAIEQKIQYEIQELNNNIQKHQHLFENYTIKFHNITEELKQRMNNNDDKRFLKSLAIYRLDVQRKLDGVTQQINDFKQQIILKEKVEKSKETWLNTLNKVFEDDAKIQEISDMDKRRFLLPLIQSVSIKENKKRKEYDISLQLRTDFSKRDVKNQISLIL

SEQ ID NO: 6823 - protein, 491 aa, synthetic construct
MGLAAIYLRLSRNEEQLNIDEILLNHRNALTKLAEQQKLTYDIYQEISSGVNTERQELNLLLSRLDDYDALLVMDIDRISRDNAHAEEIKKMLIIHDIKILTPQGAIDLSQESNEMLFSFQAMMANFEYKQIRKRLGRGRLAAAEQGKWTMSNRVPLGYKKNEEKRLEVVEDEAKIIRFIFQKTLERVSANEIAKQLDILGWRSRQGKVLTSTHISNMRRNVVYYGVVKAGRKVNGRVVDEVFVEDAHEPIVSKQMFLEVQKILEENTTGNFFNKLKATRKLQNLIYCNCCKRKRYIQCDGNGIDYIKSCIYKVDNNKCRDRGYKYEPIEQFVLQKIKEKKPAFEQELQMLKSLDTTEVEKKLLIQRDSLDKQINRFNKRQRNLKEMRMDGEITKAEFYEMRDENEEQIKQVKQQMELIDIKLENLSNTDEEQVRLQGAIKKLDKLEELKAESCNTFLKKFIKKIWFSSNTEANHDTTKPREAATIEIEWL

SEQ ID NO: 6824 - protein, 515 aa, synthetic construct
MKTAIYLRKSRADLEAEDRGEGETLAKHRSALLKIAKEMNLNVLSVREEIVSGESLVKRPEMLALLEEIEDNKYDVVLCMDMDRLGRGGMKEQGIILETFKRSNTKIMTPRKTYDLNDEWDEEYSEFEAFMARKELKIITRRMQRGRIASVEAGNYLGTHAPFGYDIHRLNKRERTLTINSEEASVIRMIFDWYANEDMGASAIRNKLNDLGYKSKLGNEWNPYSILDILKNNVYIGKVTWQKRKEVKRPDAVKRSCARQDKSDWIIADGKHDPIIPESLFEQVQEKLNSRYHVPYNTNGIKNPLAGIIKCAKCSYSMVQRYPKNRKETMDCKHRGCENKSSYTELIEKRLLEALKEWYINYKADFEKHKQDDKLKETQVIQMNEVALRKLEKELVDVQKQKNNLHDLLERGVYTVDMFLERSNVVSDRINEITTTMEKLKKEIKTEIKKEKVKKDTIPQVEHVLDLYLKTDDPKKKNSLLKSVLEKAVYKKEKWQRLDDFELVLYPKLPQDGDI

SEQ ID NO: 6825 - protein, 515 aa, synthetic construct
MKTAIYLRKSRADLEAEARGEGETLAKHRSTLLKIAKEMNLNVLSVREEIVSGESLVKRPEMLALLEEIEDNKYDVVLCMDMDRLGRGGMKEQGIILETFKRSNTKIMTPRKTYDLNDEWDEEYSEFEAFMARKELKIITRRMQRGRVASVEAGNYLGTHAPYGYDIHRLNKRERTLTINSEEASVIRMIFDWYANEDMGASAIRNKLNELGYKSKLGNEWNPYSILDILKNNVYIGKVTWQKRKEVKRPDAVKRSCARQDKSDWIIADGKHEPIIPENLFEQVQEKLNSRYHVPYNTNGIKNPLAGIIKCSKCGYSMVQRYPKNRKETMDCKHRGCENKSSYTELIEKRLLEALKEWYINYKADFEKHKQDDKLKETQVIQMNEAALRKLEKELMDVQKQKNNLHDLLERGVYTVDMFLERSNVVSDRITEITSTMENLKKEIKTEIKKEKVKKDTIPQVEHVLDLYFKTDDPKKKNSLLKSVLEKAVYKKEKWQRLDDFELVLYPKLPQDGDI

SEQ ID NO: 6826 - protein, 522 aa, synthetic construct
MKLSHMLKPNMKAAFYGRHSTDKQDMDMQLNSVMEVIRKYDCVHTHSFLDKAVSARKNKITSRKELENMFEAAKRKEFDFVIVYKSDRLARDPLEHQTIRIVMKTLDIPIIISSTESVYNTDTDLIVQLMEDGFTKYEVDTIITRTRSGLENKAKQGKWLGGKPPFGYTYDKNRGQFIEHPEELCYVKEIFNLYVNGHGFQHIANTLPNGSRRGKDWGKENVKAIVINPFYCGLLSWRRQTDGKQNARDIWIEAPNHYVKPIISRTTWESCWRIYSEKRNGNMVPKHYKTSFLLKGLLSCEKCQERMKTKNQQTVSSTNKKYGGKIYFCSNCKLRIDADLLHDKVVNQTLTDVKISGFHNVYHAIEQKIQHEIQELNTNIQKHQRLFENYTIKLHNITEELKQRMKNNDDKRFLKSLAIYRLDVQRKLEGVTQQINDFKQKITLKEKVEKNKETWLHTLNEVFQDDVNLQEISDMDKRRFLLPLIQSVSIKENKKRNEYDISLQLRTDFSKRDVKNQISLIL

SEQ ID NO: 6827 - protein, 515 aa, synthetic construct
MYRPQELNVFIYLRKSRKDLEEEKRALEHGQHYDTLERHRTQLLELARKEHHNIIDIFEEVVSGEYISERPMMQDLLREVETGIADAVLVMDLDRLGRGDMVDQGTIYRVFRYSETFIITPTEVINPNDENQELTFSIKSLIAREELKTIVKRMQRGRRASAKEGKSISRVPPYGYLRDDNLKLYPDPERSWVIPKIFEYMADGMGRQAIAQKLDRLGISPPEGEYWNPSTISSIVKNEVYLGHIIWGKIRYTKQNGKYIRKKVPKERWQRHNHAHPSLVSEELFQKANMAHSKRWRPPTIKTKKLSNPLAGVLLCELCGHSMLYQPRKDRPNPQVRCVQPSCKGIQKGASLVLVEQRILDGLKQIIESFEIQENMVPKKKKENNIQLQQKTLEKKEQQVNDLQKQKNNLHDLLEKGVYDIETFLERQKSIVIRLKTSQEEIEQLEHEFKHVLERERHIHEFVPKIKNVLEAYHATEDIEKKNRLLKSVLEKATYLRKKSWQRKDEFVVELYTKI

SEQ ID NO: 6828 - protein, 560 aa, synthetic construct
MSKEKIKVYLYTRVSTSIQIDGYSLEAQKSRMKAFALYNDYEIVGEYEDAGKSGKSIEGRVQFTRMMEDIKSGKDGVSFVLVFKLSRFARNAADVLSTLQIMQDFGVNLICVEDGIDSSKDAGKLMISVLSAVAEIERENIRVQTMEGRIQKAKEGKWNGGFAPYGYQLIDGKLIINEEEAIAIRTIFDQYVNTSIGANGLSKYLENHGIRKIPRQNGKNPLFDAGLIRKILKNPVYNGKIAFGRRTLEKVHGTRNEYRQVEQDDYLVAEGIHEAIIPDELWQAAQVKLKAQAKKYEHVNKGKNMRTHLLSGIVKCPICGAGMFGNKSIKYKKDGTKYKDFYYYGCKHRLMNRGHKCTYNKQIREELLDDAVAEVIIKLVSNPKFASMIQEKINMKVDTSAIENEIDNYQNELRKSHSTKYKLIEEIDNLDVEDKHYKRRKNDLDDRLYRMYDKIEELESQLIEAKAKKETIEVEKLTGDNIYKVLIYFDKLYKVMNDVERRQLIEALISEIQIYEEKQPNGQWLKSITFKLPIIDEDLNISLENDEQVETVVLMSRVEK

SEQ ID NO: 6829 - protein, 515 aa, synthetic construct
MKTAIYLRKSRADLEAEARGEGETLAKHRSTLLKIAKEMNLNVLSVREEIVSGESLVKRPEMLALLEEIEDNKYDVVLCMDMDRLGRGGMKEQGIILETFKRSNTKIMTPRKTYDLNDEWDEEYSEFEAFMARKELKIITRRMQRGRVASIEAGNYLGTHAPFGYDIHRLNKRERTLTINSEEASVIRMIFDWYANEDMGASTIRNKLNDLGYKSKLGNEWNPYSILDILKNNVYIGKVTWQKRKEVKRPDAVKRSCARQDKSDWIIADGKHEPIIPESLFEQVQEKLNSRYHLPYNTNGIKNPLAGIIKCSKCGYSMVQRYPKNRKETMDCKHRGCENKSSYTELIEKRLLEALKEWYINYKADFEAHKQGDKLKETQVIQMNEAALRKLEKELVDVQKQKNNLHDLLERGVYTVDMFLERSQVISDRINEITSTMENLKKEIKTEIKKEKVKKDTIPQVEHVLDLYFKTDDPKKKNSLLKSVLEKAVYKKEKWQRLDDFELVLYPKLPQDGDI

SEQ ID NO: 6830 - protein, 548 aa, synthetic construct
MIQTNSNHFSFKAAIYCRLSKDDEQKGESASIQNQKELLENYVKSRGWSIYDVYIDDGYTGLNTNRPSFQRLIRDVENKEVDIVITKDLSRLGRNYLQTGYYTENFFPKNNVRYIALNDGVDTFQENNEIVPFKNVLNEFYSRDVSKKMKSAYMTRARQGKFIGCLAPIGYRKDDEDPHKLVIDDETSWIVEKIFELAFSGYGVQAIRRRLFEEKIPTPTWWNRKKGLRNKKTKLEMTVDGGEYWWDCTTLKEIIENPVYIGHIASQKVNYKFKVGWLSDKPKEEWIIVENTHEPIISEDIYNVANEKLKSRRRPFKNGEESIFAGIVKCPDCGKSLNLGRNKSKKREKLLTCNTYRRYGKSLCSQHRIYYDTLYEIVLKDIRKNAEIALKDENEIIKALEKSREIDNEEEQRFIIDKIYEDQIRVEDLTKKIERLYDDWLDNKISESNFQKILEKSQKEQDYLNQRIEDNQKLIVKEDLEDINVKKWIELIKKHKDIKKLDKETLNELISKIYVHEKEVVNGEITQTIDIYYNFIGNTDTLQVFYNL

SEQ ID NO: 6831 - protein, 515 aa, synthetic construct
MKTAIYLRKSRADLEAEARGEGETLAKHRTTLLKIAKEMNLNVLSVREEIVSGESLVKRPEMLTLLEEIEDNKYDVVLCMDMDRLGRGGMKEQGIILETFKRSNTKIMTPRKTYDLNDEWDEEYSEFEAFMARKELKIITRRMQRGRVASVEAGNYLGTHAPFGYDIHRLNKRERTLTINSEEASVVRMIFDWYANEDMGANAIRSKLNDLGYKSKLGNEWNPYSILDILKNNVYIGKVTWQKRKEVKRPDAVKRSCARQDKSEWIIADGKHEPIIPESLFEQVQEKLNSRYHIPYNTNGIKNPLAGIIKCSKCGYSMVQRYPKNRKETMDCKHRGCENKSSYTELIEKRLIEALKEWYINYKADFEKHKQDDKLKETQVIQMNEAALRKLDKELVDVQKQKNNLHDLLERGVYTVDMFLERSNVVSDRITEITSTMENLKKEIKTEIKKEKVKKDTIPQVEHVLDLYFKTDDPKKKNSLLKSVLEKAVYKKEKWQRLDDFELVLYPKLPQDGDI

SEQ ID NO: 6832 - protein, 548 aa, synthetic construct
MRKSELTNQKIVAIYARVSTTEQAEEGYSIDEQIRVLNELCEREGYFVYEEYIDRGISGKNISGRPAVQRLLMDAEQKKFDVVLVWKMNRLARKSLDLMNIVEKLNSKNIAFRSYTEKYETETSTGKLQFQLMAAIAEYERNNIAENVKMGMIARAKEGRWNGGQVLGYDVIECEGSNKKRKNTQLVVNEKEAYTIRTIFKMYTSGHGYKSIANTINKLGHRTKKGKTFSLNAIKIIVTNPIYAGYIRYNVRRDWSEKGRNNINPAPIIQKGEHEPIILEGVWNVAQNVFKSRSCKPNRVHDGEFPLTGIMRCPVCGAGMVISRTTNKLKDGTKRVLEYYVCGAWKNKGTLVCRSNGVRTEYADAFVLDKLQRLMRSDKLIKELVKSVNSRNEKMFAPLQKEYNMYAKQMKELEQKMSKTFDAYTDELISKVMYAEKAKKLEEQIQQLKELMEPLRKQIQGNTAKHVSYELIKEVLLNFSKAFQSALTREQRKRLLHLIIHKITIREDRKIESIQLKLNNGILKELKMGADDLSNDESSAPFSILIAI

SEQ ID NO: 6833 - protein, 501 aa, synthetic construct
MKPNIKEVAIYLRKSRDESDGKEDVLAKHESLLLEYVKNHNLKYEIYKEIGSSEYIDSRPKMVRLLNDVSQKLYDAVLVVDLDRLSRGDLEEMGRIGRIFKDSKTIVLTPTKTYDFNDEEQALINNFEMVFANHEFRMIKKRMLRGKLQGTKAGKWTNGRPPFPYVYNRLTKELDVDSDKVKVYEFMKKMFLEDMKATYEIAWKLNELGFKTNRNSYWYENTVRRLLINEVHLGKVVYGKTSGSGSKKKLNANGVQIKDRSEWIIAEGSHQPLKTEEEHQRILAILESRRYTPKGTRTNVQVLSKLIYCGKCNRVMSFTGKASGKRYVKTCLTTDRFGYRCHNRSLNVEVIYAQLFLDLERYEQQLLSHESKEKQDDNSTLQLALQNKDEELERLEKGIERIKDLFIDEIIDKLEMQKRIEKQKQLMQTKKEEIRSIEQSLAVIENVRTDNDRINAIKEFKKVWNTEGISKRELNTLAKQLIDRIEYVREGNNVKINIKFL

SEQ ID NO: 6834 - protein, 490 aa, synthetic construct
MKRLGSYAIYVRISTDRDEQVSSVENQIDICRNWLERNGFKWDEKSVFKDEGISGTLFTDRPAIQLLLQKAKLKEINMVVFKSISRLARDLKDSLEIREVFLAHNVRIISVEEGYDSVKAGKNDMAFELWSLFSAQYSRTLSSSITAALAVKVRRGEHIGKVPYGYDRVNQKLVINKDEAEVVQRMYKWYIDGWGYKKITNELNRLGVKSKTKKNWQMTSVQRILRNPIYKGTFILNQYTSVKVSGKKKQIRNPKEKWFVFPNHHPVIIDEEVWGQVNPKDANTNKTKITAWNEFRNIAKCAACDSNMIIVQSHSKKKNGERTEWKYLKCSQYRRAGKHGCVNHVPIQYKDFRQFIIDLLVKKGESLTLKLQNNVEEGRGKKVKKLQHLVNANEQKKKSLLDLYLEELIDKEEFEKKRSDLEIEIKKMSNELFLLKQNDSVAVDIKTIKEAFEQLQQREYDLYHVFQTLIQEIVIYQNGTVDITYTFEDT

SEQ ID NO: 6835 - protein, 525 aa, synthetic construct
MKTIREVLGEGKKGAFYARVSSDKQTIDMQRHHVYKFIENYECEIVKEYIDPGESAFKKKITQRPQMMKLIEGVEQGKYDFVIVYADDRLARSELEHMQIRLIMKQRNTDVILTSTSEIYTERDSITQLIRDGATRYEVERISRRTKDAYKQRTADGKRMGGPIPYGYKEDEKTKELSIVEDEKDVVLKIYEMYHKGDGFSAIANMLNEQKEKTNCQHWKKEAVKRILTNPYYAGYVTNKRIKPGAGNSVEDFSKWEMERCEEIPPIMSKAEWLTTIRLFEQKRNGEIPPKKLKTEYILRDLIHCKSCDLPLMPKNQETKGKNGKKYGHKKYICPNKSCKMSHVMGELHDSIFNSIVAEIKDKVISKSYTELIVEIEKSVDDQMRNTQKETKRLTKQIEKCLVLVKESEREIDALYNHKKRLSEDNPEIDPLLDVMLDYRIHLLHEIKESEEIIKQKQLEIEHIQEVSFNRKGLQQNVLKELALEFSSLKLDIKRIRNFLVHIVDKITIDKDRNTAYTLKINLGY

SEQ ID NO: 6836 - protein, 515 aa, synthetic construct
MYRPQELDVFIYLRKSRKDLEEEKKAMEQGQHYDTLERHRTQLLELAHKEHHNIIDILEEVVSGEYISERPLMQKLLREVESGIADAVLVMDLDRLGRGDMVDQGTIYRVFRYSETFIITPTEIIDPNDENQELTFSIKSLIAREELKTIVKRMQRGRRASAKEGKSISRVPAYGYLRDNDLKLYPDPDKDWVIPRIFELMANGMGRQAIAQELDRLGISPPEGEYWNPSTISFITKNEVYLGHIIWGKIRYTKQNGKYIRKKVPKERWQRHDNAHPPLVSEALFQKANMAHSKRWRPPTIKTKKLSNPLAGILLCELCGHSMLYQPRKDRPNPQVRCVQSSCKGVQKGASLALVEQRILDGLKQIIESFEIQENMVQKKKITNNIQLQQKALEKKAQQINDLQKQKGNLHDLLEKSIYDIDTFLERQKSIVVRLKTTQEEIEQLEQEINQTLEQEKHIHEFVPKIKTVLEAYYATTDVEKKNYLLKSVLKKVTYLRKQEWRRKDEFVVELYTKI

SEQ ID NO: 6837 - protein, 522 aa, synthetic construct
MKLSHILQPNRKAAFYGRHSTDKQDMDMQSNSVMEVIRKYDCIHTHSFLDKAVSARKNKITSRKELENMFEGAKRKEFDFVIVYKSDRLARDPLEHQTIRIVMKTLDIPIIISSTESVYNADTDLIVQLMEGGFTKYEVDTIIARTQSGLENKAKQGKWLGGKPPFGYTYDKNSEQFIEHTEELCYVREIFNLYVNGHGFQYIANTLPNGSRRGKDWGKENVKAIVLNPFYCGLLSWRRQTDGKQNARDIWIEAPNHYVKPIISRTTWESCWRIYSEKRNGNMVPKHYKTSFLLQGLLSCEKCQELMKTKNQQTISSTNKQYGGKIYFCTNCKLRIGADILHDKVVNQTLTDVKISGFHNVYHAIEQKIQYEIQELNNNIQKHQRLFENYTIKLHNITEELKQRMKNNDDKRFLKSLAIYRLDVQRKLDGVTQQINDFKQQISLKEKVEKSKETWLHTLNEVFQDDVKLQEISDMDKRRFLLPLIQSVSIKENKKRNEYDISLQLRTDFSKRDVKNQISLIL

SEQ ID NO: 6838 - protein, 515 aa, synthetic construct
MKTAIYLRKSRADLEAEARGEGETLAKHRTTLLKIAKEMNLNVLSVREEIVSGESLVKRPEMLALLEEIEDNKYDAVLCMDMDRLGRGGMKEQGIILETFKRSNTKIMTPRKTYDLNDEWDEEYSEFEAFMARKELKIITRRMQRGRVASVEAGNYLGTHAPFGYDIHRLNKRERTLTINSEEASVVRMIFDWYANEDMGANAIRSKLNDLGYKSKLGNEWNPYSILDILKNNVYIGKVTWQKRKEVKRPDAVKRSCARQDKSDWIIADGKHEPIISESLFEQVQEKLNSRYHVPYNTNGIKNPLAGIIKCDKCGYSMVQRYPKNRKEAMDCKHRGCENKSSYTELIEKRLLEALKEWYIDYKADFEKHKQDDKLKETQVIQMNEVALRKLEKELVDVQKQKNNLHDLLERGVYTVDMFLERSNVVSDRMNEITETMEKLMKEIKTEIKKEKVKKDTIPQVEHVLDLYFKTDDPKKKNSLLKSVLEKAVYKKEKWQRLDDFELVLYPKLPQDGDI

SEQ ID NO: 6839 - protein, 515 aa, synthetic construct
MYRPQELNVFIYLRKSRKDLEEEKKAMEHGQHYDTLERHRTQLLELAHKEHHNIIDILEEVVSGEYISERPMMQKLLREVESGIADAVLVMDLDRLGRGDMVDQGTIYRVFRYSETFIITPTEIIDPNDENQELTFSIKSLIAREELKTIVKRMQRGRMVSAKEGKSISRVPAYGYLRDNNLKLYPDPEKSWVIPKIFELMANGMGRQAIAQELDRLGISPPEGEYWNPSTISSITKNEVYLGHIIWGKMRYTKQNGKYIRKKVPRERWQRHDHAHTPLVSEELFQKTNMAHSKRWRPPTIKTKKLSNPLAGILLCELCGHSMLYQPRKDRPNPQVRCVQPSCKGIQKGASLALVEQRILDGLKQIIENFEIQENMIQKKKTQNNTHLQQKALEKKEQQVNDLQKQKNNLHDLLEKGVYNIDTFLERQKSIVERIKHTQEKIQQLKKESNRTFEQEKQIYEFVPKIKTVLEAYHATEDIEKKNRLLKSVLEKVTYLRKENWKRKDEFIIELYTKI

SEQ ID NO: 6840 - protein, 522 aa, synthetic construct
MKLSHVLKPNMKVAFYGRHSTDKQDMDMQMNSVMEVIRKYDCIHTHSFLDKAVSARKNKLTSRKELENMFETAKRQEFDFVIVYKSDRLARDPLEHQTIRIVMKTLGIPIIISSTESVYNTDNDLIVQLMEDGFTKYEVDTIIARTRSGLENKAKQGKWLGGKPPFGYTYDKNSGKFIEHSEELCYVKEIFNLYLTGHGFQYIANTFPQGSRREKDWGKENIKAIVLNPFYCGLISWRRQTGGKLNARDIWIEAPNHYVKPIISRTTWEACWRIYLEKRNGNMVPKHYKTSFLLQGLLSCEKCHALMKTKNQQTVSSTNKKYGGKIYFCSNCKVRVDANLLHDKVVNQTLTDVKVSGFYNVYHAIEKKIQHEIKELKQSIQKHLQLYENYTIKLQNITEELKQRMKNNDDKRLLKSLAIYRLDVQRKLDAITQQINEFKKKITLKEKVEKSKETWLHTLNEVFQDDVKLQEISDMDKRRFLLPLIQSVSIKENKKRNEYDISLQLRTDFSKRDVKNQISLIL

SEQ ID NO: 6841 - protein, 515 aa, synthetic construct
MKTAIYLRKSRADLEAEARGEGETLAKHRSTLLKIAKEMNLNILSVREEIVSGESLVKRPEMLALLEEIEDNKYDVVLCMDMDRLGRGGMKEQGIILETFKRSNTKIMTPRKTYDLNDEWDEEYSEFEAFMARKELKIITRRMQRGRIASVEAGNYLGTHAPFGYDIHRLNKRERTLTINSEEASVVRMIFDWYAHEDMGASAIRNKLNDLGYKSKLGNEWNPYSILDILKNNVYIGKVTWQKRKEVKRPDAVKRSCARQDKSDWIIADGKHDSIIPESLFEQVQEKLNSRYHVPYNTNGIKNPLAGIIKCAKCSYSMVQRYPKNRKETMDCKHRGCENKSSYTELIEKRLLEALKEWYINYKADFEKHKQDDKLKETQVIQMNEAALRKLEKELVDVQKQKNNLHDLLERGVYTVDMFLERSKVISNRINEITSTMGNLQKEIKTEIKKEKVKKDTIPQVEHVLDLYFKTDDPKKKNSLLKSVLEKAVYKKEKWQRLDDFELVLYPKLPQDGDI

SEQ ID NO: 6842 - protein, 520 aa, synthetic construct
MMYNIARYDALYGRQSVDKKDSISVESQLDFCKYETHGQPYQTYTDKGFSGKNTNRPDFERMMRDIRAGRIKRVIVYKLDRISRSILDFANMMEVFQEYDVEFVSSTEKFDTSTPIGRAMLNICIVFAQLERETIQKRVTDAYYSRNKKGFFMGGRVPYGFKLEPIVIDGIRTSFYLPIEEEMQQIELIYQLYAEGVKENGEPYSVSDIRNYLLEHDIPQLRGGYWTVSSISSILANPSYAIADLSLYEFFHSQGANITNPVELWEGGNGCYLYQGTVSKDKSRNSFKDKEVVLAPHVGRVSSYIWIKCRLRCMNSRQMATTNKGKSSWLVGKVKCGNCGKGLQISPSRVSKKTGKSIRYMNCSYKYITKGLGCSGTGSRIYADELENYVLKQIKGKLAEFEGLNEQNATQTNPKLNENKIRLAQIDKEIDDLVEKVSGANSVLMRYINEKVEQLDAERRALSEENLSMTVNQSSDTLNMIFNHVSTWEETSFEDKQKVLDAFVKVIKIANGNIEMTWNI

SEQ ID NO: 6843 - protein, 520 aa, synthetic construct
MMYNIARYDALYGRQSVDKKDSISVESQLDFCKYETHGQPYQTYTDKGFSGKNTNRPDFERMMRDIRAGRIKRVIVYKLDRISRSILDFANMMEVFQEYDVEFVSSTEKFDTSTPIGRAMLNICIVFAQLERETIQKRVTDAYYSRNKKGFFMGGRVPYGFKLEPIVIDGIRTSFYLPIEEEMQQIELIYQLYAEGVKENGEPYSVSDIRNYLLEHNIPQLRGGYWTVSSISSILANPSYAIADLSLYEFFHSQGANITNPMELWEGGNGCYLYQGTVSKDKSRNSFKDKEVVLAPHVGRVPSYIWIKCRLRCMNSRQMATTNKGKSSWLVGKVKCGNCGKGLQISPSRVSKKTGKSIRYMNCSYKYITKGLGCSGTGSRIYVDELENYVLKQIKGKLAEFEGLNEQNATQTNPRLNENKIRLAQIDKEIDDLVEKVSGANSVLMRYINEKVEQLDAERRTLSEENLSMTVNQSSDTLNMIFNHVSAWEETSFEDKQKVLDAFVKVIKIANGNIEMTWNI

SEQ ID NO: 6844 - protein, 623 aa, synthetic construct
MRRNEKITALYERLSRDDDLQGESNSISNQKKLLEDYAAQHDFPNPVHFTDDGISGTCFDRPGFLAMMKEVEAGNVEYLCIKDMSRLGRDYLKVGQIMEILRQRSVRLIAINDGVDSARGDDDFTPFRNIMNEYYARDTSRKIRSTFQSKGKTGKHLTGTVIYGYLWNEARDQWLVDPEAAEVVKRIFAMTIEGYGPYQIANRLKEDKVLIPSAYLAQHGEGVNKNKTFKDVYGWGSSTIVNILEKREYLGHTINFKTRKHFKDKKSHYVPEDEWTIFENTHEAIIDQQTFDLVQKIRSKVRRYPDGWGEVAPLTGLLYCADCGGKMYVHRTNNGKRISQYTCSQYTKVPVGTICKTQHRINEDVVLSLVSDMLKAIAEYAKHDRAEFVRVVQEAQSSQQTAEVRKQRTRLATAKQRVSELEVLLCKIYEDNILGKLSDSRYATLDAQYEKEQTELTAEISALEKAVKSYEKHEKDADRFIALIDKYENFDKLTIAMLNEFIEKILVHERDRKGSIQTTQEVEIYFNFVGRFVPPAFGEVELIPEELEEIRKREERKDRLHQNYLKRKASGAQKRYEDKIKEKKKAEIEAKKAAIRAEDIAKGVFVPVGSLPQREPQKGAQIA

SEQ ID NO: 6845 - protein, 557 aa, synthetic construct
MSKEKIKVYLYTRVSTSIQIDGYSLEAQKSRMKAFALYNDYEIVGEYEDAGKSGKSIEGRVQFTRMMEDIKSGKDGVSFVLVFKLSRFARNAADVLSTLQIMQDFGVNLICVEDGIDSSKDAGKLMISVLSAVAEIERENIRVQTMEGRIQKAKEGKWNGGFAPYGYQLIDGKLIINEEEAIAIRTIFDQYVNTSIGANGLSKYLENHGIRKIPRQNGKNPLFDAGLIRKILKNPVYNGKIAFGRRTLEKVHGTRNEYRQVEQDDYLVAEGIHQAIIPDELWQAAQVKLKAQAKKYEHVNKGKNMRTHLLSGIVKCPICGAGMFGNKSIKYKKDGTKYKDFYYYGCKHRLMNRGHKCTYNKQIREELLDDAVAEVIIKLVSNPKFASMIQEKINMKVDTSAIENEIDNYQNELRKSHSTKYKLIEEIDNLDVEDKHYKRRKNDLDDRLYRMYDKIEELESQLIEAKAKKETIEVEKLTGDNIYKVLIYFDKLYKVMNDVERRQLIEALISEIQIYEEKQPNGQWLKSITFKLPIIDEDLNISLENDEQVETVAKVIK

SEQ ID NO: 6846 - protein, 574 aa, synthetic construct
MIATHYTCLFGCRKGGLMLQSNKITALYCRLSQEDMQAGESGSIQHQKMILQRYADEHHFLNTKFFVDDGFSGVSFEREGLQAMLQEVEAGRVATVITKDLSRLGRNYLKTGELIEIVFPENGVRYIAINDGVDTAREDNEFTPLRNWFNEFYARDTSKKIRAVKQAQAQKGERVNGEYPYGYIPDPNNRHHLIPDPETAPIVKQVFAMFVSGVRMCEIQKWLAENKVLTIGALRYQRTGQARYQRAMIAPYTWPDKTLYDILARQEYLGHTITAKTHKVSYKSKKTRKNEEEQRYFFPNTHEPLVDEETFELAQKRIATRHRPTKAAEIDIFSGLLFCAGCRHKMYYQQGVNIEPRKFSYSCGAWRNRARTGSECTSHYIRKNVLLDLVLEDMRRVLRYVKEHEQDFICKATEYGDMEARKALAQQQKELFKAQARMTELDTLFRKLYEDNALGRLTDERFVFLTSGYEDEKKSLAARIDELQQQIATVTERKRDISRFIQIVGKYSDIQELTYENVHEFIDRILIHELDRETNTRKIEIHYSFVGQVDTEQEPTQVVNHDRRNMVDVKSIAI

SEQ ID NO: 6847 - protein, 560 aa, synthetic construct
MSKEKIKVYLYTRVSTSIQIDGYSLEAQKSRMKAFALYNDYEIVGEYEDAGKSGKSIEGRVQFTRMMEDIKSGKDGVSFVLVFKLSRFARNAADVLSTLQIMQDFGVNLICVEDGIDSSKDAGKLMISVLSAVAEIERENIRVQTMEGRIQKAKEGKWNGGFAPYGYQLIDGKLIINEEEAIAIRTIFDQYVNTSIGANGLSKYLENHGIRKIPRQNGKNPLFDAGLIRKILKNPVYNGKIAFGRRTLEKVHGTRNEYRQVEQDDYLVAEGIHEAIIPDELWQAAQVKLKAQAKKYEHVNKGKNMRTHLLSGIVKCPICGAGMFGNKSIKYKKDGTKYKDFYYYGCKHRLMNRGHKCTYNKQIREELLDDAVAEVIIKLVSNPKFASIIQEKINMKVDTSAIENEIDNYQNELRKSHSTKYKLIEEIDNLDVEDKHYKRRKNDLDDRLYRMYDKIEELESQLIEAKAKKETIEVEKLTGDNIYKVLIYFDKLYKVMNDVERRQLIEALISEIQIYEEKQPNGQWLKSITFKLPIIDEDLNISLENDEQVETCVLLQRRTM

SEQ ID NO: 6848 - protein, 559 aa, synthetic construct
MKGKIALYSRVSTSEQSEHGYSIHEQEQVLIKEVVKNFPGYDYETYTDSGISGKNIEGRPAMKRLLQDVKDNKIEMVLSWKLNRISRSMRDVFNIIHEFKEHDVGYKSISENIDTSNASGEVLVTMFGLIGSIERQTLISNVKLSMNAKARSGEAITGRVLGYKLSLNPLTQKNDLVIDENEAHIVREIFDLYLNHNKGLKAITTILNQKGYRTINQKPFSVFGVKYILNNPVYKGYVRFNNHQNWAVQRRSGKSDKNDVILVKGKHEAIISEDVFDQVHEKLASKSFKPGRPIGGDFYLRGLIKCPECGNNMVCRRTYYKTKKSKERTIKRYYICSLFNRSGSSACHSNAINAEVVERVINVHLNRILSQPNVIKQIASSVIEELKQKHSKQTEIKYDINSLEKQKAKVKTQQERLLELFLDDEMDSEMLKAKQSEMNQQLEVLDQQIKEAKQANQSQDDIPNFDKLKARLILMITRFSVYLRKATPEAKNQLMKMLIDSIEITKDKQVKLVRYKIDESLIPQSLKKDWGSFFIPKFNFVINVTKKNRIENLSLLPLF

SEQ ID NO: 6849 - protein, 553 aa, synthetic construct
MNQQPEQITALYCRLSRDDELQGDSNSIVNQKSILSKYAEEHRLLNTRFFIDDGVSGTTFDRPGLNEMLALIDEEKVSTVIVKDMSRLGRDYLKVGLLTEIQLPEKGVRFIAINDGVDSNQGVSEFIAFRNVINEWYAKDTSKKIKAVFTAKGQSGKPLSTFPPYGYIKDPEDKNRWIVDEAAAEVVREIFRLCMEGNGPTKIARILSERRVLIPSAYAKSNGRSAPADVPADRCKWCDSTVAHILERKEYLGHTVNFKTYKESFRNKKQRKNPKENQMVFENTHQPIIEQDVWDTVQQLRQNKRRPSKTGKTNMFSGIAHCADCGSKLYYCTTRYFETRQDHFRCSASQKAVDPCTSHFIRAVVLEEMVLAHMRYVIGFVQRYENSFRVSIEAERSTEIQKELSAKRKQIAQSQKRVDDLDVLFRIVYEDNASGKLTDERFMQLSRGYDLEQKTLRQMITMLEKEIDQQEQKTTQVEDFIAKCKRYSSLETLTPAILNDLVIKVFVEAPDKSTGKRRQGIHISYNLVGILPPLERFQPVVVERPNKEKAETA

SEQ ID NO: 6850 - protein, 558 aa, synthetic construct
MKGKIALYSRVSTSEQSEHGYSIHEQEQVLIKEVVKNYPGYDYETYIDSGISGKNIEGRPAMKRLLQDVKDNKIEIVLSWKLNRISRSMRDVFNIIHEFKEHGVGYKSISENIDTSNASGEVLVTMFGLIGSIERSTLISNVKMSMNAKARSGEAITGRVLGYKLKLNPLTQKNDLVIDENEANIVREIFDLYLNHNKGLKAITSVLNQKGYRTINQKPFSVCGVKYILNNPVYKGYVRFNNHQNWAVQRRSGKSDKSDVILVKGKHEAIISEEVFDQVHEKLASKSFKPGRPIGGDFYLRGLIKCPECGNNMVCRRTYYKTKKSKERTIKRYYICSLFNRSGSSACHSNAINAEVVERVINVHLNRILSQPDVIKQIASNVIEQLKLKHSNQTEIKYDIDSLEKQKAKLKTQQERLLELFLDDQMDSEMLKAKQSQMNEQIEMLDKQIKETQQARESQAEVPDFDKLKSRLTMMISRFSIYLREATPEAKNQLMKMLIDSIEITTDKQVKLVRYKIDESLIPQSLKKDWGSFFMPKFQFEIDGRNNYFIDQITTFTT

SEQ ID NO: 6851 - protein, 559 aa, synthetic construct
MKTKLYSYIRFSSMRQNDGSSYERQIRMARDIAAKYDLELVNDYQDLGVSAFKGANSKTGALSRFLDAIGRSVPVGSWLFIENLDRLSRADIVSAQELFLSIIRRGITIVTGMDNKIYSLDTVTANPMDLMFSILLFIRGNEESQTKRNRTNSSALIKIKAHQENPQNPAVAIEEVGKNMWWTDTTSGYVLPHPVYFPVVQEIVELRKNGRSTAEILDHLNETYTPPPAVSNKKHSKWSRAMVERLFHTRALIGIKEVSVDGVNYELKDYYPRVIDDATFYHLKKNIGARAWNFGDKEEVKPIPLLSGIGLLKCDHCGCAMVKVKGTNKRSDQYRYTCDATRSRRLDCEHPNWSFRGDQLEKAVLQLLADKIWIAEDKANPVPALKVQVDEISRKIDNLIALSAMTGATKELADQITTLNSERETLYNQIKMAEEEMYSVDSQGWEKLAEFDLEDVYNEERLKVRFKIKQALKRIGCSRIDRNKNLFVLEYIDGKTQRVVIENSRGTRKGRIFIDLKTINDRQILESNGLVLHPCLDMLTDKNWKPEEEIPGPLQEFGI

SEQ ID NO: 6852 - protein, 558 aa, synthetic construct
MKKEKIKVYTYKRVSTAMQIDGYSLDAQRARMKAYADFNDYEIVGEYEDAGKSGKSIEGRLQFRQMMEDVKSGKDNISYVLVFKLSRFGRNAADVLSTLQVMQDFGVNLICVEDGIDSSKDAGKLMISVLSAVAEIERENIRVQTMEGRIQKAREGKWNGGFAPYGYQLVNGRLEINEEEAVAIRTIYDQYVNTDIGSNGISKYLENHGIRKIQRQNGKNPLFDAHLVRLILKNPVYCGKIAYGRRKTEKVHGTRNEYHLVEQDNFLLVDGLHEAIISEEVWNAAQAKLAAQAKKYEHVNKGKNERTHLLSGIVKCPVCGAGMYGNKSIKYKKDGSKYKDFFYYGCKHRNMQRGHKCDYRKQIREELLDDAVAEVIVKLVSNPNFATMMQEKINMKVDTTAIDQEIANYEKQLRQNYSIKSKLMEEIDNLDPDDRHYIRRKSDLDDRLYRMYDKIEELESQLIDARAKKTSIEAEKITGDNIYKVLICFDKLYFTMNDVERRQLIEALIEEIQIYEERKPNGQWLKSIRFKLPIIENDLSIGLDNDNHVETVAKIIKQ

SEQ ID NO: 6853 - protein, 814 aa, synthetic construct
MSKEKIKVYLYTRVSTSIQIDGYSLEAQKSRMKAFALYNDYEIVGEYEDAGKSGKSIEGRVQFTRMMEDIKSGKDGVSFVLVFKLSRFARNAADVLSTLQIMQDFGVNLICVEDGIDSSKDAGKLMISVLSAVAEIERENIRVQTMEGRIQKAKEGKWNGGFAPYGYQLIDGKLIINEEEAIAIRTIFDQYVNTSIGANGLSKYLENHGIRKIPRQNGKNPLFDAGLIRKILKNPVYNGKIAFGRRTLEKVHGTRNEYRQVEQDDYLVAEGIHEAIIPDELWQAAQVKLKAQAKKYEHVNKGKNMRTHLLSGIVKCPICGAGMFGNKSIKYKKDGTKYKDFYYYGCKHRLMNRGHKCTYNKQIREELLDDAVAEVIIKLVSNPKFASMIQEKINMKVDTSAIENEIDNYQNELRKSHSTKYKLIEEIDNLDVEDKHYKRRKNDLDDRLYRMYDKIEELESQLIEAKAKKETIEVEKLTGDNIYKVLIYFDKLYKVMNDVERRQLIEALISEIQIYEEKQPNGQWLKSITFKLPIIDEDLNISLENDEQVDALAATPFTSAINSPILLTQKEALNSKTKAEIQRLGAKKVYLIGGENSISKEIEQQLKSLNISIERISGSDRYKTSLLLAQKLNGIKNVSQIAVVNGVKGLADAISVGAAAAENNIPIILANEKSELQGADEFLNSLNIEKSYIIGGTASLSNNLESKLKNPTRLSGSSRDETNSKIIDNFYKKDTLKNAFVVKNGIKNQNDLIDGLAVGPLGAKTGSPVILVGDKLADSQKEVLKNKTLEKVTQVGGGANKNAFKELVKLKSAK

SEQ ID NO: 6854 - protein, 558 aa, synthetic construct
MKKEKIKVYTYKRVSTAMQIDGYSLDAQRARMKAYADFNDYEIVGEYEDAGKSGKSIEGRLQFRQMMEDVKSGKDNISYVLVFKLSRFGRNAADVLSTLQVMQDFGVNLICVEDGIDSSKDAGKLMISVLSAVAEIERENIRVQTMEGRIQKAREGKWNGGFAPYGYQLVNGRLEINEEEAVAIRTIYDQYVNTDIGSNGISKYLENHGIRKIQRQNGKNPLFDAHLVRLILKNPVYCGKIAYGRRKTEKVHGTRNEYHLVEQDNFLLVDGLHEAIISEEVWNAAQAKLVAQAKKYEHVNKGKNERTHLLSGIVKCPVCGAGMYGNKSIKYKKDGSKYKDFFYYGCKHRNMQRGHKCDYRKQIREELLDDAVAEVIVRLVSNPNFATMMQEKINMKVDTTAIDQEIANYEKQLRQNYSIKSKLMEEIDNLDPDDRHYIRRKSDLDDRLYRMYDKIEELESQLIDARAKKTSIEAEKVTGDNIYKVLICFDKLYFTMNDVERRQLIEALIAEIQIYEERKPNGQWLKSIRFKLPIIEKDLSIGLDNDNHVETVAKIIKQ

SEQ ID NO: 6855 - protein, 537 aa, synthetic construct
MKQQIYNTALYLRLSRDDELQGESSSITTQRSMLRLYAKEHHLNVIDEYIDDGWSGTNFERPSFQRMIEDIEAGKINCVVTKDLSRLGRNYIMTGQYTELYFPSHNVRYIAIDDGVDSEKGESEIAPFKNIINEWVARDTSRKVKSAFKTKFAEGAHYGAYAPLGYKKHPDIKGKLLVDDETKWIVEKIFFLAYQGYGSAKITKVLREEKVPTASWLNFTRYGTFAHIFEGKPESKRYEWTIAHVKAILKSEVYIGNSVHNMQSTVSFKSKKKVRKPESEWFRVENTHEPIIDKEVFYRVQEQIKSRRRQTKEKATPIFAGLVKCADCGWSMRFATNTANKTPYSYYACSYYGQFGKGTCSMHYIRYDVLYQAVLKRLQYWAKAVQQDEEKVLNKIQKAGNAERIREKKKKASAFKKAENRQNEIDRLFAKMYEDRACEKITERNFVMLSSKYQKEQIELEQQITNLREELSKMEQDMIGAEKWIELIKEYSVPKELTAPLLNAMIEKILIHEAITNEDNERIQEIEIYYRFIGKVD

SEQ ID NO: 6856 - protein, 582 aa, synthetic construct
MQEVEVIKARNVLSKQARGKAIERLRVAAYCRVSTDSEDQLNSYKSQVQYYTDMIKKNKEWVLVDIYADEAITGTQVIKREDFQRMINDCMNGDIDMVITKSISRFARNTLDTLKYVRMLKERNIAVYFEDEKINTLTMDGELLLVVLSSVAQQEVENISANVKKGLKMKMKRGELVGFQGCLGYDYHPEDKTITVNKEEAEIVRYIFNRYVEGAGGSVIGQELENLGYKTKYGSSTWAPSTVIGIIKNEKYKGDILLGKTFTVDPISKRRLENMGEEDKFYMKDHHEPIISEEVFEKAQEILNRRNKNRTTVGNGKREKYSRKYAFSCMLECGFCGSTLSRRNWHSSSEYSKVIWQCVTATKKGKKFCPDSKGIPETAIEEAFIESYRLLCDNNKDVLDEFLQRLDDTLSNSTVNKQLSKIEKEISAVEGKKNKLVDMRLEDSIDKDTYETKYAALMEKAEQLVADRQKLQETAANEKDIKRRLKEFKSTLEQNEVLDVFDRHVFESIVEKVIVGGYDEEGNKDPAQLTFVYKTGVKNSVDGSRFKPQRKNARGRHRSDELCSQGGDEVEKMCSDRSTDTL

SEQ ID NO: 6857 - protein, 525 aa, synthetic construct
MAKNVITIPATKSRYTAAPLSSKKKRRVAAYARVSTDHEDQQSSYEAQVDYYTRYIKSCDDWEFVSIYTDEGISATNTKKREGFKTMIADALAGKIDLIVTKSVSRFARNTVDSLTTVRKLKDEGIEIYFEKENIWTLDSKGELLITIMSSLAQEESRSISENVTWGQRKRMADGKVSFAYSRFLGLEKDKETGKIVVNPEQAKIVRLIFKLFLEGMTPHSIAAELTNRGIKTPGGKDVWNRQTVRRILSNEKYKGDALLQKTYTVDFLQKKLKRNEGEVPQFYVEGNHEAIISPEVFDMVQAELARRTSGGERYSGVSIFSNKIKCADCGGWYGAKVWHSTDRYRKVIYRCNRKYKGGKCQTSHVTEDEVKAAFVSAYNRLVTEKKEIIANAETIRRTLCSTDTLQDEKRKLEDEMSVIVEMTQNIVAENARVAQDQDEYQKRYDGLVQRYEAAKARYDEVVAAISAKQAQDERLSDFIKMLKSQNGVLLEFDSGLWGCMVEYVTVGRNKEITVTFRDGTEVRV

SEQ ID NO: 6858 - protein, 517 aa, synthetic construct
MAKIIKIEQAVPVIQTKKKVAAYARVSMESERMNHSLSAQISYYSSLIQKNPGWQYAGVYADYGITGTLTAKREQFQKMLSDCEEGKIDIILTKSISRFARNTVDLLETVRHLKSIGVEVRFEKEKIHSFSEDGELMLSLLASFAQEESRSISENCKWGIRKRFQSGEIGVANKRILGYRYDEVQKRYLIVPEEAESVRWMFQMYLDDVTLREIADRMNRAGIRTIRGYTFQEASVRQLIFNEVYAGDMKRQKCYIADPIQKNKVKNHGELPQYYMTDCHEAIIDRETYAKVKAEMKRRASLINPTYCFTAKIHCGICGANYARKKGIVKGRTYVHWICRSKKEAGTTCSSVNFSEEELKNICAEILDLDAFEEEVFESRVKDIVVLENGDVEFYLVGGETKRWKNLHLNDTRHTVTLTDAFQGKIRCAKCGKTYHRVNSANRWVYWYCIGKRNKVSPCDSVNYTDFQLRQISVHILGLDAFDERTFTEQIEEITVLADGNLVYRFFGGRTAKWRRT

SEQ ID NO: 6859 - protein, 556 aa, synthetic construct
MSKEKIKVYLYTRVSTSIQIDGYSLEAQKSRMKAFALYNDYEIVGEYEDAGKSGKSIEGRVQFTRMMEDIKSGKDGVSFVLVFKLSRFARNAADVLSTLQIMQDFGVNLICVEDGIDSSKDAGKLMISVLSAVAEIERENIRVQTMEGRIQKAKEGKWNGGFAPYGYQLIDGKLIINEEEAIAIRTIFDQYVNTSIGANGLSKYLENHGIRKIPRQNGKNPLFDAGLIRKILKNPVYNGKIAFGRRTLEKVHGTRNEYRQVEQDDYLVAEGIHEAIIPDELWQAAQVKLKAQAKKYEHVNKGKNMRTHLLSGIVKCPICGAGMFGNKSIKYKKDGTKYKDFYYYGCKHRLMNRGHKCTYNKQIREELLDDAVAEVIIKLVSNPKFASMIQEKINMKVDTSAIENEIDNYQNELRKSHSTKYKLIEEIDNLDVEDKHYKRRKNDLDDRLYRMYDKIEELESQLIEAKAKKETIEVEKLTGDNIYKVLIYFDKLYKVMNDVERRQLIEALISEIQIYEEKQPNGQWLKSITFKLPIIDEDLNISLENDEQVDRLYRYI

SEQ ID NO: 6860 - protein, 584 aa, synthetic construct
MKEVEIIKKNDNLENRRRGKYIDRKRVAAYCRVSTDSEDQLNSYKSQVSYYTDLINNNIEWCMVDIYADEAITGTQVNKREDFQRMINDCMNNEIDMIITKSISRFARNTLDTLKYVRMLKEKNIAVYFEDEKINTLTMDGELLLVVLSSVAQQEVENISANVKKGLKMKMRRGELVGFQGCLGYDYHKEDKTLTINEKEAEIVRYIFNRYIEGAGGSIIGQELENLGYKTKYGSTTWSNSTVLGIIKNEKYIGDVLLGKTFTVDPISKRRLDNLGEEEKYYVKNNHEPIISREIFDKAHEILNRRSKNRGKYEAGVTKREKYSRKYAFSCMMECGFCGGTLTRRNWHSGSEYSKVIWQCVVATKKGKKYCPESKGIPERVIENAFVESYRLLCDEKKSVLEELLNRINDIVGSSEVNNKIKKIEKELSVIEKKINNLVDMRLDDIIEKETYEIKYQELIDNQEKLLNERNKLNVVAKNENSMKQRLKEFKKTLEENEVLDKFDRGVFESVVEKVIIGGKNKDGENDPTKITFIYKTGFKNTLSSDEFKIPRKNAKGRHKRKELCLHGNNEVENLCSYSSSNTL

SEQ ID NO: 6861 - protein, 626 aa, synthetic construct
MRNEKITPLYERLSRDDELQGESNSISNQKQMLEDFARRNGLPNPTHFTDDGISGTRFDRPGFLAMMEEVEAGRVEAIVIKDMSRLGRDYLKVGQVMEVLRQRGVRLIAINDGVDSLKGDDDFTPFRNIMNEFYARDTSRKIRSVFKSKGMSGKHLTGTVIYGYLWDEKREHWLVDEEAAEVVRRIFSLTLEGYGPYQIACKLSADRIEIPVVHLARFNEGVNRSKPVKDPYGWGSSTIVNILKKREYLGHTINFKTRKHFKDKKSHYVSEDEWTIFENTHEAIIDQQTFDLVQKIRSNVRRYPNGWGEAAPLTGLLYCADCGGKMYVHRTNNGKRISQYTCSNYTKVPCGTLCLTQHRINESAVLTLVSDTLRAIAEYSRNDRTEFIHTVQETQVAQQSADISKKRRRLATAQKRAGELEKLICKIYEDNALGKLPDTRYKALDAQYAKEQDTLEIEIAELEKAVTGYEQSQKSAEKFIALIDKYENFDTLTNTMLNEFVEKILVHERSRKGSQDTTQEIEIYFNFLGRYIPPSLQPVPLTTEEQEELRKKEERKDRLHQNYLKRKASGAQKRYEDKIKAKKKAEMDAKKSLIRAEDMKKGVYSTVSQLPKEEPRKGSIAASAAV

SEQ ID NO: 6862 - protein, 521 aa, synthetic construct
MTGKKAVVYARFSSDNQRDESIDAQLRAINEYADKNNIKIVNQFIDRAKSATSDKRPEFQNMIKFCEADTTGISMVIVHKLDRFSRDKYDSAMYKQKLKVKGIRVVSVLENLDNSPESLILESVIEGMAQYYSANLAREVTKGQKENALKALHNGGDAPLGYDVAHDKTYTVNEEEAQAVKIIFDRYIKGYSYSKIIDELNILGYKTKRGNKFGKNSLHGILNNEKYTGVYVFNKTQRKGVDGKRNGHKQKSEEEIIKIEGGMPQIIDKGVFKQAQDMIQKRKKTPGAHKATTTYLLTGLIKCGECGHAFQGNKRKDSYGNEYVSYRCGCRKQKRECNNREIKRDYLEEFILQELEKNILNDEAIPILSKALNEKLNDKNESNAELLKNLEQKLDKVNKEISNILNAIMNGIVNSMLKDKLDELEQVKFNLDLKMNELKIENKVVDGVGVTEDQIRGMFSRFKEFVLERNIPECKKFIGDYIKEVIVYKDHIEVIFNVVFCFVDNDITHDLHIITERGKIT

SEQ ID NO: 6863 - protein, 537 aa, synthetic construct
MKQQIYNTALYLRLSRDDELQGESSSITTQKSMLHLYAKEHHLNVIDEYIDDGWSGTNFERPSFQRMIEDIEAGKINCVVTKDLSRFGRNYIMTGQYTELYFPSHNVRYIAIDDGVDSEKGESEIAPFKNIINEWVARDTSRKVKSAFRTKFAEGAHYGAYAPLGYKKHPDIKGKLLIDDETKWIVEKIFSLAYQGYGSAKITKILREEKVPTASWLNFTRYGTFAHIFEGKPESKRYEWTIAHVKAILKSEVYIGNSVHNMQSTVSFKSKKKVRKPESEWFRVENTHEPIIDKEVFYRVQEQIKSRRRQTKEKATPIFAGLVKCADCGWSMRFGTNTANKTPYSYYACSFYGQFGKGYCSMHYIRYDVLYQAILERLQYWAKAVQQDEEKVLHKIQKAGNAERIREKKKKASALKKAENRQNEIDRLFAKMYEDRACEKITERNFVMLSGKYQKEQIELEQQITSLREELSKMEQDMIGAEKWVELIKEYSVPKELTAPLLNAMIEKILIHEATTNEDNERIQEIEIYYRFIGKVD

SEQ ID NO: 6864 - protein, 504 aa, synthetic construct
MDESIDAQLRAINEYADKNNIKIVNQFIDRAKSATSDKRPEFQNMIKFCESDTTGISMVIVHKLDRFSRDKYDSAMYKQKLKVKGIRVVSVLENLDNSPESLILESVIEGMAQYYSANLAREVAKGQKENALKALHNGGDAPLGYDVEHDKTYTVNQEEAQAVKIIFDRYIKGYSYSKIIDELNDLGYKTKRGNKFGKNSLHGILNNEKYTGVYVFNKTQRKGVDGKRNGHKQKNEDEIIKVEGGMPAIIDKEVFEQAQEMIQKRKKTPGAHKATTTYLLTGLIKCGECGHAFQGNKRKDSYGNEYVSYRCGCRKQKRDCNNREIKRDYLEEFILQELEKNILNDEAIPILSKALNEKLNDKNESNDELLKSLEQKLDKVNKEISNILNAIMNGIANNMLKDKLDELEQVKLNLDLKMNELKIENKVVDGIGVTEEQIRVMFSRFKEFVLERNIPECKKFIGDYIKEVIVYKDHVEVVFNVVFSFVNDEIAHNLHITVSRAKVK

SEQ ID NO: 6865 - protein, 452 aa, synthetic construct
MLRVALYIRVSTEEQVLNGDSIRTQIEALEQYSKENDFNIVGKYIDEGCSATNLKRPNLQRLLRDVEKDKVDLVLMTKIDRLSRGVKNYYKIMETFEKHKCDWKTILENYDSSTAAGRLHINIMLSVAENEAAQTSERIKFVFQDKLRRKEVISGTIPIGYKIENKHLVVDKEKIYIVKAIFDEYEKLGSIRSLIDIINNLHGELYSYNKIKNILKNELYIGIYNKRGVYVENYCEPIISKKQFKQIQRILEKNKKTTSNKNIHYHIFSGLLKCKECGYTLKGNSSNVREKLYLSYRCSTFYLNKKCIHNVTHNEKHIENYLLTNLKPQLHKHMVKLEAQNEKIRQNKKSNKKDEKKKIMKKLDKIKDLYLEDLIDKETYRKDYEKLQSQLDNITEEQESQIIDTSYIKKFLDIDINEMYNNLSRVERRRFWLSIIDYIEIDNDKNITINFI

SEQ ID NO: 6866 - protein, 558 aa, synthetic construct
MSKEKIKVYLYTRVSTSIQIDGYSLEAQKSRMKAFALYNDYEIVGEYEDAGKSGKSIEGRVQFTRMMEDIKSGKDGVSFVLVFKLSRFARNAADVLSTLQIMQDFGVNLICVEDGIDSSKDAGKLMISVLSAVAEIERENIRVQTMEGRIQKAREGKWNGGFAPYGYQLIDGKLLINEEEAIAIRTIFDQYVNTSIGANGLSKYLENHGIRKIPRQNGKNPLFDAGLIRKILKNPVYNGKIAFGRRTLEKVHGTRNEYRQVEQDDYLVAEGIHEAIIPDELWQAAQVKLKAQAKKYEHVNKGKNMRTHLLSGIVKCPICGAGMFGNKSIKYKKDGTKYKDFYYYGCKHRLMNRGHKCTYNKQIREELLDDAVAEVIIKLVSNPKFASMIQEKINMKVDTSAIENEIDNYQKELRKSHSTKFKLIEEIDNLDVDDKHYKRRKTDLDDRLYRMYDKIEELEGQLIEAKAKKETIEAEKLTGDNIYKVLIYFDKLYKVMNDVERRQLIEALISEIQIYEEKQPNGQWLKSITFKLPIIDEDLNISLDNDEQVETVVLLRRK

SEQ ID NO: 6867 - protein, 558 aa, synthetic construct
MSKEKIKVYLYTRVSTSIQIDGYSLEAQKSRMKAFALYNDYEIVGEYEDAGKSGKSIEGRVQFTRMMEDIKSGKDGVSFVLVFKLSRFARNAADVLSTLQIMQDFGVNLICVEDGIDSSKDAGKLMISVLSAVAEIERENIRVQTMEGRIQKAKEGKWNGGFAPYGYQLIDGKLIINEEEAIAIRTIFDQYVNTSIGANGLSKYLENHGIRKIPRQNGKNPLFDAGLIRKILKNPVYNGKIAFGRRTLEKVHGTRNEYRQVEQDDYLVAEGIHEAIIPDELWQAAQVKLKAQAKKYEHVNKGKNMRTHLLSGIVKCPICGAGMFGNKSIKYKKDGTKYKDFYYYGCKYRLMNRGHKCTYNKQIREELLDDAVAEVIIKLVSNPKFASMIQEKINMKVDTSAIENEIDNYQNELRKSHSTKYKLIEEIDNLDVEDKHYKRRKNDLDDRLYRMYDKIEELESQLIEAKAKKETIEVEKLTGDNIYKVLIYFDKLYKVMNDVERRQLIEALISEIQIYEEKQPNGQWLKSITFKLPIIDEDLNISLENDEQVETVAKIIKQ

SEQ ID NO: 6868 - protein, 452 aa, synthetic construct
MLRVALYIRVSTEEQVLNGDSIRTQIEALEQYSKENDFNIVGKYIDEGCSATNLKRPNLQRLLRDVEKDKVDLVLMTKIDRLSRGVKNYYKIMETFEKHKCDWKTILENYDSSTAAGRLHINIMLSVAENEAAQTSERIKFVFQDKLRRKEVISGTIPIGYKIENKHLVIDKEKKYIVKAIFDEYEKSGSVRTLIETINNLHGELYSYNKIKNILRNELYIGIYNKRGFYVEDYCEPIISKKQFKQIQRILEKNKKTTPNKNIHYHIFSGLLKCKECGYTLKGNSSNVGEKLYLSYRCSTFYLNKNCVHNVTHNEKHIENYLLTNLKPQLHKHMVKLEAQNEKIRQNKKSNKKDEKKKIMKKLDKIKDLYLEDLIDKETYRKDYEKLQSQLDNITEEQESQIIDTSYIKKFLDIDINEMYNNLSRVERRRFWLSIIDYIEIDNDKNITINFI

SEQ ID NO: 6869 - protein, 566 aa, synthetic construct
MKQSSKKTALGTAALYCRLSRDDNMDNESNSISNQKKILQKAAKDKGYTDTIFFVDDGITGTTMKRPGFQKMIAAIEAGYISAVFVKDLSRLGRNYIEVGKLTEEFFPLHDVRLVAVSDGVDSDEGEDDFTPFKNIMNEYYAKDISKKRRIVNKMKGNAGIPLSPPPYGYIKNPDDPRFWVVDPVAADVVRRIYRMALEGYGLAETAAALGADGIVNPTYYWRSKGTSRGGSKSTLEPTKWGHTTIKKILTTQEYCGDVINFKSYSKSYKMKRRIENPEENRAIFLNVHEAIIDRPTWEKVQALKAGTRRKRPTVTQEPSAFSGVMKCPECGGNLNFHFNQNNHDIKFFSCQNHNSGLRKCSSTHYIRLDFLEQVVLYEVHRLACFANEYENDFIKAMVGRSAKVAENERVRKKRELDGLLARDRELDTLFERLYEDNVSGKIDDARFAKMAKRYEQEQGENAGRIKALRLEVKKLEEKRMDVDDFLETVRHYTNAAKITKRMVAELIDHIEVYPAVREDGVTNQRVTIHYNCIGAFEVPDRRKIPERDILLETRKGVALSYAPAV

SEQ ID NO: 6870 - protein, 460 aa, synthetic construct
MDKIKRVALYIRVSTEEQVLHGNSIRTQTEALEQYAKDNNFIIVDKYIDEGYSATNLKRPNLQRMIEDVKNNKIDLVMITKIDRLSRGVKNYYKIMETLEKHKCDWKTILENYDSSTAAGRLHINIMLSVAENEASQTSERIKFVFNNKIRRGEVISGSTPFGYKIVDKHLVIDEEKAEIVRECFISYEKLTSMIKVLQHINNSFDANFSYNFIYKLLKNNIYTGTYIHNDLVVENFCNAIISSEQFNTVQKLLSKNTKVYNNKYLNSLGMQYIFSSMVICKCGRKMSGTYCLSSDKKIYKYYRCHVSQTTKKCSNTKRLSEKKLEAFLLKNVRRQLEEIAFGYESNNNKSKNKNNNNQLKNKIKKQINKLQDLYFDDLIDKEDYKLKYQKLNTQLIKLENNNSEEKKSIINLKNIRSFLEINFEKIYSDLSDQEKRTLWTSIIDTIVIDENKNLTINFL

SEQ ID NO: 6871 - protein, 503 aa, synthetic construct
MNNRIDAIYARQSVDKKDSISIESQIEFCKYELKGGNCKEYTDKGYSGKNTDRPKFQELVRDIKRGLIAKVVVYKLDRISRSILDFANMMELFQQYNVEFVSSTEKFDTSTPMGRAMLNICIVFAQLERETIQKRVTDAYYSRSQRGFKMGGKAPYGFHTEPIKMDGINTKKLVVNPDEAANIWLMFEMYAQPTTSYGDITRYFAEQGILFHGKELIRPTLAQMLRNPVYVQADLDVYEFFKSQGTVIVNDAADFTGMNGCYLYQGRDVKPSKKNDLKDQMLVLAPHEGIVPSDIWLTCRKKLMNNMKIQSARKATHTWLAGKIKCGNCGYALMSIFNPSGKQYLRCTKRLDNKSCPGCGKIITSELEAVVYQQMVKKLASYKTLTGRKKAAKANPKIAALQVELAHVDSEIEKLVDSLTGANNVLLSYVNVKIAELDGRKQELLARIAELTVEAISPEQVSQISGYLDTWENVSFDDKRRVVDLMITTIAATSDSLNITWKI

SEQ ID NO: 6872 - protein, 627 aa, synthetic construct
MTEKQGFLTALYERLSRDDELNGESNSISNQKKLLEQYAKEHGFTNLVHFTDDGISGTRFDRPGFLAMMKEVESGKVGTILIKDMSRMGRDYLKVGQYMELLRQKNVRLIAVNENVDSFREDDDFTPFRNIMNEWYARDTSKKIKSTFKAKGKSGKHVASTTPYGYLKDKDDPNIWIVDEEAAAVVRRIFHMTMDGYGPYQIARALKEDKVEIPAVHMAKKDAGLWKGRVEEIKDPYGWGSSTVAGILKKREYLGHTVNFKTRKHFKDKKSHYVSEDNWTVFENTQEAIIDQETFDNVQRIRSNVKRYPDGWGEAHPLTGLMYCADCGSKMYVHRVNNGKRVPQYTCSAYSKVPVGTLCRTQHRINADVVLELIKELLRAIAEYSQLNREEFLETVKKAQTSQQSSEITRLKSRLAEAKKRVQELEKLICRIYEDNILGKLPDKRYAILDGQYSKEQKDLSAEIADMEAELSGYEEGRRSAEKFIALVDKYQNFDELTTYMLNEFVEKIVVHERDRKGSIETTQEVEIYFNFIGKYLPPHFGEVEMTLEEIEEMKKREARKDRLHQNYLKRKANGKQQEYYERTKAKKKAAMDAKKEGIRQEDIAKGVFVPVSLLPPTEPKKGVASA

SEQ ID NO: 6873 - protein, 520 aa, synthetic construct
MVTAKAVIYARFSSDNQRDESIDAQVRAIEEYCKKNNIQIVKVFVDRAKSATSANRPEFQNMIKYCEADTTGISMVIVHKLDRFSRDKYDSAMYKQKLKVKGIRVVSVLENLDNSPESLILESVIEGMAQYYSANLAREVAKGQRENGLRAMHNGGDAPLGYDVTNDKRYAINKEEAQAVKIIFDMYINGYSYSNIIDKLNDLGYKTKRGNKFGKNSLYGILSNEKYTGVYVFNKTQRKGVNGKRNGHKQKSEDEIIKVEGGMPQIISKEVFLEAQEMMQKRKKTPGSHKATTLYILTGLIKCECGYAMQGNKRKDKYGNDYISYRCGCRKQKRDCNNKEIKRDYLEEFVLTELEKHVLNDEAIPALSKALNEKLRSKSNNNQEMLDNLKNKLEKINKEIENILNAIMNGIVNSMLKDKLDELEQVKLNLELKINELSIERNSEESVNITEDQIRSMFGQFKDFVLTRNLPECKKFISDYVKEVIVYRDRIEVIFNVVFSFVDNEITHDLHITTDREKIK

SEQ ID NO: 6874 - protein, 614 aa, synthetic construct
MKIKDKRFKITALYERLSKDDEVQGESNSIVNQKRMLTQYAEQHGYENIEHYTDDGWTGTNFDRPDWKRMLADIEAGKVGTVIVKDMSRIGRDYLQVGFYTEVMFREKGVHFIAISNGVDSERRESAEFAPFLNIMNEWYVRDTSRKITTVLKARGMSGKAHTTNRCCYGYKKSADNPDKWVIDEEAAEVVRRIFNMCLNGKGPYQIARELAEDKVERPEYYLGIRGRGVNIKSFDMEHPYMWRGGTVKTILTRMEYTGCTVNFRTKKESYKDKRPTKVDSSEWIIFEDTQEPIIDKHTWEIVQKLVDTPRRKGVFDENNPLTGKVFCADCGAKMYHHRNAQGIWKKNYFKAGEMIYHAPEDRYDCSNNIRGRQRYEKLCCSHSVTTKALETLVLETIKRTCDYAVENEAEFREKVCSISEEQQGELSVRLEKRLAKKQKRVSEVNRLIKKLYEDNISGKLNDKRFNAMLSDYESELETLEADIDRDNAELEGMSAKKTDVDVFMELVKKHTTFEELTPAILNEFVDKIMVYKAVGSGANRTQDVDIYLNYIGRFVVPEVVVELTEEEKLAEAKRQEKLEKKRASNRKYMARKREEARKAWAEIEAEKAKAVGQ

SEQ ID NO: 6875 - protein, 580 aa, synthetic construct
MKKVEIIKANRSLSDRNKNNMNSFLRVAAYCRVSTDSDDQINSYNSQVSYYTDVIKKNNEWNFVDIYADEGITGTQISKRTNFQRLINDCMNGEIDMVITKSISRFARNTLDTLKYVRMLKEKNIAVYFEDEKINTLTMDGELLLVVLSSVAQQEVENISANVKKGLKMKMSRGELVGFQGCLGYDYNVEDKSITINREEAEIVRYIFNRYIEGAGGRLIGNELEQLGYKTKRGSSTWHESTILGIIKNEKYKGDVLLGKTFTLDPISKRRLENYGEEDQFYLREHHEPIVSEEVFDKAQAIRLKRSIPRGSHETEGFKRQKYSRKYSFSCMIECAFCGGTFTRRCWHSGTNHSKVVWQCVVSTKKGKKYCEHSKGIPEKVFEDAFIESYRQLCGDNKQILEEFLARLSDTLNESNVEKRFLDLEKQIDTLDKKRKKLIDMRLEDIIDKESYEEKYDDLTIEIKKLSKEKQTLKASLINEKSIKARLKEFRKTLERNEVLEKFDRYVFESIVDKVIVGALNEDGIVDPYKITFVYKTGFDDKQDGHKFINKSLLEAYSKDNNDNKKKCSYTNNETCGNCS

SEQ ID NO: 6876 - protein, 460 aa, synthetic construct
MDKIKRVALYIRVSTEEQVLHGDSIRTQTEALEQYAKDNNFIIVDKYIDEGYSATNLKRPSLQRMLEDIKENKIDLILLTKIDRFSRGVKNFYKIIEILEKHKCDWKTILEDYDSGTAAGRLHINIMLSVAENEASQTSERIKFVFNNKIRRGEVISGSTPFGYKIVDKHLVIDEEKAEIVRECFISYEKLTSMIKVLQHINNSFNANFSYNFVYKLLRDNIYKGTYIRNDFVVENFCDAIISSEQFNTVQKLLSKNAKVYNNNFLNSLGMQYIFSGMVICKCGRKMSGTYSLSTDKRIYKYYRCHISQTTKKCDNTKRLSEKKLEIFLLKNVRKQLEEIAFRHESNNTKPKSKNNNKQLQDKIKKQINKLQDLYFDDLIDKENYKLKYQKLNTQLIELEKNKSEEKNSIINLQAIKSFLEINFEEIYADLNDQEKRTLWTSIIDTIVIDENKNPTINFL

SEQ ID NO: 6877 - protein, 613 aa, synthetic construct
MNTAVNEYNYRFKLTDYAQFDRNRARNVAIYGRVSTEHEAQLSALENQLQWYDDQVKYHPNWTVCERYIDEGITGTQAKKRPAFLKMIEDAKQGKFDLIVTREVCRFARNVVDTLVVTRELKGIGVEVFFIDDNIWTMDGDGELRLSLMATLAQEESRKTSERVKAGQKISRDNGVLYGNGNILGYDRVGDTYVINEEQAETVRMIYDLYLQGYGSMKIAKILTERKRKTASGLIKWSVSNIMRAIKNATYTGTKCYNKSRSNNFLEQKRINNLDMSTYEYVEGDFPAIISQEIWDKAQAIRESRVKPVCVSAGKNTHSKRDSRDIWVNKLRCSCGSSYRKNKWHTKLDGKTSYGYQCYNQLNNGIKRKRAEIGLDTEGYCDSRMITDWKLDFMAKALLEHLWTERKESVLIALDLIKCYYKEEKSNETQSDTVTIQAKLDKANSRLTNLIAMRADGEISKDEYQAMRSPVDEEIKKLQKALDEIPQEKSNPKGLDIEGIRSTLNSLVDFSGSTISHDVVNRFVYLITPTSDTTFDWYVNLNGTADVKATFTAEGRKKNCIIKLEEIEKISSVHRGENEDNAHFIKNPHIFTYLHRQLSLTSNTLISEKNIIT

SEQ ID NO: 6878 - protein, 556 aa, synthetic construct
MAMMNEMEYRTIGSALAGGYRAAVYCRLSKDDDLQGESASIANQRDMLEKYCEKQGWEVVAVYQDDGFTGLNMERPDLQRMLRAIERRQINLVITKDLSRLGRNYLQTGHLIEDFFPRNGVRYIAMNDGIDTLRDNNDIAPFKNILNEMYSKDISKKVHSSYLLKAQKGQFTGCLAPFGYRKDPEDKNHLLIDEETAPIVRLIFGYALNGHGPNYIRRRLEEEKIPCPTWWNRERGLRNTRTKWEKKDPENGRYMWDFSVIKDLLMNPVYTGAIASQKKDYRFKIGTIGEKKPEDWIVVEGQHEPLIDRMSFDIVQNKLKSRQRPGQTNEISLFAGLIKCGECGKSLTVRYTNAKHPQRIYSCKTYNAFGKNHCTQHRIDYCTLYSHVLRKIRECARAALMDGEAVADRLTNTCEAEKREQREAMERSLTRDEERIEVLDKMVMRLYEDMIAGRISEQNFNTMLEKTQTEQTELKTKVSEGRKRLSDEVQLANDAKQWVEAIQEYANITELDAATLNRLIKEIVVHERIDEDKTRHISIEIHFNLKPIPEVEQVTA

SEQ ID NO: 6879 - protein, 540 aa, synthetic construct
MKQPYNTTIYNTALYLRLSRDDELQGESGSIQTQRMMLRQYAAEHGLTVVDEYIDDGWSGTNFERPSFQRMIDDIEDGKINCVVTKDLSRLGRNYILTGQYTEIYFPSKGVRYIAINDNVDTINGESELAPFLNILNEMHARQTSKKVKAAMHTRFANGAHYGAYAPLGYVKDPDKKGHLLIDPETRWIVEKIFDLAVHGRGAASITRILVEEKVPTPGWLNYERYGTFANIYAGAPAEKAYAWTIAQVKSILKEETYIGHSVHNKQSNISFKNKKKVRKPQEEWYRVENTHEAIISEEVFQKVQELIASRRRKRRNGTTQIFAGLIKCADCGWSLAYGENKQNKNPYGYYHCSKNGQGLRQCSMHYIRYDVLYAYVLARLQYWSMLAQKDEDKLLKRLLNASDRERNSAKKKQAAELKKAEKRKAEVDGLFAKMYEDWSAGRITEYNFNMLSEKYQNEQKELETKIRQLHEMMEAAVQTAADAEKWIALMKQYVNPVELTAELLNTLIEKITVHEAVKGEDGSREQEVEIYYRFIGKID

SEQ ID NO: 6880 - protein, 562 aa, synthetic construct
MATNKNIQGQEEKITALYCRLSQDDNLEGESNSISNQKEILMTYAKKNGYLHPQFFVDDGISGTTFNRPGFQEMESLIEAGKVSTVIVKDLSRFGREHLLCGHYTEIVYPTLGVNFIAIQENVDTTKGIGTEMMPFHNIFNEWYAAQTSKKIRAVNEMKASKGMRISSTVPYGYKKIEGDKEQWYIDEPAAEIVRKIFNLCISGKGPSQIARQLETEKVLTPTAYFNSVGKKTSNLMPANIYAWRSNSIVHILENRQYTGCTVNGKSTTVSYKVHKKIEKSQEDYQIIPNTQEAIISENTWLRVQELRRNKRRNTATGRKSLFSGLVYCADCGSKLHFCASKSLKKNQEFWRCSSYKDGRGTCTIHFIRDVVLEAIVKEAISELADFVRCYNSVFLYLISEKKGAESINREKSLRAKTESAKQRISDLDKLFSRIYEDNILGKLSDDRYSRMANEYEAEQKRLISEVEENEKALIELQKQTVDMKMLYQGLMEFTEMKQLTPTVVNKLIERIEIHNNEKKHSHNNVKVDIYFTAVGLFDIPTEQQLLKTMERVEQKNAEKSA

SEQ ID NO: 6881 - protein, 540 aa, synthetic construct
MKQPYNTTIYNTALYLRLSRDDELQGESGSIQTQRMMLRQYAAEHGLTVVDEYIDDGWSGTNFERPSFQRMIDDIEDGKINCVVTKDLSRLGRNYILTGQYTEIYFPSKGVRYIAINDNVDTINGESELAPFLNILNEMHARQTSKKVKAAMHTRFANGAHYGAYAPLGYVKDPDKKGHLLIDPETRWIVEKIFDLAVHGRGAASITRILVEEKVPTPGWLNYERYGTFANIYAGAPAEKAYAWTIAQVKSILKEETYIGHSIHNKQSNISFKNKKKVRKPQEEWYRVENTHEAIISEEVFQKVQELIASRRRKRRNGTTQIFAGLIKCADCGWSLAYGENKQNKNPYGYYHCSKNGQGLRQCSMHYIRYDVLYAYVLARLQYWSMLAQKDEDNLLKRLLNASDRERNSAKKKQAAELKKAEKRKAEVDGLFAKMYEDWSAGRITEYNFNMLSEKYQNEQKELETKIRQLHETMEAAVQTAADAEKWIALMKQYVNPVELTAELLNTLIEKITVHEAVKGEHGSREQEVEIYYRFIGKID

SEQ ID NO: 6882 - protein, 554 aa, synthetic construct
MMNGYEYTGMDAILAGSFRAAIYCRLSKDDDLDGESASIANQRDMLESYCEKQGWEVVAVYQDDGYTGLNMERPDLKRMLKAIERRQINLVITKDLSRLGRNYLQTGTLIEDFFPRHGVRYIAMNDGIDTMQDNNDIAPFKNILNEMYSKDISKKVHSSYLLKAQQGQFTGCVAPFGYRKDPEDKNHLLVDEETAPIVQQIFLWALEGHGPNFIRRRLEEQKVPCPTWWNRERGFRNVRTKWEKKDPENGRYMWDFSVIKDILMNPVYTGAIASQKKDYRFKIGTIGEKKPQDWIVVEERHEPLIDSKSFAIVQDKLKSRQRPRQNGETSLFAGLIKCGECGKSLTIRTTHAKHPQQIYACKTYGAFGKNHCTQHRVEYDTLYHLVLNKIRECAKAALTDGEAIAGKLTNTCEAEQKGQREALERSLTKDEERIEVLEKMVLRLYEDMVVGRISEANFNLMLDKTQKEQAELKERVAQGRKKLADEMRLAMDAKQWVDAIQEYADITELDAATLNRLIKEIVVHEHIDSDKTRHISIEIHFNLKPIPEVEQVTA

SEQ ID NO: 6883 - protein, 587 aa, synthetic construct
MNHKKAIAYIRVSTTHQDVERQRIKFKEYCKNNNLQANEEIIDFGISGAKSDRPGYLRLQALTGKDADILVVSELSRLSRQEEILETINIIQNIVYNGLSLIFLDAPSKVYEAHSTLDITELIILLVGAFRAAQDRKEIKRKNQEGKQALLSQNPYAVVDAKIPYGYNAIYNPNGSRPKKILIENEEEVANVKKIFQLALEGYSLGKIAKYFNNRNILFRGHFVTRQLLSVLVRNILYKGIRRRIHSFDRKDNPNIIENKITPIISESDFERVNQMLKDNHKFCSTGNNYFNTLRGIIKCRCGRGMMVKDKGYASGIKKMVYRCNDVSAKDNPIHCQYKDEISYQFTNEVIFNVFKYIHNTDEIFIFMAKTEQKIYEIDEEIKGIERKIENKNIEIESLNKDNKRLIERYIHAKSQSIANAIQDEQLTIENKIHKLEDEISHCNKEKVKLITNKESLINYIDTEELSSLGNEERAELFKKHLEKVIYLPVTLMQGFYIITFKSKMQRIVAIRKTAKSPIAAILPDGYTVDMNTKLITEYYQSIQTGGCSYPISSSFKQLTIQEYFKKLPQIGNFGILEIDYSYRKGK

SEQ ID NO: 6884 - protein, 544 aa, synthetic construct
MQVDGYSLDAQREKLKRYAEFQNMEIVNEYSDEGKSGKSVEGRPEFQRMLDNIENGTDEVQFVLVFKLSRFGRNAADVLNSLQRMQDFGVNLICVEDGIDSSKDSGKLMISVLSAVAEIERENILVQTMEGRKQKAREGKWNGGFAPYGYELVNGELQIAEDEAEIIRLIYDKFIHTNMGISAIAAWLNQHGYKKKKRQNNTLDAFAASFIKGVLDNPVYCGKLAYGRRKNEKVSGTRNEYRIVKQENYMLHDGIHEGIISETDWELAHQKREKTGVKYEKTHSLEHEHILSGILRCPLCGSGMYGNVNRKKKKDGTLYKDYFYYACKHRRLVDGHKCGYRKQWSEEKINNAVEEVIRKLVKNPKFEEAILNKIGSRIDTEEIEKEIERLEKQHRQLTGAKARLGQQMDSLDIMDKFYEKKYQDMETRLYRLYDEIEGVENSIEEVKNRLLNIEQQKISEENVYQFLLYFDKLYDKFTDLEKKEFLNSFVEQVDIYEQEQPDGRFLKHIKFRFPVYFGDRETQELCWDKESTVESIVLLQKDNI

SEQ ID NO: 6885 - protein, 617 aa, synthetic construct
MEIKFIKGNKVALGAFRKTVRKLRVAAYCRVSTDSEDQIKSYNSMIKYYTDLIEKNDEWEFVGIYADKAITGTNVKKRNDFKRLIEDCTNGEIDMIITKSIPRFARNTLDTLKYVRMLKEMNVAVYFEVEKINTLKDGEFLTTILSSVAQQEVENTSAYVKKGLKMKMKRGEMVGSHRCFGYEVDKETRQLKIVEEEATAVRYIFNRYLEGAGGRVIANELNKKGIFTINNVEWSAPTVLGIIKNEKYKGDMLQGKTFTIDPISKRRLHNNGEEDKYYVIDHHEPIVSKEIFDKAQKLRKAKSTKKLANGTDQVVINRRYAFSSMLKCGYCGKNLVRKQWHSNSKYSKAVWYCSEPCRKGVKYCPNAKAISESVLEEAFVESYNRLCDNKQDVLEDLLAKIKTILKKEKIEEAIKQTDESIQKIKVRRNKLLNEYLNGTISQDIYEENERLLKTTLLNKKNELKYLKKQLDEKDNISNRISEFRKNIMNNPILEEFDRVVFESIVEKAIVGGFDENGNKDPYKITFIYKTGIQDEIKEAKKKFVAKAYEQKEKDTEMYSFSSNDQNNMCTNDNGNIDRNIHGNHCSNGTNRDQCGTGSTLKCCDRWSSSDRRFLFWR

SEQ ID NO: 6886 - protein, 540 aa, synthetic construct
MKQPYNTTIYNTALYMRLSRDDELQGESGSIQTQRMMLRQYAAEHGLNVIDEYIDDGWSGTNFDRPDFQRMIDDIEDGKINCVVTKDLSRLGRNYILTGQYTEIYFPSKGVRYIAVNDNVDTINGENELAPFLNILNEMHARQTSKKVKAAMRTRFANGAHYGAYAPLGYVKDPDKKGHLLVDPETRWIIEKIFDLAVHGRGAASITRILVEEKVPTPGWLNFQRYGTFANIYAGAPEEKAYAWTIAQVKSILKEETYIGHSVHNKQTNISFKNKKKVRKPKEEWYRVENTHEAIISEDVFRQVQEQICNRRRRQKNGTTQIFSGLVKCADCGWSLAYGENRQNSKPYGHYHCSKYGQGLHQCSMHYIRYDVLYAYVLSRLQYWSVLAQQDGDKLLKRLLNASDKERNTARKRQTAELKKAEKRKAEVDTLFAKMYEDWSAGRITEYNFNMLSEKYQGEQRELDAKIERLHEAMEAAAQTAVDAEKWIGLMKQYVNPTELTAELLNTLIEKILVHEAVKSEDGSREQEVEIFYRFIGKIE

SEQ ID NO: 6887 - protein, 472 aa, synthetic construct
MKVAIYIRVSTDEQAKEGYSIPAQREKLAAYCKAQGWNEFEFYPDEGISGKDMNRKYLQLMLKDIEAGKINRVLVYKLDRLSRSQRDTLTLIEDYFLKNKVEFVSLTENLDTSTPFGRAMIGILSAFAQLEREQIGERVSFAQEKKVRSGKWKGGMPPYGYKLVDKELVIDDEEARTVRLIFKLSRRFGFLTIAKRLKGKTRKGGDWHVDTVRDIANNPVYAGYLTYNKDDYKKPPREKKLFEGVHERIISREEFWELQDILDKRRTFGGKRETSNYYFSSILKCGRCGHSMSGHKAGTNNKDKCYRCSGKKAGKKCTSHLIKEENLVKTVLLNLDDLLKNIQGPAENNDISSEIVRELESELKNVQKLMNKQKMMYENDIISIEELIKKTDTLREQEKQLQAEFKKYTIPIENAEEIKFLAENISSLWGYADDYERKEMMSTLFKQLVIDTSGDYKRGTGDHREILILSAK

SEQ ID NO: 6888 - protein, 530 aa, synthetic construct
MSRAKTAKNVTTIPATISRFTAAPINEQRKRRTAGYARVSTDSEEQFTSYEAQVDYYTNYIKSRDDWEFVDVYTDEGISATNTKKREGFKRMVEDALDGKIDLIVTKSVSRFARNTVDSLTTVRQLKEKGIEIYFEKENIWTLDSKGELLITIMSSLAQEESRSISENVTWGQRKRFSDGKVTVPFGHFLGYDRGEDGNLVLNEKEAVIVRHIFALFLGGYSPYKIAKTLTAEGILSPGKKAKWNAATVRRMLKNEKYKGDALLQKSYTTDFLTKKKKINEGEIPQYYVKNNHEAIIDPAVFDMVQIELENRNPGTNRRSGVSIFSSRIKCGECGSWYGSKIWHSTSKYRRTIYQCNRKYDKGSHCRTPHLDEETIKTLFISAVNKLLSDKEEILGNFELIKSTVFDTADLEKEQAELQNELEVVAGMIQQAIDDNAHFALDQGEYQERYNGLVDRFDLAKARHTAVTEEITDKQTRLSTINTFLGTLSKQDNLLTEFDEKLWCSLVDYATVYDKDDVRFTFKDSTEIQA

SEQ ID NO: 6889 - protein, 574 aa, synthetic construct
MRKVSKIEAKLPQLPERKKVAAYARVSEEKGRTLHSLSAQISFYSSYIQKHREWQYAGVYADEGISGTTDNRAEFRRLLEDCEQGKIDIILTKSISRFARNTVDLLETVRHLKELGIEVRFEKEGINSLSEDGELMLTLLASFAQEESRSTSENVKWAIRKKFQQGIPNSFNVYGYRWDGERFIVEPEEAKIVRLIFDNFLKGLSAEQTEVQLEEMGVKSYTGGHFSNTSIRAILRNEKYTGNMLLQKVFIPDHITHKSKNNDGELPQYWVEDSHEAIISLETYEKVQAEIARRRELGVFANKSINTTCFTSKVKCGNCGVSYRRSGKRQRKDSNTVYYVWICQTKDRKSSRECDSKTVPEKMLQKVSAQVLGLDEFDEDVFSEEIEKIVVNGKDELIFHFHDGEIITQHWKSTARTDWWIPEARAAKSAYSKMNPRSSGTITCYSGKIGCSKCGQNLRRNTSTRVSGEKAHHWRCPPHNNCGHSGLEENLLKSISADVLGIDEFDEAAFTDKVDRITVVSNEELIFHLKDGSKVTRQWQFKRRQPAWSEERKQRQSKKMTQVWRDKHEQSENS

SEQ ID NO: 6890 - protein, 558 aa, synthetic construct
MKKEKIKVYTYKRVSTAMQIDGYSLDAQRARMKAYADFNDYEIVGEYEDAGKSGKSIEGRLQFRQMMEDVKSGKDNISYVLVFKLSRFGRNAADVLSTFQVMQDFGVNLICVEDGIDSSKDAGKLMISVLSAVAEIERENIRVQTMEGRIQKAREGKWNGGFAPYGYQLVNGKLEINEEEAVAVRTIYDQYVNTDIGSNGISKYLENHGIHKIQRQNGKNPLFDAHLVRLILKNPVYCGKIAYGRRKTEKVHGTRNEYHLVEQDNFLLVDGLHEAIIPEDVWNAAQVKLVAQAKKYEHVNKGKNERTHLLSGIVKCPICGAGMYGNKSIKHKKDGTKYKDFFYYGCKHRSMQRGHKCDYKKQIREELLDDAVAEVIVKLVSNPNFATMMQEKINMKVDTTAIDQEIENYEKQLRQDYSIKSKLMEEIDNLDPDDRHYIRRKADLDDRLYRMYDKIEELESQLIDARAKKTSIEAEKITGDNIYKVLICFDKLYFAMNDVERRQLIEALIAEIQIYEERKPNGQWLKSIRFKLPIIENDLRIGLDNSEHVETVALLRRK

SEQ ID NO: 6891 - protein, 663 aa, synthetic construct
MSKEKIKVYLYTRVSTSIQIDGYSLEAQKSRMKAFALYNDYEIVGEYEDAGKSGKSIEGRVQFTRMMEDIKSGKDGVSFVLVFKLSRFARNAADVLSTLQIMQDFGVNLICVEDGIDSSKDAGKLMISVLSAVAEIERENIRVQTMEGRIQKAKEGKWNGGFAPYGYQLIDGKLIINEEEAIAIRTIFDQYVNTSIGANGLSKYLENHGIRKIPRQNGKNPLFDAGLIRKILKNPVYNGKIAFGRRTLEKVHGTRNEYRQVEQDDYLVAEGIHEAIIPDELWQAAQVKLKAQAKKYEHVNKGKNMRTHLLSGIVKCPICGAGMFGNKSIKYKKDGTKYKDFYYYGCKHRLMNRGHKCTYNKQIREELLDDAVAEVIIKLVSNPKFASMIQEKINMKVDTSAIENEIDNYQNELRKSHSTKYKLIEEIDNLDVEDKHYKRRKNDLDDRLYRMYDKIEELESQLIEAKAKKETIEVEKLTGDNIYKVLIYFDKLYKVMNDVERRQLIEALISEIQIYEEKQPNGQWLKSITFKLPIIDEDLNISLENDEQVETVVLLSHKKPDGHINVKVEFGEGEGKVPLDDIAQRAESYKPKERVTYKMIKEYIEAKYGFKVHTAYIAEVKRDLGLPMYDAPNAVEELKQPRKHPTAEKVEAIKDALKHFEVI

SEQ ID NO: 6892 - protein, 537 aa, synthetic construct
MKQQIYNTALYLRLSRDDELQGESSSITTQRSMLRLYAKEHHLNVIDEYIDDGWSGTNFERPSFQRMIEDIEAGKINCVVTKDLSRLGRNYIMTGQYTELYFPSHNVRYIAIDDGVDSEKGESEIAPFKNIINEWVARDTSRKVKSAFKTKFAEGAYYGAYAPLGYKKHPDIKGKLLVDEETKWIVEKIFSLAYQGYGSAKITKVLREEKVPTASWLNFTRYGTFAHIFEGKPDSKRYEWTIAHVKAILKSEVYIGNSVHNRQSTVSFKSKKKVRKPESEWFRVENTHEPIIDKEVFYRVQEQIKSRRRQTKEKATPIFAGLVKCADCGWSMRFATNKANKTPYSYYACSYYGQFGKGTCSMHYIRYDVLYQAVLERLQYWAKAVQQDEEKVLNKIQKAGNAERIREKKKKASALKKAENRQNEIDRLFAKMYEDRACEKITERNFIMLSGKYQKEQIELEQQITNLREELSKMEQDMIGAEKWIELIKEYSVPKELTAPLLNAMIEKILIHEATTNEDKERIQEIEIYYRFIGKVD

SEQ ID NO: 6893 - protein, 449 aa, synthetic construct
MKQVIGYLRQSTMKQQSLAAQKQAIEAIAEKHHIQHINFYSDKQSGRKDNRSGYRQMTQLIQQGQCDILCCYRLNRLHRNLKNALKLIKLCQTYHVHILSVHDGYFDMDQAFDRFKLNIFISLAELESDNIGEQVRNGLQEKAKQGRLITTHAPFGYEYHNGAFIINQNESPTVKAVFNYYIKGHGYKKIAQLLEEDNTYINRQPYQVRNIIINPNYCGRVNNQYGQFDNMFPSIVSTSIYEQAQRLRSQKQIKQTSSDNQLKQKIKCPCCNTTLTNMTVRKKNHILRYYVCPKNMNASRFVCDFKGINAQTLEDKVLEVCKDFYQNQRIYTKIKGAIDKRIKRQRNIEKHHTLTQEQLIEKLAQGIIDAETFREQTQSLRQQPQRTTSINGHQIQHTIQNIIQKRFTLNILYPYIETIHITKDKNLIGIYFKNEPLNIVNQTMQSSIA

SEQ ID NO: 6894 - protein, 460 aa, synthetic construct
MDKIKRVALYIRVSTEEQVLHGDSIRTQTEALEQYAKDNNFVIVDKYIDEGYSATNLKRPNLQRMIEDVKNNKIDLVMITKIDRLSRGVKNYYKIMEILEKHKCDWKTILENYDSSTAAGRLHINIMLSVAENEASQTSERIKFVFNNKIRRGEVISGSTPFGYKIVDKHLVIDEEKAEIVRECFTSYEKLTSMIKVLQHINNSFNANFSYNFIYKLLKNNIYTGTYIHNNLAVENFCDAIISSEQFNTVQKLLSKNTKVYNNKYLNSLGMQYIFSSMVICKCGRKMSGTYCLSSDKKIYKYYRCHVSQTTKKCNNTKRLSEKKLEDFLLKNVRRQLEEIAFGYESNNNKSKSKNNNNQLKNKIKKQINKLQDLYFDDLIDKEDYKLKYQKLNTQLIKLEKNNSEEKKSIINLKNIRSFLEINFEKIYSDLSDQEKRTLWTSIIDTIVIDENKNLTINFL

SEQ ID NO: 6895 - protein, 546 aa, synthetic construct
MIGTALAGGFRAAIYCRLSKDDDLQGESASIANQRDMLEKFCEKQGWEVAAVYQDDGFTGLNMERPDLKRMLKAIERKQINLVITKDLSRLGRNYLQTGQLIEDFFPRNGVRYIAMNDGIDTMRDNNDIAPFKNILNEMYSKDISKKVHSSYVLKAQKGQFTGCLAPFGYKKDPEDRNRLLVDEETAPVVRLIFGYALDGHGPNYIRRRLEEEKHPCPTWWNRQRGHRNIRTKWEKKDPENGRYIWDFTVIKEILMNPVYTGAIASQKTEYRFKIGTIRDKKPEDWIVVEGTHEPLVDKKSFAIVQEKLKSRQRPGQSGEPSLFAGLLKCGECGKSLTVRYTNAKHPQRIYSCKTYNAFGKQHCTQHRIDYDTLYALVLNKIRECAAAALTDSEAVAGRLTDTCEAEQKGQREAMERTLAKDEERIEVLEKMVLRLYEDMVAGRITDANFNLLLEKTQKEQAELKAKVEKGRKHLADEIRLAVDARQWVESIQEYRDITELDASTLNRLIKEIVVHETIGSDKTRHISIEIHFNLKPIPEVEQVTG

SEQ ID NO: 6896 - protein, 460 aa, synthetic construct
MDKIKRVALYIRVSTEEQVLHGDSIRTQTEALEQYAKDNNFIIVDKYIDEGYSATNLKRPNLQRMIEDVKNNKIDLVMITKIDRLSRGVKNYYKIMETLEKHKCDWKTILENYDSSTAAGRLHINIMLSVAENEASQTSERIKFVFNNKIRRGEVISGSTPFGYKIVDKHLVIDEEKAEIVRECFISYEKLTSMIKVLQHINNSFDANFSYNFIYKLLKNNIYTGTYIHNDLVVENFCNAIISSEQFNTVQKLLSKNTKVYNNKYLNSLGMQYIFSSMVICKCGRKMSGTYCLSSDKKIYKYYRCHVSQTTKKCSNTKRLSEKKLEAFLLKNVRRQLEEIAFGYESNNNKSKNKNNNNQLKNKIKKQINKLQDLYFDDLIDKEDYKLKYQKLNTQLIKLENNNSEEKKSIINLKNIRSFLEINFEKIYSDLSDQEKRTLWTSIIDTIVIDENKNLTINFL

SEQ ID NO: 6897 - protein, 588 aa, synthetic construct
MKEVEIINKNNHLENRRRGKYIDRKRVAAYCRVSTDSEDQLNSYKSQVSYYTDLINNNIEWCMVDIYADEAITGTQVNKREEFQRMINDCMNNEIDMIITKSISRFARNTLDTLKYVRMLKEKNIAVYFEDEKINTLTMDGELLLVVLSSVAQQEVENISANVKKGLKMKMRRGELVGFQGCLGYDYHKEDKTLTINEKEAEIVKYIFNRYIEGAGGSIIGQELENLGYKTKYGSTTWSNSTVLGIIKNEKYMVDVLLGKTFTVDPISKRRLDNLGEEEKYYVKNNHEPIISREIFDKAHEILNRRSKNRGKYEGEVTKREKYSRKYAFSCMMECGFCGGTLTRRNWHSGSEYSKVIWQCVVATKKGKKYCSESKGIPERVIENAFVESYRLLCDEKKSVLEELLSRINDTVGSSEVNNKIRKIEKELSAIEKKINNLVDMRLDDIIEKETYEIKYKELIDNQEKLLNERNKLNIVVKNEKSMKQRLKEFKKTLEENAVLDKFDRSVFESVVEKVIIGEKNKDGENDPTKITFIYKTGFKNTLSSNEFKIPRKNARGRHKRKELCLHGNNEVENLCSHSSSNTCGNCS

SEQ ID NO: 6898 - protein, 537 aa, synthetic construct
MKQQIYNTALYLRLSRDDELQGESSSITTQRSMLRLYAKEHHLNVIDEYIDDGWSGTNFERPSFQRMIEDIEAGKINCVVTKDLSRLGRNYIMTGQYTELYFPSHNVRYIAIDDGVDSEKGESEIAPFKNIINEWVARDTSRKVKSAFKTKFAEGAHYGAYAPLGYKKHPDIKGKLLVDEETKWIIEKIFSLAYQGYGSAKITKILREEKVPTASWLNFTRYGTFAHIFEGKPDSKRYEWTIAHVKAILKSEVYIGNSVHNMQSTVSFKSKKKVRKPESEWFRVENTHEPIIDKEAFYRVQEQIKSRRRQTKEKATPIFAGLVKCADCGWSMRFATNKANKTPYSYYACSYYGQFGKGNCSMHYIRYDVLYQAVLERLQYWAKAVQQDEEEVLHKIQKVGNAERIREKKKKASALKKAENRQNEIDRLFAKMYEDRACEKITERNFIMLSGKYQKEQIELEQQITSLREELSKMEQDMIGAEKWIELIKEYSVPKELTAPLLNAMIEKILIHEATTNEENERIQEIEIYYRFIGKVD

SEQ ID NO: 6899 - protein, 560 aa, synthetic construct
MKKEKIKVYTYKRVSTAMQIDGYSLDAQRARMKAYADFNDYEIVGEYEDAGKSGKSIEGRLQFRQMMEDIKSGKDNISYVLVFKLSRFGRNAADVLSTLQVMQDFGVNLICVEDGIDSSKDAGKLMISVLSAVAEIERENIRVQTMEGRIQKAREGKWNGGFAPYGYQLVNGKLEINEEEAVAVRTIYDQYVNTDIGSNGISKYLENHGIRKIQRQNGKNPLFDAHLVRLILKNPVYCGKIAYGRRKTEKVHGTRNEYHLVEQDNFLLVDGLHEAIIPEDVWNAAQVKLVAQAKKYEHVNKGKNERTHLLSGIVKCPICGAGMYGNKSIKHKKDGTKYKDFFYYGCKHRSMQRGHKCDYKKQIREELLDDAVAEVIVKLVSNPNFATMMQEKINMKVDTTAIDQEIENYEKQLRQDYSIKSKLMEEIDNLDPDDRHYIRRKADLDDRLYRMYDKIEELESQLIDARAKKTSIEAEKITGDNIYKVLICFDKLYFAMNDVERRQLIEALIAEIQIYEERKPNGQWLKSIRFKLPIIENDLRIGLDNSEHVETCVLLQRRTM

SEQ ID NO: 6900 - protein, 493 aa, synthetic construct
MDSRIDAIYGRQSIDKKDSISIESQFEFCRYELKGGEGKEYKDKGYSGKNIERPDFQRLLQDIRLGLIKRVIVYKLDRISRSIVDFAKLMELFKQYDVEFVSCTEKFDTSTPMGRAMLNICIVFAQLERESIQMRVQDAFYSRCTKGYYMRGRTPYGFDTEPIVMDGIKTKKLVENAEMDFAELMYQMYAEPGNSYGDISRYFAENDIKVYDKSLKRGFIAQLLRNPVYVQADMDIYEYFKAQGVKIESPPEMFTGDNSCYLYQGREGEEPILVIAPHQGRIPSQLWLTVQRKLSQNTTFQNGRKCHNTWLAGKIKCGRCGYALASLNARNGVTYLRCKQRADNKSCEGAGTLTAQSMEAFVYGEMVKKMRKFHTLKGGKEQSYNPKLTAARVALAKTESEIEKLLDTLSGANPLLLQYANTRIEELDAERQKQLRLVADLTANSVSASQIDSITGYLDDWESVSFDDKRKVVDILISQIDATSESVTIHWKI

SEQ ID NO: 6901 - protein, 507 aa, synthetic construct
MKRAISYIRFSSEKQSRGDSLRRQSKMVTDWLKAHPEYYLDQDLSFRDLGVSGFTGKHLKGGLGDFLTAIEKGLVKAGDTLLIESLDRLSRQNVDRASELLRNILRSGVDVVTLSDGEHYTRESLKDPLALIKSILIMQRSHEESLRKSERIQAAWNRKKELISEGIKISKRCPAWLRLNDDRKSFSVIPEKVETVKRCFQLRLEGKSIWEIVRTLNAEGHQTLNQYKAGKFGQTSVQDLLKNRSVIGYFTPKGCEEISGYFPPIIPETDFYKVQQLSYSRYGRKPASDKPLSVNLFKGVIRCSECGHALIITGFSDTRSGIYRCPLRNENRCSAKGLSRKQTDGTLLTLLSRLDRFDSDMTNVIDTLKLHREHISNNIEKLVQLSLEIEDLSAITSKLKQLKNELSQVDADIEKETQRLKSIDVGCLSDCDLSTKAGRIEAQLIIRSAVKEVVLNTAKRRCKVTFHNGKSITLPITENPSEDVTEAIQSLSEVTERGLIDVDVVEI

SEQ ID NO: 6902 - protein, 547 aa, synthetic construct
MKLLVTYIRWSTKEQDSGDSLRRQTNLIDAFYSKHKNDYYLLPAHRYVDKGKSGFHQQHKNQGSDFRRMFENVMSGAIPEGSLIVVENFDRFSRADIDTAIDDVRQILRKGVSILTLGDGELYDKSALTDPVKLIKHIIIAERAHQESLVKQKRIAQVWNHKTQLARELKKPMGKQAPGWLELSDDGSHYIVDEDKASLVNIIYDKRLSGMSMFAICKWLNEQGYPTINQRKVRISKTKKPDGNWSALSVKHILTSRSVLGYLPAKISTEDRKTVLREEIEGFYPQIVTDSKFYAVQQLLEETGKGKTSSGEHWLYVNILKGLIRCKCGLVMTPTGIRKPVYQGTYRCNGNKESRCSYGTVSRKLLDTQLCSRLFSKLSQLHDEATDTAKLDELQRRLNTVDGELEKLTETLIQLPNITQIQEALRVKQGEKDELIVQLSREKARVKSVSSLDLSGLDMESVEGRTEAQIIIKRLVKEIVVSGNEKLVDIYLHNGNMIRGFPLDGKDDHTLTLEEATDEMQSLDDMLIFGEPVTRIYPAGDMEEVDA

SEQ ID NO: 6903 - protein, 498 aa, synthetic construct
MKSKAWLYARFSSSQQADGDSINRQVKAAQQWCGANGVELQQTSFRDLGVSGWKSIKRPMFEQLIKAMQEGKIPRGSYVLFESTDRLSRRGWEHTRELIKQITVQHGCNLVILDKNQVYTKANVNDVVQNILLMFSADLAEKESQRKSDLVSAAYKSKRQKGDVSRWPFWLDKVDDKFVFNEKAEIIKLIVDLRLQGIGALGIAAELNRRGYKSSRGSNWGHTSVRIAIENSALYGTKDFFSTKSKKDFDESGNEIRTSNSELVSSISNAFPAICDFDTWQKIQIKGEKPGRKSNGTAFHNMIFCKCGAAMSVQIGSGGEKYRKCSRSKVGACNQKMIRNFDQTLVECLGRITYKSVSNPVVSKLPELTERLAKLEKVKAMLVEIGDVDSLKEVYQDITSVKNEIAAESKIVSLPTTEIKEVFQLDINEQRLILKQLIEKVMVDRTNGLCKIKVKLTNGHKKVFGVNIGTGKKSGKNTIVFESDTEKFLAEIKSLNGD

SEQ ID NO: 6904 - protein, 507 aa, synthetic construct
MKRVISYIRFSSEKQAKGDSLRRQSKMVNDWLKAHPEYYLDQDLSFRDLGVSGFTGKHLKGGLGDFLTAIEKGLVKAGDTLLIESLDRLSRQDIDIASELLRNILRSGVDVVTLSDGEHYTRESLRDPLALIKSILIMQRAHEESLRKAERIQAAWDAKKEAAKAGIKVSKRCPAWLKLNDDRKSFSVIPEKVETVKRCFQLRLEGKSIWEIVRTLNAEGHQTLNQYKAGKFGQTSVQDLLKNRSVIGYFTPKGCEEISGYYPAIIDETTFYKVQQLSHYRYGRKPVSDKPLSVNLFKGVIRCSECGHALIITGFSDTRNGIYRCPLRNENRCSAKGLSRKQTDGTLLTLLSRLDRFDSDMTNTLDTLKLHREHISSNIEKLVQLSLEIEDLSAITIKLKQLKGELSQVDADIEKETQRLKSIDVGCLSDCDLSTKAGRIEAQLIIKSAVKEVVLNTAKRRCKVTFHNGKVIDLPITENPSEDVTEAIQSLSEVTERGLIDVDVVAI

SEQ ID NO: 6905 - protein, 506 aa, synthetic construct
MRTVITYLRFSSATQGAEGADSTRRQNELFKQWLRKNSDAQVVASFSDEGLSGYKGKHLTGQFGDMLARIEAGEFPAGAILLVESIDRIGRLEHLETEALMNRIIAHGIEIHTLQDGLIYTRDALSDDLGISIIQRVKSYLAHQESKQKSFRVSEKWKQRAKLALAGEQHLTRNVPGWIDPDTFKCNEHAETVRLIFKLLLDGESLHNIARHLQSNDIKSFSRRKDANGFSVHSVRTVLRSESVIGTLPASQRNDRPAIPNYYEAAIDASTFNKAQEILDKNRKGRTPASDNPLTINIFKGLFRCQCGASVHPTGTKNKYQGVYRCNSHLDGRCDVPPLKRKPFDRWMIDNFLGMIDVGNDGEAEKEIASLQHEVETVTARIKKATALLLEMDDITELKTQVKELNQKRTELQTTIDNMRRKASLTDKELPQLKDIDLTTKVGRVECQLILSKHLKGLTLGKDSVTVTLQNDTEITIPTNPLPLNDGTSIFEIAEKNLLNIDTFQL

SEQ ID NO: 6906 - protein, 547 aa, synthetic construct
MKLLVPYIRWSTKEQDSGDSLRRQTNLIDAFYSKHKNDYYLLPAHRYVDKGKSGFHQQHKAQGSDFRRMFENVMSGAIPEGSLIVVENFDRFSRADIDTAIDDVRQILRKGVSILTLGDGELYDKSALTDPVKLIKHIIIAERAHQESLVKQKRIAQVWNHKTQLARELKKPMGKQAPGWLELSEDGSHYIVDEDKASLVNIIYDKRLSGMSMFAICKWLNEQGYPTINQRKVRISKTKKPDGNWSALSVKHILTSRSVLGYLPAKISTEDRKTVLREEIESFYPQIVTDSKFYAVQQLLEETGKGKTSSGEHWLYVNILKGLIRCKCGLVMTPTGIRKPVYQGTYRCNGNKESRCSYGTVSRKLLDTQLCSRLFSKLSQLHDEATDTAKLDELQRRLNTVDSELEKLTETLIQLPNITQIQEALRVKQEEKDELIVQLSREKARVKSVSSLDLSGLDMESVEGRTEAQIIIKRLVKEIVVSGNEKLVDIYLHNGNMIRGFPLDGKDDHTLTLEEATDEMQPLDDMLIFGEPVTRIYPAGDMEEVDA

SEQ ID NO: 6907 - protein, 506 aa, synthetic construct
MRSVITYLRFSSAIQGAEGADSTRRQNDLFKQWLKKNSDAQVVASFSDEGLSGYKGKHLTGQFGDMLARIESGEFSEGTVLLVEAIDRIGRLEHLETEALMNRIIAHGIEIHTLQDGLIYTRDALSDDLGISIIQRVKSYVAHQESKQKSFRVSQKWKQRAKLALAGEQRLTKMVPGWIDPDTFKLNEHAETVRLIFKLLLSGESLHNIARHLQANNISSFSRRKDANGFSVHSVRTVLRSESVIGTLPASQRNDRPAIPNYYEAAIDAATFNKAQEILDKNRKGRTPASDNPLTINIFKGLFRCQCGASVHPTGTKNKYAGVYRCNNNPDGRCDVPPLKRKPFDKWVIDNFLGMIDVGNDGEAEGKIASLQHEVEIVTTRIKKATALLLEMDDITELKAQVKELNQKRTELQTTIDSMRRKTSLSDKGLPQLKDIDLMTKAGRVECQLILSKHLKGLTLGKDSVIVTLQNDTEITIPTNPLPLNDGTSIFEIAEKELLEIDAYQL

SEQ ID NO: 6908 - protein, 506 aa, synthetic construct
MRSVITYLRYSSAIQGAEGADSTRRQNDLFKQWLKKNSDAQVVASFNDEGLSGYKGKHLTGQFGDMLARIESGEFSEGTILLVEAIDRIGRLEHLETEALMNRILGNGIEIHTLQDGLIYTKDALADDLGISIIQRVKSYIAHQESKQKSFRVSQKWGQRAKLALAGEQRLTKMVPGWIDPETFEVNEHAETVRLIFKLLLDGESLHNIARHLQANNISSFSRRKDANGFSVHSVRTILRSETTIGTLPASQRNDRPAIPNYYEAAIDAATFNKAQEILDKNRKGRTPASDNPLTINIFKGLFRCQCGASVHPTGTKNKYAGVYRCNNHLDGRCDVPPLKRKPFDRWMIDNFLGMIDVGNDGESERKIAALQHEVEIVTSRIKKATALLLEMDDITELKAQVKELNQKRTELQTTINTMKRKTSLSDKGLPQLKDIDLMTKAGRVECQLILSKHLKGLTLGKDSVTVTLQNDTEITIPTNPLPLNDGSPIFEIADKELLDVDAYQL

SEQ ID NO: 6909 - protein, 598 aa, synthetic construct
MNKIIPYGYLRVSSLEQVRTGGGLDTQDEEVRRYITQNSEKFDIDRMVVMSDAGMSAYTGSNIKEGELGRFLADVNAGLIPTGSALICYSVDRLSRQNPWVGTHLISTLIGAGIEIHSVAENQILRSDDPVGAIMSTIYLMRANNESVIKSERAKKGYEKRLNESITNKKVLTRQMPRWLFDCDGKYAIDPNMQNVINFTFDSYIAGQSTGFIAKELNNRGLMYGNTSWRGSYVAKLIRDERLIGKHIRYSKQIKGVKRVVIETIPNFYPVVVDVEKFFLANNMLTSVAKNIRGRTRVTYGDDSILRNLFNGVIKCGVCGGDTSVVQNTRKKIVNGEATYIPYKTFLRCRTRYELKNCVQSDIRYEVIERAILNHLMGLDISALLSVPVDNKIESYRTELELCKAEEVELHTLIEQREREGKRVRPRTIKAYEDVSDRIDELNKLIESYVEDTFVPDFNVDLNSIADVSNVSERSLIKKGIATIADSICYKRISDFILVEIKYRNLSVKHVLVIDNKQSKVVVNFSIEYHENSHDYTCNGLILKYVKSPEEFHLMGVNIEDYAHMMNFVDFISDNEAKKIKEYLVSNLSRVLISNVPE

SEQ ID NO: 6910 - protein, 507 aa, synthetic construct
MKRAISYIRFSSEKQSRGDSLRRQSKMVNDWLKAHPEYYLDQDLSFRDLGVSGFTGKHLKGGLGDFLTAIEKGLVKAGDTLLIESLDRLSRQAVDRASELLRNILRSGVDVVTLSDGEHYTSESLKDPLALIKSILIMQRAHEESLRKSERIQAAWDAKKEAAKAGIKISKRCPAWLKLNDDRKSFSVIPEKVETVKRCFQLRLEGKSIWEIVRTLNDEGHQSMSQYKPGKFGQTSVQDLLKNRSVIGYFTPKGCEEIAGYYPSVIDETTFYKVQQLSHSRYGRKPVSAKPLSVNLFKGVIRCSECGHALIITGFSDTRNGIYRCPLRNENRCSAKGLSRKQTDGTLLALLSRLDRFDSDMTNTIDTLKLHREHISSNIEKLVQLSLEIEDLSAITSKLRQLKGELSQVDADIEKETQRLKSIDVGCLSDCDLTTKAGRIEAQLIIKSAVKEVVLNTAKRRCKVTFHNGRAITLPITENPSEDVTEAIQSLSEVTERGLIDVDEVII

SEQ ID NO: 6911 - protein, 507 aa, synthetic construct
MKRVISYIRFSSEKQAKGDSLRRQSKMVTDWLKAHPEYYLDQDLSFRDLGVSGFTGKHLKGGLGDFLTAIEKGLVKAGDTLLIESLDRLSRQAVDRASELLRNILRSGVDVVTLSDGEHYTSESLKDPLALIKSILIMQRAHEESLRKSERIQAAWNRKKELISEGIKISKRCPAWLKLNDDRKSFSVIPEKVETVKRCFQLRLEGKSIWEIVRTMNAEGHQTLHQHKPGSFGQSSVQDLLKNRSVIGYFTPKGCEEISGYYPAIIDETTFYKVQQLSYARHGRKPASAKPLSVNLFKGVIRCSECGHALIITGFSDTRSGIYRCPLRNENRCNAKGLSRKQTDGTLLALLSRLDRFDSDTTNTIDTLKLHREHLSSNIEKLVQLSLEIEDLNAITNKLKQLKNELSQVDADIEKETQRLKSIDVGCLSDCDLTTKAGRIEAQLIIKSAVKEVVLNTARRRCKVTFHNGKVIDLPITENPSEDVTEAIQSLSEVTAKGLIDVDVVEI

SEQ ID NO: 6912 - protein, 537 aa, synthetic construct
MKQQIYNTALYLRLSRDDELQGESSSITTQRSMLRLYAKEHHLNVIDEYIDDGWSGTNFDRPSFQRMIEDIEAGKINCVVTKDLSRLGRNYIMTGQYTELYFPSHNVRYIAIDDGVDSEKGESEIAPFKNIINEWVARDTSRKVKSAFKTKFAEGAHYGAYAPLGYKKHPDIKGKLLIDEETKWIIEKIFSLAYQGYGSAKITKQLRVEKVPTASWLNFTRYGTFAHIFEGKPESKRYEWTIAHVKAILKSEVYIGNSVHNMQSTVSFKSKKKVRKPESEWFRVENTHEPIIDKEVFYRVQEQIKSRRRQTKEKATPIFAGLVKCADCGWSMRLGTNKANKTPYSYYACSYYGQFGKGNCSMHYIRYDVLYQAVLERLQYWAKAVQQDEEKVLNKIQKVGNAERIREKKKKASTLKKAENRQNEIDRLFAKMYEDRACEKITERNFVMLSSKYQKEQIELEQQITSLREELSKMEQDMIGAEKWIELIKEYSVPKELTAPLLNAMIEKILIHEATTNEDNERIQEIEIYYRFIGKVE

SEQ ID NO: 6913 - protein, 586 aa, synthetic construct
MQEVEVIKAKNVLSRQARGKAIERLRVAAYCRVSTDSEDQLNSYKSQVQYYTDMIKKNKEWVLADIYADEAITGTQVTKREDFQRMINDCMNGEIDMVFTKSISRFARNTLDTLKYVRMLKERNIAVYFEDEKINTLTMDGELLLVVLSSVAQQEVENISANVKKGLKMKMKRGELVGFQGCIGYDYHPEDKTITVNQEEAEIVRYIFNRYVDGAGGSVIGQELESLGYKTKYGSSTWAPSTVIGIIKNEKYKGDILLGKTFTVDPISKRRLENMGEEDKFYMKDHHEPIISEEVFEKAQEILNRRNKNRTTVGSGKREKYSRKYAFSCMLECGFCGGTLTRRNWHSGSKYSKVIWQCVTATKKGKKFCKHSKGIPETAIEEAFVESYRLLCDDNKDVLEEFLQRMDDTLSSSVVSKQLAKAEKEIDALEKKKSKLVDMRLEEIIDKETYESKYADLVSKQEQLVEERQKLQETSDNEKDIKKRLKEFKKTLEQNEVLDKFDRYVFESIVEKVIVGGLDENGNVDPAQLTFVYKTGLKNSVDGAKFKTQRKNARGRHRTNELCSHDSNEVDKMCSDSSNDTCGNCS

SEQ ID NO: 6914 - protein, 616 aa, synthetic construct
MTDYSKITALYSRLSVGDEDRDGGESNSIQNQKIFLENYARGQHLTNIRHYIDDDESGRFFDRSAYSRMMDDVENGKIGVCIMKDLTRWGRDYLQVGNAMEIFRRNNVRFIAVNNGIDSEKPDTLEFAPFINIMSEWYAKDISKKVKTGIKTKGMSGKPIATEAPYGYVKSPDNKDFWIIDEEAAGVVRLIFRLFLDGKNRNQIAVYLTQAQIPTPTFYMKERGRGTCKNRALNEANRYKWNKATLTHILTRQEYCGDVVNFKTTKHFRDKRNHYVDRSQWQITENVHEPIIDRTDFETVQRILENAPVKRPNGDGEIHPLSGLLFCKDCGAKMHIRIDYRNGGKRHVAYCSEYHKGKAKNPKCNSPHIIDADLLMQTIAEVLKKIEDYSISNWAEFEALVKKNLAMQQTDKTKKQQKRIPQITTRLEQIDKVLNKLYEDNALGTIPQDRYEQMSQKYSEEYYALKAELAELQEQLSAFENAGGRAQKFLKLTERYAAFTDLTPAILNEFISRIEVHERDKKRAKQAIQHIGIYFNYIGKFENEVTQLTEPTEQEIRQMREEIEEAKKEKSRAYHRQYSREYRARNLEKQREYDRIKAREYRARRKAQTAAAQPAQ

SEQ ID NO: 6915 - protein, 592 aa, synthetic construct
MKKEVKVIKGDTTLKRTASGCVERSIKRVAAYCRVSTDTEDQINSYNSQVEHYTEFIQKNNEWTLAGIYADEAITGTQVDRRIDFQRLINDCMNGDIDMIITKSISRFARNTLDTLKYVRKLKEFNVAVFFEEENINTLTMDGELLLTILSSVAQQEVENISANVKKGLRMKMERGEMVGFQGCLGYDYDPETKSISINEKEAEIVRYIFRRYIEGVGGMVISRELEEQGYLSPRGNKRWTETTVLGIIKNEKYKGDLMMGKTYTVDPISKRRLDNFGEQDKFYIENHHEPIISEEDFEKAQGIRLRRSKNRNTVANNGGKREKYSRKYAFSSMLECGFCGYNLSRRNWHSSSEYTKVIWQCVNATKNGKKYCPHSKGIEEEAIEKAFMESYRQVCHNNVEITNEFLKTVEEELKDNSLSKDLKKISNQLDKILKKEKDLVELRLNESISMDIYQDKYNEIAISKEKLLAEKRTLEVTLTDEKALKKRLEGFKKLLESNKYLEEFDRAVFESIVDKIIIGGTNDEGEIDPAMITIIYKTGKKDSQDGRLFKSRRKNAKEVNEKADSKLYPQSSDEVNNLYSYPIDNTCGNCS

SEQ ID NO: 6916 - protein, 547 aa, synthetic construct
MSKRVAIYCRVSTVEQAEEGYSIDEQRRRNIEYCEKEGHEVYKVYEDRGISGKNISGRPGLKDLLQDANAGKFDLVIVWKLNRISRKLIDILNIVDTLDKNKIAFRSLTESFETETPAGKLQLNIMGAIGEFERGTIAENVKMGMMARAKEGKWNGGKVLGYDIVEIPSEGKKRKETKLVINEKEAMTVRRIFELYSTGHGYKATVNRVNQEGHRSKKGNPFATATIKEILKNPVYIGKIRYNLRQDWNEKRRRNINPDPILVDGEHEAIIDNDTWEKVQIILKDRSKTHNRVYDSELILSGLLKCPVCGASMTISRSTRKRKDGTKVVNEYYACGNWKNKGTAVCNSNSVKADVADEVVINKLIETVNNELLLKKVISNINKNKSSKLKPKLDEMKLVNKEIDRLSCKKNTSIELFDDGILTKSELAERIKKLNEEIDTLKFRLDELKQDVILAEGEPVPFELVSQVINKFGEIFKESSTRQQRKQLLNLLVSKITIDKSRNIDSIELQINEDVIRYLMKEESSKKDGSSFFHASMLNCTCLKFVI

SEQ ID NO: 6917 - protein, 535 aa, synthetic construct
MLRQTTQKITALYPRLSHEDELQGESNSISNQKRILETYAKQNGFSNLRWYTDDGYSGANFQRPGFQAMLADIEAGKVGTVIVKDMSRLGRNYLQVGMYTEMIFPQKGVRFIAINDGVDSAQGDNDFAPLRNIFNEWLVRDTSKKIKAVKRSKGMSGKPITSKPVYGYLMDEDENFIIDEEAAPVVKQIYNLCLAGNGPTKIARMLTEQQIPTPGTLEYRRTGSTRRYHPGYECKWATNTVVHILENREYTGCLVNFKTEKLSYKVKHSVENPLEKQVIFENHHEPIIDTQTWERVQELRKQRKRPNRYDEVGLFSGILFCADCGSVMYQQRYQTDKRKQDCYICGNYKKRTHDCTAHFIRTDLLTAGVLSNLRKVTSYAAKHEARFMKLLIEQNEDGGKRRNAAKKKELEAAEKRIAELSAIFKRLYEDSVTGRISDERFTELSADYEAEQQELKERVARIQAELSKAQEATVNAEKFMNIVRKHMNFEELTHTLLREFVEKIVVHECSYDENKTRRQDIEIYYSFVGKVDLPE

SEQ ID NO: 6918 - protein, 621 aa, synthetic construct
MRRNEKITVLYERLSRDDDLQGESNSISNQKKLLEDYAAQHDFPNPVHFTDDGISGTCFDRPGFLAMMKEVEAGNVEYLCIKDMSRLGRDYLKVGQIMEILRQRGVRLIAINDGVDSARGDDDFTPFRNIMNEYYARDTSRKIRSTFQSKGKTGKHLTGTVIYGYLWNEARDQWLVDPEAAEVVKRIFAMTIEGYGPYQIANRLKEDKVLIPSAYLAQHGEGVNKNKTFKDMYGWGSSTIVNILEKREYLGHTINFKTRKHFKDKKSHYVPEDEWTIFENTHEAIIDQQTFDLVQKIRSKVRRYPDGWGEVAPLTGLLYCADCGGKMYVHRTNNGKRISQYTCSQYTKVPVGTICKTQHRINEDVVLSLVSDMLKAIAEYAKHDRAEFVRVVQEAQSNQQTAEVRKQRTRLATAKQRVSELEVLLCKIYEDNILGKLSDSRYATLDAQYEKEQSELTVEISALEKAIKSYEKHEKDADRFIALIDKYENFDKLTIAMLNEFIEKILVHERDRKGSIQTTQEVEIYFNFVGRFVPPAFGEVELTQEELEEIRKREERKDRLHQNYLKRKASGAQKQYEDKIKERKKAEMDAKKAAIRAEDIAKGVFIPVSSLPQKEPMKAVI

SEQ ID NO: 6919 - protein, 586 aa, synthetic construct
MQEVEVIKARNVLSKQARGKAIERLRVAAYCRVSTDSEDQLNSYKSQVQYYTDMIKKNKEWVLADIYADEAITGTQVTKREDFQRMINDCMNGEIDMVITKSISRFARNTLDTLKYVRMLKERNIAVYFEDEKINTLTMDGELLLVVLSSVAQQEVENISANVKKGLKMKMKRGELVGFQGCLGYDYHPEDKTITVNQEEAEIVRYIFNRYVDGAGGSVIGQELENLGYKTKYGSSTWAPSTVIGIIKNEKYKGDILLGKTFTVDPISKRRLENMGEEDKFYMKDHHEPIISEEVFEKAQEILNRRNKNRTTVGSGKREKYSRKYAFSCMLECGFCGGTLTRRNWHSGSQYSKVIWQCVTVTKKGKKFCKHSKGIPETAIEEAFVESYRLLCDDNKDVLEEFLQRMDDTLSSSVVSKQLAKAEKEIDALEKKKSKLVDMRLEEIIDKETYESKYADLVSKQEQLVEERQKLQETSDNEKDIKKRLKEFKKTLEQNEVLDKFDRYVFESIVEKVIVGGLDENGNVDPAQLTFVYKTGLKNSVDGAKFKPQRKNERGRHRTNELCSHDSNEVDKMCSDSSNDTCGNCS

SEQ ID NO: 6920 - protein, 560 aa, synthetic construct
MSKEKIKVYLYTRVSTSIQIDGYSLEAQKSRMKAFALYNDYEIVGEYEDAGKSGKSIEGRVQFTRMMEDIKSGKDGVSFVLVFKLSRFARNAADVLSTLQIMQDFGVNLICVEDGIDSSKDAGKLMISVLSAVAEIERENIRVQTMEGRIQKAKEGKWNGGFAPYGYQLIDGKLIINEEEAIAIRTIFDQYVNTSIGANGLSKYLENHGIRKIPRQNGKNPLFDAGLIRKILKNPVYNGKIAFGRRTLEKVHGTRNEYRQVEQDDYLVAEGIHEAIIPDELWQAAQVKLKAQAKKYEHVNKGKNMRTHLLSGIVKCPICGAGMFGNKSIKYKKDGTKYKDFYYYGCKHRLMNRGHKCTYNKQIREELLDDAVAEVIIKLVSNPKFASMIQEKINMKVDTSAIENEIDNYQNELRKSHSTKYKLIEEIDNLDVEDKHYKRRKNDLDDRLYRMYDKIEELESQLIEAKAKKETIEVEKLTGDNIYKVLIYFDKLYKVMNDVERRQLIEALISEIQIYEEKQPNGQWLKSITFKLPIIDEDLNISLENDEQVECIALIQRVKS

SEQ ID NO: 6921 - protein, 537 aa, synthetic construct
MKQQIYNTALYLRLSRDDELQGESSSITTQKSMLRLYAKEHHLNVIDEYIDDGWSGTNFERPSFQRMIEDIEAGKINCVVTKDLSRFGRNYIMTGQYTELYFPSHNVRYIAIDDGVDSEKGESEIAPFKNIINEWVARDTSRKVKSAFRTKFAEGAHYGAYAPLGYKKHPDIKGKLLIDDETKWIVEKIFSLAYQGYGSAKITKILREEKVPTASWLNFTRYGTFAHIFEGKPESKRYEWTIAHVKAILKSEVYIGNSVHNMQSTVSFKSKKKVRKPESEWFRVENTHEPIIDKEVFYRVQEQIKSRRRQTKEKATPIFAGLVKCADCGWSMRFGTNTANKTPYSYYACSFYGQFGKGYCSMHYIRYDVLYQAILERLQYWAKAVQQDEEKVLHKIQKAGNAERIREKKKKASVLKKAENRQNEIDRLFAKMYEDRACEKITERNFVMLSGKYQKEQIELEQQITSLREELSKMEQDMIGAEKWVELIKEYSVPKELTAPLLNAMIEKILIHEATTNEDNERIQEIEIYYRFIGKVD

SEQ ID NO: 6922 - protein, 363 aa, synthetic construct
MEIVNIYEDAGKSVKSIEGRSAFMQMLSDIENGLGIDYVLVYKLSRFGRNAADILNSLEHIQSFGVNLICIEEGIDSSQTSRKLLISVLSAAAEIERENIIEQTMNGRKEKARQGGWNGDFAPYGYFLKDKQLFIQEDEAEAVRIIFDKYVNGNMGFYKIANYLNLQGIQKVKRDNGTLTQWSTHFVRMIIDNPMYMGKIAFGRRTREKVKGTKNEYRQVYQDDYILADGQHNGIISEELWTQAHERREITGVKASSKIGRDRAHLLSGVLKCPKCGGPMYTNKHAWTNKDGTYKEIYYYVCRKARTTRKKSCDYKAMLKRTDIEPLVVEAIRDMIKNEDFAAEIKSKIGKQIDTSTLDRERT

SEQ ID NO: 6923 - protein, 560 aa, synthetic construct
MSKEKIKVYLYTRVSTSIQIDGYSLEAQKSRMKAFALYNDYEIVGEYEDAGKSGKSIEGRVQFTRMMEDIKSGKDGVSFVLVFKLSRFARNAADVLSTLQIMQDFGVNLICVEDGIDSSKDAGKLMISVLSAVAEIERENIRVQTMEGRIQKAKEGKWNGGFAPYGYQLIDGKLIINEEEAIAIRTIFDQYVNTSIGANGLSKYLENHGIRKIPRQNGKNPLFDAGLIRKILKNPVYNGKIAFGRRTLEKVHGTRNEYRQVEQDDYLVAEGIHEAIIPDELWQAAQVKLKAQAKKYEHVNKGKNMRTHLLSGIVKCPICGAGMFGNKSIKYKKDGTKYKDFYYYGCKHRLMNRGHKCTYNKQIREELLDDAVAEVIIKLVSNPKFASMMQEKINMKVDTSAIENEIDNYQKELRKSHSTKFKLIEEIDNLDVEDKHYKRRKNDLDDRLYRMYDKIEELESQLIEAKAKKETIEVEKLTGDNIYKVLIYFDKLYKVMNDVERRQLIEALISEIQIYEEKQPNGQWLKSITFKLPIIDKDLNISLDNDKQVETCVLLQRRTM

SEQ ID NO: 6924 - protein, 558 aa, synthetic construct
MSKEKIKVYLYTRVSTSIQIDGYSLEAQKSRMKAFALYNDYEIVGEYEDAGKSGKSIEGRVQFTRMMEDIKSGKDGVSFVLVFKLSRFARNAADVLSTLQIMQDFGVNLICVEDGIDSSKDAGKLMISVLSAVAEIERENIRVQTMEGRIQKAKEGKWNGGFAPYGYQLIDGKLIINEEEAIAIRTIFDQYVNTSIGANGLSKYLENHGIRKIPRQNGKNPLFDAGLIRKILKNPVYNGKIAFGRRTLEKVHGTRNEYRQVEQDDYLVAEGIHEAIIPDELWQAAQVKLKAQAKKYEHVNKGKNMRTHLLSGIVKCPICGAGMFGNKSIKYKKDGTKYKDFYYYGCKHRLMNRGHKCTYNKQIREELLDDAVAEVIIKLVSNPKFASMIQEKINMKVDTSAIENEIDNYQNELRKSHSTKYKLIEEIDNLDVEDKHYKRRKNDLDDRLYRMYDKIEELESQLIEAKAKKETIEVEKLTGDNIYKVLIYFDKLYKVMNDVERRQLIEALISEIQIYEEKQPNGQWLKSITFKLPIIDKDLNISLDNDKQVETVAKIIKQ

SEQ ID NO: 6925 - protein, 558 aa, synthetic construct
MSKEKIKVYLYTRVSTSIQIDGYSLEAQKSRMKAFALYNDYEIVGEYEDAGKSGKSIEGRVQFTRMMEDIKSGKDGVSFVLVFKLSRFARNAADVLSTLQIMQDFGVNLICVEDGIDSSKDAGKLMISVLSAVAEIERENIRVQTMEGRIQKAKEGKWNGGFAPYGYQLIDGKLIINEEEAIAIRTIFDQYVNTSIGANGLSKYLENHGIRKIPRQNGKNPLFDAGLIRKILKNPVYNGKIAFGRRTLEKVHGTRNEYRQVEQDDYLVAEGIHEAIIPDELWQAAQVKLKAQAKKYEHVNKGKNMRTHLLSGIVKCPICGAGMFGNKSIKYKKDGTKYKDFYYYGCKHRLMNRGHKCTYNKQIREELLDDAVAEVIIKLVSNPKFASMMQEKINMKVDTSAIENEIDNYQKELRKSHSTKFKLIEEIDNLDVEDKHYKRRKNDLDDRLYRMYDKIEELESQLIEAKAKKETIEVEKLTGDNIYKVLIYFDKLYKVMNDVERRQLIEALISEIQIYEEKQPNGQWLKSITFKLPIIDKDLNISLDNDKQVETVALLRRK

SEQ ID NO: 6926 - protein, 558 aa, synthetic construct
MSKEKIKVYLYTRVSTSIQIDGYSLEAQKSRMKAFALYNDYEIVGEYEDAGKSGKSIEGRVQFTRMMEDIKSGKDGVSFVLVFKLSRFARNAADVLSTLQIMQDFGVNLICVEDGIDSSKDAGKLMISVLSAVAEIERENIRVQTMEGRIQKAREGKWNGGFAPYGYQLIDGKLLINEEEAIAIRTIFDQYVNTSIGANGLSKYLENHGIRKIPRQNGKNPLFDAGLIRKILKNPVYNGKIAFGRRTLEKVHGTRNEYRQVEQDDYLVAEGIHEAIIPDELWQAAQVKLKAQAKKYEHVNKGKNMRTHLLSGIVKCPICGAGMFGNKSIKYKKDGTKYKDFYYYGCKHRLMNRGHKCTYNKQIREELLDDAVAEVIIKLVSNPKFASMIQEKINMKVDTSAIENEIDNYQKELRKSHSTKFKLIEEIDNLDVDDKHYKRRKTDLDDRLYRMYDKIEELEGQLIEAKAKKETIEAEKLTGDNIYKVLIYFDKLYKVMNDVERRQLIEALISEIQIYEEKQPNGQWLKSITFKLPIIDEDLNISLDNDEQVETVVKLIRE

SEQ ID NO: 6927 - protein, 540 aa, synthetic construct
MKQPYNTTIYNTALYMRLSRDDENYGDSVSIETQRTILQQYAKEQGLHVVGEYVDDGWSGTNFERPDFQRMMDDVEAGKVNCIVTKDLSRFGREHVMMDYYLEFLFPEKRVRYIAVAENEDTEKGLSDFVPFKNLFNEWFAKDTSRKVKAAFKAKFATGQRIGAYAPIGYRKHPEIKNKLIIDEETRWIVEKIFDLAIHGRGAASITRILIMEKVPTPGFINFQRDGTFANIYAGAPEEKSYAWTIAQVKSIMKDETYIGHTIHYRETNISFKNKRRIRKPQSEWVRVENTQEPIISEQVFRQVQEQIANRRRKCKDGTTQIFSGLVKCADCGWSLSYGENRQNSKPYGHYHCSKYGQGTRQCSMHYIRYDVLYAYVLSRLQYWSRLVQHDEERLLKRLLNANDKGQAAARKKQAAELNKAEKRKAEVDTLFARMYEDWAAGRITEYNFSMLSGKYQSEQAELDTKIEQLQSAIATESQNAADAEKWIALMKECVNPTELTAELLNTLIEKIVVHEAVKGEDGSREQEVEIFYRFIGKID

SEQ ID NO: 6928 - protein, 403 aa, synthetic construct
MNRSGKKCVLYPRVSTEMQVDGFSLDGQKNSLKRFADREEMEIVNIYEDAGKSGKSIEGRPAFMQMLSDIENGLGIDYVLVYKFSRFGRNAADILNSLEHIQSFGVNLICIEEGIDSSQTSGKLLISVLSAVAEIERENIIEQTMNGRKEKARQGGWNGGFAPYGYFLKDKQLFIQEDEAEAVRIIFDKYVNGNMGFYKIANYLNLQGIQKVKRDNGTLTQWSTHFVRMIIDNPVYMGKIAFGRRTREKVKDTKNEYRQVHQDDYILADCQHDGIISEELWTQAHEKREITGVKAPSKIGRDRAHLLSGILKCPKCGGPMYTNKHAWTNKDGTYKEIYYYVCSKARTTRGKSCDYKAMLKKTDIEPLVVEAIRDLIKNEDFSPEIKSKIGKQIDTSTLNRERT

SEQ ID NO: 6929 - protein, 637 aa, synthetic construct
MAGIRTGNQIYEVGIYCRLSRDDGTENESASIATQKSILTDYVKKQGWHLAKTYVDDGYSGTNFQRPSFQNMIKDIENGRINCVITKDLSRLGRNYLDCGLYLEVFFPEHNVRYIAVNDGVDTLNKSAMDITPFRNILNEMYSADVSVKIKSAYRARFQQGKFMGTYAPYGYIKDPADHNHLLIDDKVAHVVREIFDLALAGNGISKIRKHINKQHILRPAAYAAEQGATGYERYFEDNEENRYIWSENSVRGILRSPIYAGNLAGYKRIAANMKSKKRPSKLPEEWEVIPNTHEGIVTQEEFDIVQQLMTSRRREKNKAGFENIFAGVIKCADCGYALRAMSANRRKRPDIIDCVQYTCNNYGRYGNIVCTAHAIEARDLFNAVLADINRFADMAVNDERAVRAIEKRLTETDQSKAKAMEKERKKLNKRLAELDRLFSSLYEDKVMERITERNFEMMSGKYQKEQLEIEARLKEVTETLNESYEKSQGIRDFLSLIRNYQGLKELDATVINALIEKILVSEREKSADGTVRQEIKIYYKFIGFVGELHITPTKRWTALPAKCCTVCGVEYVPGSGISKYCPVCAKKMQREKSNESKRRSREQKRMACIELSAKNDRLTRGSIEEILMYLNILKKV

SEQ ID NO: 6930 - protein, 503 aa, synthetic construct
MNNRIDAIYARQSVDKKDSISIESQIEFCKYELKGGNCKEYTDKGYSGKNTDRPKFQELVRDIKRGLIAKVVVYKLDRISRSILDFANMMELFQQYNVEFVSSTEKFDTSTPMGRAMLNICIVFAQLERETIQKRVTDAYYSRSQRGFKMGGKAPYGFHTEPIKMDGINTKKLVVNPEEAANIRQMFEMYAQPTTSYGDITRYFAEQGILFNGKELIRPTLAQMLRNPVYVQADLDVYEFFKNQGTVIVNDAADFTGMNGCYLYQGRDVKASKKNDLKDQMLVLAPHEGIVPSDIWLTCRKKLMDNMKIQSARKATHTWLAGKIKCGNCGYALMSIYNPSGKQYLRCTKRLDNKSCAGCGKIITTELEAVVYQQMVKNLEKHKTLTGRKKAAKANPKIAALQVELAHVDSEIEKLVDSLTGANNVLLSYVNVKIAELDGRKQELLARIAELTVEAISPEQVSQISGYLDTWENVSFDDKRRVVDLMITTVAATSNSLNITWKI

SEQ ID NO: 6931 - protein, 536 aa, synthetic construct
MLRQTNQQPITALYPRLSHEDELQGESNSISNQKRILETYAKQNGFSNLRWYTDDGYSGANFQRPGFQAMLADIEAGKVGTVIVKDMSRLGRNYLQVGMYTEMIFPQKGVRFIAINDGVDSAQGDNDFAPLRNIFNEWLVRDTSKKIKAVKRSKGMSGKPITSKPVYGYLMDEDENFIIDEEASPVVKQIYNLCLAGNGPTKIARMLTEQQIPTPGTLEYRRTGSTRRYHPGYECKWATNTVVHILENREYTGCLVNFKTEKLSYKVKHSVENPPEKQVIFKNHHEPIIDTQTWERVQELRKQRKRPNRYDEVGLFSGILFCADCGSVMYQQRYQTDKRKQDCYICGNYKKRTHDCTAHFIRTDLLTAGVLSNLRKVTSYAAKHEARFMKLLIEQNEDGGKRRNAARKKELEAAEKRISELSAIFKRLYEDSVTGRISDERFTELSADYEAEQKELKERVAALQAELSKAQEATVNAEKFMNVVRRHTSFEELTPTLLREFVEKIVVHECSYDENKTRRQDIEIYYSFVGKVDLPE

SEQ ID NO: 6932 - protein, 535 aa, synthetic construct
MKQPYNTALYMRLSRDDENYGDSVSIETQRTILQQYAKEHGLSVYGEYVDDGWSGTNFERPSFQRMMDDVEAGKVNCIITKDLSRFGREHVMMDYYLEFVFPEKQIRYIAVAENEDTEKGLSDFVPFKNLFNEWFAKDTSRKVKTALHAKFAAGERTFAYAPLGYIRHPEVKNTLAIDEETRWIIEKIFDLAFHGAGAAKITKSLIAEKVPTAGWLNYQRYGTFANIYANAPEEKSYAWTIAQVKSILQDETYIGNSVHNKQTNISYKNKKKVRKPKEEWIRVENTHEAIISRDVFEQVQKQIASRRRQQKDATTQIFAGLVKCADCGWSMRFGTNRQNKTPYSHFTCSQYGQMGTQCSAHYIRYDTLYVYVLSRIQYWSHRAQLSEEKLLQQILKNGDRERMTAAKRQESELKRAEKRKAEVDGKFVRMYEDWSAGRITEYNFNLLTKKYQAEQLELEEKISRLQAELSEEQQTALDAEKWVALIKQYANPTELTAELLNTLIEKIVIHEATKGADGMREQEIEIYYRFIGKID

SEQ ID NO: 6933 - protein, 532 aa, synthetic construct
MKAAIYSRKSRFTGKGDSIENQIQLCIDYAKSIGVKDFLIYEDEGFSGSNIDRPQFKKMMQDAKDKKFSYLVCYRLDRISRNVSDFSTLIEKLNELNISFISIKEQFDTSTPMGRAMMFISSVFAQLERETIAERIKDNMYELARSGRWLGGNTPHGFNSEKITFLDENLKERSMYKLQVNDEQMEIVKLIYNKYLELRSLSKLYKYVYNNGIRGPRGGKFDPSSLSRILRNPAYVKANDEILDYLKNSGMDVVGTPDRKCGILTYAKNTSNSIAAIAKHHGVIEPEIWLEVQNQLDKNRDKTPRISTGKTALLSGLIKCGKCGSNMRITYKGKKTDKDLKYYYICGTKKTLGSDSCNCKNLNGPLVESLVIDKIKNCKEESIISAFNSNNIKTDNVFNIFKSETNLLKNQILDKEKLIKNLVIELAKNTGSTASDYIVSQIESLNNEISILKDKINTLESSNINISSDSINIDIIVSNLKRFNDEVDNASLDDKRLLLSTIINSIIWDSSLGNLNIVYMGAEVDNSVSLNN

SEQ ID NO: 6934 - protein, 514 aa, synthetic construct
MNKIAIYCRVSSDDQKERETIENQVDTLETYIEMKDNFTFYEKYLDDGVSGTVAFENRPGGKELISDASKGLFDSILVYKIDRFGRDTLTGLSTIETLRKYNIEIISMTEPFDLNTATGRFQFITYLNMAELERNNILDRMFLGATRAAKKGQWLGGIVPYGYVTNKKFLEIDPDESEIIKKIFDLYSIDKLSSLDIAVYLNNLDIPSSCKEGKGKRTKNITGLWRSSSIQRILKNTTYMGIHEYGKRGTRRKETIFREVPAIISKDQWDICEKQRSINIKVSKRNQKNRQFLLRSLLTCEHCGKNFYGNTYKNRSDVYICSGKRSDNRRVLGIKCSTLNINADYIEELVWNDCEYILKNYDSILSQLRLVDSKSDKSKLNDEISKIKKSLNDKKNEKNNILNIYRKGIITEKEVEDQLKDIKSEEEKINKLLNYLYEKNDIYDNEDKLINDTIKIMEHYYNRLDILSINEKIDIIKILLKSIKVSTVIEDGEKKSVFNIIYSLVRLDVFKDRD

SEQ ID NO: 6935 - protein, 544 aa, synthetic construct
MIKIAIYSRKSKFTGKGDSIENQVQMCKDYANTHFNDKNLEFDIYEDEGFTGENLNRPKFKMLMSKLKEYDVLICYRLDRISRTVSDFSSTLEILDSHNCDFVSIKEQFDTSTPMGRAMIYIASVFAQLERETIAERVKDNMLELAKNGRWSGGRTPLGYKSEYESYIDAEGNERKVVKLIKSDKELELVNLIYKTYLEQGSLHKTEVWFTQKGIKSNADILLEKTSLKVILQNPVYVKANKEVVDFMKKEQWNVYGEPDGVHSLLSYNKTEAVRVNGKKTKRAKEKSLWIAAVSSCEGVIDPEMWLAVQRQFSKNKDTFPHLGKTHNGILTGRLKCKNCGSNMIIQHGTVSVKTGQKLFYYICSMKKRSKGEVCNTKNLRAFDIEESTINELESLAERKLNFLSTLKKKNNYTLSTKNIKSKKLLLEKQLLEKQKQIDNLVNKLSLDDDIADILIVKIKSLKKETASISEDLEKLNNDIKISDTEEFNISFIESVLNRCVNIRDLSKEEQKQIIDVLIIDILYDGSIGEAEMNLIGSDTGKKK

SEQ ID NO: 6936 - protein, 446 aa, synthetic construct
MEYNIRYVAIYLRKSRGEEEDLQKHQIVLKEICSKNDWKYVEFKEIGTSDSVEMRPVMQKLLSDIEEDIFDAVLVVDYDRLSRGDMGQQDRIKKIFRKSNTLIITPNKVYDLSNDSDDMYTDFAGLIARQEYKMITKRLRQGKKVGSMIGNWTNGSPPFPYVYEKYKDKFNEKGLVIDDEKLKIYKYIVEKALQGVPPYEIAWELNRQSIPSPRGKTWSNVTIYRLLKDETHLGKIISNKQKGDGHKIKKSDSEEFRRLPKNEWVVIENCHEPVISEFEFCKIEDMMSKRAIVPVSARAGKNDLSGILKCSICGYSMSLYRKKDGKLYIKPCSHTDEYGNKCVNKGQKADDLYENIKKAIIQYRDEVLENLENSNSKELQSTKNNLELKYKEVDKYSKVLEKVNDSYDIGDYSRDEWLNRKSKWESKLGQIEEDITILNKSIKIQD

SEQ ID NO: 6937 - protein, 504 aa, synthetic construct
MYKVAYYARVSTEEEGKLNAIENQIRMLEDFINSNLEWKLVGSYVDIGKSGTTTKSRLEYNNLYSDLSTDKFDIVIVKDLSRLNRNPLDYYKFIDNLVKNKKRLYLYIDNKFYESDDSLINGIKAILASEYCRDLSKKVNAGHKQKQKEGLVITNNSMWGYRQAKGSKKLTIDEKEASYIRQVFNWYIEGKGFRLIYKLLENEEIRNRNGKPFAMTTLKRIIQNQKYKGILVSNKTHKDFDTKQINKNPESEWIIHENIIPPIVSEKVWDKANEILEAKKKKYRLEDKETIAGYFKGKHLYSGKIFCGECGEAFWHTIHGEKKLWMCKEYRSFGMKKENKTHGCLNVKVYTTELDKFVKQVIYDFVQNKDTAIKNVINVLNLSLNDNNDYKDTNKGKNEIVKLKNRKQNMIEMMADQLITKDEYIKSKKIVDEKIENLEAEIKSIDKRKIDIKTKTERLKEMELILNMELESPEYVTDEIIEELLDKIVVKSENEFDIYKWIKI

SEQ ID NO: 6938 - protein, 544 aa, synthetic construct
MIKIAIYSRKSKFTGKGDSIENQVQMCKDYANTHFNDKNLEFDIYEDEGFTGENLNRPKFKMLMSKLKEYDVLICYRLDRISRTVSDFSSTLEILDSHNCDFVSIKEQFDTSTPMGRAMIYIASVFAQLERETIAERVKDNMLELAKNGRWSGGRTPLGYKSEYESYIDAEGNERKVVKLIKSDKELELVNLIYKTYLEQGSLHKTEVWFTQKGIKSNADILLEKTSLKVILQNPVYVKANKEVVDFMKKEQWNVYGEPDGVHSLLSYNKTEAVRVNGKKTKRAKEKSLWIAAVSSCEGVIDPEMWLAVQRQFSKNKDTFPHLGKTHNGILTGRLKCKNCGSNMIIQHGTVSVKTGQKLFYYICSMKKRSKGEVCNTKNLRAFDIEESTINELESLAERKLNFLSTLKKKNNYTLSTKNIKSKKLLLEKQLLEKQKQIDNLVNKLSLDDDIADILIVKIKSLKKETASISEDLEKLNNDIKISDTEEFNISFIESVLNRCVNIRDLSKEEQKQIIDVLVIDILYDGSIGEAEMNLIGSDTGKKK

SEQ ID NO: 6939 - protein, 547 aa, synthetic construct
MKLLVTYIRWSTREQDSGDSLRRQTNLIDAFYSKHKNDYYLLPAHRYVDKGKSGFHQQHKAQGSDFRRMFENVMSGAIPEGSLIVVENFDRFSRADIDTAIDDVRQILRKGVSILTLGDGELYDKSALTDPVKLIKHIIIAERAHQESLVKQKRIAQVWNHKTQLARELKKPMGKQAPGWLELSEDGSHYIVDEDKASLVNIIYDKRLSGMSMFAICKWLNEQGYPTINQRKVRISKTKKPDGNWSALSVKHILTSRSVLGYLPAKISTEDRKTVLREEIESFYPQIVTDSKFYAVQQLLEETGKGKTSSGEHWLYVNILKGLIRCKCGLVMTPTGIRKPVYQGTYRCNGNKESRCSYGTVSRKLLDTQLCSRLFSKLSQLHDEATDTAKLDELQRRLNTVDSELEKLTETLIQLPNITQIQEALRVKQEEKDELIVQLSREKARVKSVSSLDLSGLDMESVEGRTEAQIIIKRLVKEIVVSGNEKLVDIYLHNGNMIRGFPLDGKDDHTLTLEEATDEMQPLDDMLIFGEPVTRIYPAGDMEEVDA

SEQ ID NO: 6940 - protein, 627 aa, synthetic construct
MTEKQGFMTALYERLSRDDELNGESNSISNQKKLLEQYAKEHGFTNLVHFTDDGISGTRFDRPGFLAMMKEVESGKVGTILIKDMSRMGRDYLKVGQYMELLRQKNVRLIAVNENVDSFREDDDFTPFRNIMNEWYARDTSKKIKSTFKAKGKSGKHVASTTPYGYLKDKDDPNVWIVDEEAAVVVRRIFHMTMDGYGPYQIARALKEDKVEIPAVHMAKKDAGLWKGRVEEIKDPYGWGSSTVAGILKKREYLGHTVNFKTRKHFKDKKSHYVSEDNWTVFENTQEAIIDQETFDNVQRIRSNVRRYPDGWGEAHPLTGLMYCADCGSKMYVHRVNNGKRVPQYTCSAYSKVPVGTLCQTQHRINADVVMELIKELLKAVAEYSQLNREEFLETVKKAQTSQQSSEITRLKSRLAEAKKRVQELEKLICRIYEDNILGKLPDERYAILDGQYSKEQKELSAEIADMEAELSGYEEGRRSAEKFIALVDKYQNFEELTTYMLNEFVEKIVVHERDRKGSIETTQEVEIYFNFIGKYLPPHFGEVEMTPEEIEEMKKREARKDRLHQNYLKRKANGKQQEYYERTKEKKKAEMDAKKEEIRQEDIAKGVFVPVSLLPPAEPKKGVASA

SEQ ID NO: 6941 - protein, 558 aa, synthetic construct
MNKEKIKVYTYKRVSTAMQIDGYSLDAQRARMKAYADFNDYEIVGEYEDAGKSGKSIEGRMQFRQMMEDVKSGKDNISYVLVFKLSRFGRNAADVLSTLQVMQDFGVNLICVEDGIDSSKDAGKLMISVLSAVAEIERENIRVQTMEGRIQKAREGKWNGGFAPYGYQLVNGKLEINEEEAVAIRTIYDQYVNTDIGSNGISKYLENHGIRKIQRQNGKNPLFDAHLVRLILKNPVYCGKIAYGRRKTEKVHGTRNEYHLVEQENFLLVDGLHEAIISEEVWNAAQAKLIAQAKKYEHVNKGKNERTHLLSGIVKCPICGAGMYGNKSIKYKKDGTKYKDFFYYGCKHRGMQRGHKCDYRKQIREELLDDAVAEVIVKLVSNPHFAAMMQEKINMKVDTTAIDQEITNYEKQLRQDYAIKSKLMEEIDNLNPDDRHYIRRKSDLDDRLYRMYDKIEELESQLIDARAKKTSIEAEKITGDNIYKVLICFDKLYFAMNDVERRQLIEALIAEIQIYEERKPNGQWLKSIRFKLPIIENDLSIGLDNGEHVETVAKIIKQ

SEQ ID NO: 6942 - protein, 559 aa, synthetic construct
MKTKLYSYIRFSSMKQADGSSYERQKRTAAEIAAKYDLELVTSYQDFGVSAFKGANSRTGALSRFLDEIGRSVPVGSWLVVENLDRISRQSIIEAQELFLSIIRRGITIVTGMDGKVYSKESVNANPIDLLLSVMLFARANEESQTKRNRTNSSALIKIKAHQENPQNPAVAIEEIGKNMWWTDTTSGYVCPDPVFFPIVQEVVELRRNGRSTAEILDHLNATYTPPPAASHKRHSNWSRAMIERLFHTRALIGIKEISVDGVKYELKDYYPRVLDDAEFYHLKKSIGVRACNYGDKEEAKPIPLLSGVNLLKCEHCGSAMVKVKGTNKRPNQYRYSCDAMRSSRIACVHTNWSFRGDQLEKAVLQLLADKIWIAEDKANPVPALKVQIDEISRKIDNLITLSAMTGATKELADQITTLNSERETLYNQIKMAAEEMYSVDSQGWEKLAEFDLEDVYNEDRIKVRFKIKQALKRIGCSRIDKYKNLFVLEYIDGKTQRVVIENSRGPRKGRIFVDLKTINDRQILESNGLVLHPCLDMLTDKNWKPEEEIPGPLQEFGI

SEQ ID NO: 6943 - protein, 547 aa, synthetic construct
MKLLATYIRWSTREQDSGDSLRRQTNLIDAFYSKHKNDYYLLPAHRYVDKGKSGFHQQHKNQGSDFRRMFENVMSGAIPEGSLIVVENFDRFSRADIDTAIDDVRQILRKGVSILTLGDGELYDKSALTDPVKLIKHIIIAERAHQESLVKQKRIAQVWNHKTQLARELKKPMGKQAPGWLELSEDGSHYIVDEDKASLVNIIYDKRLSGMSMFAICKWLNEQGYPTINQRKVRISKTKKPDGNWSALSVKHILTSRSVLGYLPAKISSEDRKTVLREEIESFYPRIVTDSKFYAVQQLLEETGKGKTSSGEHWLYVNILKGLIRCKCGLVMTPTGIRKPVYQGTYRCNGNKESRCSYGTVSRKLLDTQLCSRLFSKLSQLHDEATDTAKLDELQRRLNTVDSELEKLTETLIQLPNITQIQEALRVKQEEKDELIVQLSREKARVKSVSSLDLSGLDMESVEGRTEAQIIIKRLVKEIVVSGNEKLVDIYLHNGNMIRGFPLDGKDDHTLTLEEATDEMQSLDDMLIFGEPVTRIYPAGDMEEVDA

SEQ ID NO: 6944 - protein, 506 aa, synthetic construct
MRHVITYLRYSSATQGAEGADSTRRQNELFKQWLRKNSDAQVVASFNDEGLSGYKGKHLSGQFGDMLSRIESGEFSKGTILLVEAIDRIGRLEHLETEALMNRIIAHGIEIHTLQDGLIYTRDALSDDLGISIIQRVKSYLAHQESKQKSFRVSEKWKQRAKLALAGKQRLTKMVPGWIDPDTLKLNEHAETVRLIFKLLLSGESLHNIARHLQANNISSFSRRKDANGFSVHSVRTILRSETTIGTLPASQRNDRPAIPNYYEAAIDAATFNKAQEILDKNRKGRTPASDNPLTINIFKGLFRCQCGASVHPTGTKNKYAGVYRCNNHLDGRCDVPPLKRKPFDKWMIDNFLGMIDVGNDGEAEGKIASLQHEVEIVTTRIKKATALLLEMDDITELKTQVKELNQKRTELQTTIDSMRRKTSLSDKGLPQLKDIDLMTKEGRVECQLILSKHLKGLTLGKDSVTVTLQNDTEITIPTNPLPLNDGTSIFEIADKELLDIDAFRL

SEQ ID NO: 6945 - protein, 520 aa, synthetic construct
MKKAVYCYARVSSRGQAKDGYGMSRQQTMLRDYVAAYDDSQHSHGYELGDITWLYAEGVSAYSGKNIEDGSVLKTFIDDVLQKKITNSVLVIENLDRFSRAAPNRAAGLFLSLINAGCDIHEVETEMIHHQYSDLNIISGGLQRAHNESKRKARLSIKNWDERIKNTIDGTSVLTHRVPSWIEVKNNKYVIKKGESEKYNLIFKMYADGFGPAAIRDELKNRRMQINEREPTIHHLMKIIKDQRLIGRFNSTGRKVLDGMPIYPVVVEPELFELVNDLRKQRNPLGKINVKANNLFAGLCICMNCGRYVQINSVDKKGNTYFRCGGSLVKIDKCKERGFKYKIVENALLEHLRNFDFSMLRREDNDIQVKINYLSMELVANENYSNEILADIEKEEIPDPHDRRILKNIQRRISEIRTEISTLKQSNIGYETFNDLKDSYTDDLLDPKNTKLRLDFNVKVKRVIKNIKMKRYDDTIILVVSYVGVNEKQAMVINSKTGEVVFMAVQNDDLKSIEYLINND

SEQ ID NO: 6946 - protein, 506 aa, synthetic construct
MRHVITYLRYSSAIQGAEGADSTRRQNDLFKQWLKKNSDAQVVASFNDEGLSGYKGKHLSGQFGDMLSRIESGEFSEGTILLVEAIDRIGRLEHLETEALMNRILGNGLEIHTLQDGLIYTKDALADDLGISIIQRVKAYIAHQESKQKSFRVSQKWGQRAKLALAGKQRLTKMVPGWIDPDTFKLNEHAETVRLIFKLLLDGESLHNIARHLQSNGIKSFSRRKDANGFSVHSVRTILRSVTTIGTLPASQRNDRPAIPNYYEAAIDAATFNKAQEILDKNRKGRTPASDNPLTINIFKGLFRCQCGASVHPTGTKNKYAGVYRCNNHLDGRCDVPPLKRKPFDRWMIDNFLGMIDVGNDGESERKIAALQHEVEIVTSRIKKATALLLEMDDITELKAQVKELNQKRTELQTTINTMKRKTSLSDKGLPQLKDIDLMTKAGRVECQLILSKHLKGLTLGKDSVTVTLQNDTEITIPTNPLPLNDGTSIFEIADKELLDIDAYQL

SEQ ID NO: 6947 - protein, 506 aa, synthetic construct
MRTVITYLRFSSATQGAEGADSTRRQNELFKQWLRKNSDAQVVASFSDEGLSGYKGKHLTGQFGDMLARIEAGEFPAGAILLVESIDRIGRLEHLETEALMNRIIAHGIEIHTLQDGLIYTRDALSDDLGISIIQRVKSYIAHQESKQKSFRVSQKWEQRAKLALAGEQRLTKMVPGWIDPDTFKLNEHAETVRLIFKLLLDGESLHNIARHLQSNDIKSFSRRKDANGFSVHSVRTVLRSVSAIGTLPASQRNDRPAIPNYYEAAIDAATFNKAQEILDKNRKGRTPASDNPLTINIFKGLFRCQCGASVHPTGTKRTYQGVYRCNNHLDGRCDVPPLKRKPFDKWMIDNFLGMIDVGNDGEAEGKIAALQHEVEIVTARIKKATALLLEMDDITELKTQVKGLNQKRTELQTTIDNMRRKASLTDKELPQLKDIDLTTKAGRVECQLILSKHLKGLTLGKDSVIVTLQNDTEITIPTNPLPLNDGSPIFEIADKELLDIDAYQL

SEQ ID NO: 6948 - protein, 560 aa, synthetic construct
MTKLYSYIRFSSSRQADSSSYERQKRTAKEIADRYGLELVTSYQDLGVSAFKGANSKTGALSRFLDEIGKSVPVGSWLVVENLDRISRQSIIEAQELFLSIIRRGITIVTGMDGKVYSKESVNANPLDLLLSVMMFARANEESQTKRNRTNSSALLKIKAHQQNPQSPAVAIEEIGKNMWWTDTTSGYVLPHPVYFPILQKIVKMKQEGHSTGSVLDYLNEHHEPPAPTSNKQHRKWSIAMVSRLFKTKALIGVKEVNVDGVQYELKDYYPRVLSDSEYYFLKNNLIKKAWSFGHAQEKTIPLLSGIGLLKCAHCGSPMVKRKAANGKVEQYRYTCDGEGSGRTDCLYPNWGFRASSLEGAVLQLLADKVWIAEDKANPIPEIQVQIDEISRKIDNLINLSAMTGATKELANQITDLNTQREALHEEIRLFEREMYSVDSQGWEKLAQFDLSDVQNEERLQIRLKIKGALRSIECARIDRNKNLFTLVYLDGLRQRLVIENNRGIRKGQIFVDLKTINDRQILESAGMVLHDHIDILIDEKAFYDGLPKEEDGPLSKFGI

SEQ ID NO: 6949 - protein, 506 aa, synthetic construct
MRSVITYLRYSSAIQGAEGADSTRRQNDLFKQWLKKNSDAQVVASFSDEGLSGYKGKHLTGQFGDMLARIESGEFSKGTILLVESIDRIGRLEHLETEALMNRILGNGLEIHTLQDGLIYTKDALADDLGISIIQRVKAYIAHQESKQKSFRVSEKWKQRAKLALAGEQRLTKMVPGWIDPDTLKLNEHAETVRLIFKLLLSGESLHNIARHLQSNGIKSFSRRKDANGFSVHSVRTILRSETTIGTLPASQRNDRPAIPNYYEAAIDAATFNKAQEILDKNRKGRTPASDNPLTINIFKGLFRCQCGASVHPTGTKNKYAGVYRCNNNPDGRCDVPPLKRKPFDRWMIDNFLGMIDVGNDGEAEGKIASLQHEVEIVTARIKKATALLLEMDDITELKTQVKGLNQKRTELQTTIDNMRRKASLTDKELPQLKDIDLTTKAGRVECQLILSKHLKGLTLGKDSVIVTLQNDTEITIPTNPLPLNDGTSIFEIAEKELLEIDAYQL

SEQ ID NO: 6950 - protein, 560 aa, synthetic construct
MSKEKIKVYLYTRVSTSIQIDGYSLEAQKSRMKAFALYNDYEIVGEYEDAGKSGKSIEGRVQFTRMMEDIKSGKDGVSFVLVFKLSRFARNAADVLSTLQIMQDFGVNLICVEDGIDSSKDAGKLMISVLSAVAEIERENIRVQTMEGRIQKAKEGKWNGGFAPYGYQLIDGKLIINEEEAIAIRTIFDQYVNTSIGANGLSKYLENHGIRKIPRQNGKNPLFDAGLIRKILKNPVYNGKIAFGRRTLEKVHGTRNEYRQVEQDDYLVAEGIHQAIIPDELWQAAQVKLKAQAKKYEHVNKGKNMRTHLLSGIVKCPICGAGMFGNKSIKYKKDGTKYKDFYYYGCKHRLMNRGHKCTYNKQIREELLDDAVAEVIIKLVSNPKFASMIQEKINMKVDTSAIENEIDNYQNELRKSHSTKYKLIEEIDNLDVEDKHYKRRKNDLDDRLYRMYDKIEELESQLIEAKAKKETIEVEKLTGDNIYKVLIYFDKLYKVMNDVERRQLIEALISEIQIYEEKQPNGQWLKSITFKLPIIDEDLNISLENDEQVETCVLLQRRTM

SEQ ID NO: 6951 - protein, 503 aa, synthetic construct
MNNRIDAIYARQSVDKKDSISIESQIEFCKYELKGGNCKEYKDKGYSGKNTERPQFQQLMRDIESGLVRKVVVYKLDRISRSILDFAKMMDFFQKYEVEFVSSTEKFDTSTPMGRAMLNICIVFAQLERETIQKRVQDAWYSRCQRGFKMGGKTPYGFRTEPYVMDGVRTKKLVIEPTEAAFVRQMYEMYADPQVSLHDITKKLTVDGMRTYHGRPLSRATLSVILRNPIYVMADLDIYEFYKSQGTDIYNDAADFAGTNGCYYYQGKGNTEDKHKHLQGQTLVLAPHEGFIPSELWLKCRKKLLASHTYQPARKARNTWMAGKIKCGKCGYALMSAHSNGILYLRCTVHADSKACPGCGCVKLHELEAVVYGAMVKKLKDFKTLTGRNKAAKISPKLTAKRLELAQVESEIEKLLDTLTGASPVLLSYANSKIEELDARRQSIANEIAKLSADAVPMEKMESISGYLDDWENVSFEDKRQVVDALITVIRATNEKVEIEWKI

SEQ ID NO: 6952 - protein, 540 aa, synthetic construct
MKQPYNTTIYNTALYLRLSRDDELQGESGSIQTQRLMLRQYAAEHGLTVVDEYIDDGWSGTNFERPSFQRMIDDIEDGKINCVVTKDLSRLGRNYILTGQYTEIYFPSKGVRYIAINDNVDTINGESELAPFLNILNEMHARQTSKKVKAAMHTRFANGAHYGAYAPLGYVKDPDKKGHLLIDPETRWIVEKIFDLAVHGRGAASITRILVEEKVPTPGWLNYERYGTFANIYAGAPAEKAYAWTIAQVKSILKEETYIGHSVHNKQSNISFKNKKKVRKPQEEWYRVENTHEAIISEEVFQKVQELIASRRRKRRNGTTQIFAGLIKCADCGWSLAYGENKQNKNPYGYYHCSKNGQGLRQCSMHYIRYDVLYAYVLARLQYWSMLAQKDEDKLLKRLLNASDRERNSAKKKQAAELKKAEKRKAEVDGLFAKMYEDWSAGRITEYNFNMLSEKYQNEQKELETKIRQLHETMEAAVQTAADAEKWIALMKQYVNPVELTAELLNTLIEKITVHEAVKGEDGSREQEVEIYYRFIGKID

SEQ ID NO: 6953 - protein, 999 aa, synthetic construct
MSKEKIKVYLYTRVSTSIQIDGYSLEAQKSRMKAFALYNDYEIVGEYEDAGKSGKSIEGRVQFTRMMEDIKSGKDGVSFVLVFKLSRFARNAADVLSTLQIMQDFGVNLICVEDGIDSSKDAGKLMISVLSAVAEIERENIRVQTMEGRIQKAKEGKWNGGFAPYGYQLIDGKLIINEEEAIAIRTIFDQYVNTSIGANGLSKYLENHGIRKIPRQNGKNPLFDAGLIRKILKNPVYNGKIAFGRRTLEKVHGTRNEYRQVEQDDYLVAEGIHQAIIPDELWQAAQVKLKAQAKKYEHVNKGKNMRTHLLSGIVKCPICGAGMFGNKSIKYKKDGTKYKDFYYYGCKHRLMNRGHKCTYNKQIREELLDDAVAEVIIKLVSNPKFASMIQEKINMKVDTSAIENEIDNYQNELRKSHSTKYKLIEEIDNLDVEDKHYKRRKNDLDDRLYRMYDKIEELESQLIEAKAKKETIEVEKLTGDNIYKVLIYFDKLYKVMNDVERRQLIEALISEIQIYEEKQPNGQWLKSITFKLPIIDEDLNISLENDEQVENNKVVPCLAKDWKFDEATNTYTFNLRDDVKWHDGEKFTANDVKFTIETIMNPDNASEIASNYEDITKIDVVNDNTIKITLKAPNTAMLDYLTVGVLPKHALEGKDIATDEFNQKPIGTGPFKLEKWDKGQSITLVKNSDYFVKEPGLDKVVFKIVPDDKAKAMQLKSGELDLAQITPKDMSNFEKDEKNFKVNIMKTADYRGILYNFNSKFFKDKKAKGLPNALSYAIDRKAIVDSVLLGHGVPAYSPLQMGPYNNPDIEKFEYNPEKAKQEIEKLGWKLGSDGIYEKEGTKLAFEITAGESDQVRVDMAKICAQQLKEIGVDAKAVVVTETDWANQDAHLIGWGSPFDPDDHTYKVFGTDKGANYSAYSNPTIDKILQKARETEDKDEKLKLYKQFQVEMTKDMPYTFIAYIDAIYVGKPNIKGLTPDTVLGHHGVGIFWNIADWTIE

SEQ ID NO: 6954 - protein, 460 aa, synthetic construct
MKCAIYRRVSTDEQAEKGFSLENQLLRLQAFAESQGWEVIADYMDDGYSGKNMNRPQIKRMLHDLKLNKFDIVLVYRLDRFTRSVKDLNDLLEVFKENEVDFKSATESIDTSTATGRMILNMMVSTAQWERETISERVKDVVRKKKDLGLISTGYPPYGYAMNDGVISQVPHEVEIVKFIFEKAKVYGFQKISKLLNEQGLVTRNGTKWLISTASRIAHNPFYSGEMRYKRDGETSTVPINVEGYEPVITKEEHKEVLKAIKKRNRNQTRAKSNEVYPFSGIVLCPECGHPMKGTRVSSRGYYYKYYRCDRASDHFCNGKLIRYEKLDKAFAEYIHDAFQIDRIEIKEETNTKDIQREIKRCKSKIERLKDLYVDGDISKKKYKNDVGELNEKIYDLEQKLLSAENKISHDHIRENLKRLSEFWGLIDDNTKMESIRGVFDTITVEIQGNDVVITDHTLL

SEQ ID NO: 6955 - protein, 506 aa, synthetic construct
MRSVITYLRFSSATQGAEGADSTRRQNELFKQWLRKNSDAQVVASFNDEGLSGYKGKHLTGQFGDMLARIESGEFPEGTILLVEAIDRIGRLEHLETEALMNRILGNGIEIHTLQDGLIYTKDALADDLGISIIQRVKAYIAHQESKQKSFRVSQKWEQRAKLALAGEQRLTRNVPGWIDPDTFKCNEHAETVRLIFKLLLSGESLHNIARHLQSNGIKSFSRRKDANGFSVHSVRTVLRSESVIGTLPASQRNDRPAIPNYYEAAIDASTFNKAQEILDKNRKGRTPASDNPLTINIFKGLFRCQCGASVHPTGTKNKYAGVYRCNNHLDGRCDVPPLKRKPFDKWMIDNFLGMIDVGNDGEAEGKIASLQHEVEIVTARIKKATALLLEMDDITELKAQVKELNQKRTELQTTIDNMRRKASLTDKELPQLKDIDLTTKAGRVECQLILSKHLKGLTLGKDSVIVTLQNDTEITIPTNPLPLNDGTSIFEIAEKELLDIDAYQL

SEQ ID NO: 6956 - protein, 506 aa, synthetic construct
MRTVITYLRFSSATQGAEGADSTRRQNELFKQWLRKNSDAQVVASFSDEGLSGYKGKHLTGQFGDMLARIEAGEFPASTILLVESIDRIGRLEHLETEALMNRILGNGIEIHTLQDGLIYTKDALADDLGISIIQRVKAYIAHQESKQKSFRVSQKWKQRAKLALAGEQHLTRNVPGWIDPDTFKCNEHAETVRLIFKLLLDGESLHNIARHLQSNDIKSFSRRKDANGFSVHSVRTVLRSESVIGTLPASQRNDRPAIPNYYEAAIDAATFNKAQEILDKNRKGRTPASDNPLTINIFKGLFRCQCGASVHPTGTKNKYAGVYRCNNHLDGRCDVPPLKRKPFDRWMIDNFLGMIDVGNDGESERKIAALQHEVEIVTARIKKATALLLEMDDITELKAQVKGLNQKRTEIQTTIDTLKRKTSLTDKELPQLKDIDLTTKAGRVECQLILSKHLKGLTLGKDSVTVTLQNDTEITIPTNPLPLNDGSPIFEIADKELLDIDAYQL

SEQ ID NO: 6957 - protein, 591 aa, synthetic construct
MQEVEVIKAKNVLSRQARGKAIERLRVAAYCRVSTDSEDQLNSYKSQVQYYTDMIKKNKEWVLADIYADEAITGTQVTKREDFQRMINDCMNGEIDMVFTKSISRFVRNTLDTLKYVRMLKERNIAVYFEDEKINTLTMDGELLLVVLSSVAQQEVENISANVKKGLKMKMKRGELVGFQGCIGYDYHPEDKTITVNQEEAEIVRYIFNRYVDGAGGSVIGQELESLGYKTKYGSSTWAPSTVIGIIKNEKYKGDILLGKTFTVDPISKRRLENMGEEDKFYMKDHHEPIISEEVFEKAQEILNRRNKNRTTVGSGKREKYSRKYAFSCMLECGFCGGTLTRRNWHSGSQYSKVIWQCVTATKKGKKFCKHSKGIPETAIEEAFVESYRLLCDDNKDVLEEFLQRMDDTLSSSVVSKQLAKAEKEIDALEKKKSKLVDMRLEEIIDKETYESKYADLVSKQEQLVEERQKLQETSDNEKDIKKRLKEFKKTLEQNEVLDKFDRYVFESIVEKVIVGGLDENGNVDPAQLTFVYKTGLKNSVDGAKFKPQRKNARGRHRTNELCSHDSNEVDKMCSDSSNDTCGDGSTIVQT

SEQ ID NO: 6958 - protein, 586 aa, synthetic construct
MQEVEVIKAKNVLARQARGKAIERLRVATYCRVSTDSEDQLNSYKSQVQYYTDMIKKNKEWVLADIYADEAITGTQVTKREDFQRMINDCMNGEIDMVFTKSISRFARNTLDTLKYVRMLKERNIAVYFEDEKINTLTMDGELLLVVLSSVAQQEVENISANVKKGLKMKMKRGELVGFQGCIGYDYHPEDKTITVNQEEAEIVRYIFNRYVDGAGGSVIGQELESLGYKTKYGSSTWAPSTVIGIIKNEKYKGDILLGKTFTVDPISKRRLENMGEEDKFYMKDHHEPIISEEVFEKAQEILNRRNKNRTTVGSGKREKYSRKYAFSCMLECGFCGGTLTRRNWHSGSKYSKVIWQCVTATKKGKKFCKHSKGIPETAIEEAFVESYRLLCDDNKDVLEEFLQRMDDTLSSSVVSKQLAKAEKEIDALEKKKSKLVDMRLEEIIDKETYESKYADLVSKQEQLVEERQKLQETSDNEKDIKKRLKEFKKTLEQNEVLDKFDRYVFESIVEKVIVGGLDENGNVDPAQLTFVYKTGLKNSVDGAKFKTQRKNARGRHRTNELCSHDSNEVDKMCSDSSNDTCGNCS

SEQ ID NO: 6959 - protein, 584 aa, synthetic construct
MKEVEIIKKNDNLENRRRGKYIDCKRVAAYCRVSTDSEDQLNSYKSQVSYYTDLINNNIEWCMVDIYADEAITGTQVNKREDFQRMINDCMNNEIDMIITKSISRFARNTLDTLKYVCMLKEKNIAVYFEDEKINTLTMDGELLLVVLSSVAQQEVENISANVKKGLKMKMRRGELVGFQGCLGYDYHKEDKTLTINEKEAEIVRYIFNRYIEGAGCSIIGQELENLGYKTKYGSTIWSNSTVLGIIKNEKYIGDVLLGKTFTVDPISKRRLDNLGEEEKYYVKNNHEPIISREIFDKAHEILNRRGKNRGKYEEGVTKREKYSRKYAFSCMMECGFCGGTLTRRNWHSGSEYSKIIWQCVVATKKGKKYCPESKGIPERVIENVFVESYRLLCDEKKSVLEELLNRINDIVGSSEVNNIIKKIEKELSVIEKKINNLVDMRLDDIIEKETYEIKYQELIDNQEKLLNERNKLNVIAKNENSMKQRLKEFKKTLEENEVLDKFDRGVFESVVEKVIIGEKNKDGENDPTKITFIYKTGFKNTLSSDEFKIPRKNARGRHKRKELCLHGNNEVENLCSHSSSNTL

SEQ ID NO: 6960 - protein, 423 aa, synthetic construct
MKEVEIIKKNDNLENRRRGKYIDCKRVAAYCRVSTDSEDQLNSYKSQVSYYTDLINNNIEWCMVDIYADEAITGTQVNKREDFQRMINDCMNNEIDMIITKSISRFARNTLDTLKYVCMLKEKNIAVYFEDEKINTLTMDGELLLVVLSSVAQQEVENISANVKKGLKMKMRRGELVGFQGCLGYDYHKEDKTLTINEKEAEIVRYIFNRYIEGAGCSIIGQELENLGYKTKYGSTIWSNSTVLGIIKNEKYIGDVLLGKTFTVDPISKRRLDNLGEEEKYYVKNNHEPIISREIFDKAHEILNRRGKNRGKYEEGVTKREKYSRKYAFSCMMECGFCGGTLTRRNWHSGSEYSKIIWQCVVATKKGKKYCPESKGIPERVIENVFVESYRLLCDEKKSVLEELLNRINDIVGSSEVNNKIKK

SEQ ID NO: 6961 - protein, 543 aa, synthetic construct
MFVCCGKELTLLKQQANNKEKVALYSRLSRDDGLDKESNSIANQREMLKRYAKENKFYVYDEYIDDGFSGTTFNRPALNRMFEDIEAGKVNVVLVKDMSRLGRNNALFMYYVEEVFPDLDVRFIAINDMVDTAQDDNEIMPFKSVLNEYYARDISKKIRSSIRTTALTGGFTGAFAPYGYLVDPENKKKLIVDPETAPIVKRIFELSQQGTSTHQIARILCKDGILVPRAYRAKKKGILEQSKGFTFPTDWVGKNVKMILENQVYLGHMVSHKSQTKSFKNKKIVPVPKEDWIVVENTHEAIIDKETFEIVQKFISVKKQPNKTGKPNIFVGLVKCPDCGRNLAYSNPNGNEPRFRCRTYARNTELCTTHAISYKALYEIVQNDIKNHVNSMEELGDHFIKEMRELSETSGSQKIHQFNQELVSLEKRIDEIDSIFTKLIEQNALGKITDERFSKMSMNYETEQAEVVQSYRELKSKIKSEEEKVQGTDRFLETISKYKDVTELNRSMLCELIDSIYVYQAEGIGKERTQKVEINYRFLAVSH

SEQ ID NO: 6962 - protein, 540 aa, synthetic construct
MKQPYNTTIYNTALYLRLSRDDELQGESGSIQTQRMMLRQYAAEHGLTVVDEYIDDGWSGTNFERPSFQRMIDDIEDGKINCVVTKDLSRLGRNYILTGQYTEIYFPSKGVRYIAINDNVDTINGESELAPFLNILNEMHARQTSKKVKAAMRTRFANGAHYGAYAPLGYVKDPDKKGHLLIDPETRWIVEKIFDLAVHGRGAASITRILVEEKVPTPGWLNYERYGTFANIYAGAPAEKAYAWTIAQVKSILKEETYIGHSVHNKQSNISFKNKKKVRKPQEEWYRVENTHEAIISEEVFQKVQELIASRRRKRRNGTTQIFAGLIKCADCGWSLAYGENKQNKNPYGYYHCSKNGQGLRQCSMHYIRYDVLYAYVLARLQYWSMLAQKDEDKLLKRLLNASDRERNSAKKKQAAELKKAEKRKAEVDGLFAKMYEDWSAGRITEYNFNMLSEKYQNEQKELEAKIRQLHETMEAAVQTAADAEKWIALMKQYVNPVELTAELLNTLIEKITVHEAVKGEDGSREQEVEIYYRFIGKID

SEQ ID NO: 6963 - protein, 463 aa, synthetic construct
MRKIKKYEEDTRGVAIYARKSRITNKGDSIGVQFKQCAEYAKRELKLDDDFAFMEYEDKGLSGYYYDRPDFQRMIHDIQNGKIRAVVCYKLDRIGRKTTDLLRLMDFLEKYGVDLLICSNGINTASGVSKIFIQIFAVVAEFERDTLTERITDNLMELAKDGRWLGGNTPIGFTTRRVTTGCGKNKSAYSYLESIEEEKRMVQRLYELFLQNRSIQTTAKEMNKEGYRTQTGVEFNASTTRLILRNPIYCIADDKSYQYFIDHDGNVFGDKEDFDGVHGLSAYNKTDQEKYEDSDSTFISPKFVQTVENKPINEWIISVGKHEGFISSDNWIMAQGILDDIAEKYNRPHRKTNALLAGLVHCPHCGRRLSVISESDRWTNGKPRFKYVCPGYRKKECNFKAVDGVLLDEFVVQQLSKLSDETREHFQKILSIKIEDVIEKSQSTQEYTMLRRKQEQIENSITK

SEQ ID NO: 6964 - protein, 648 aa, synthetic construct
MNREGKKCVLYPRVSTEMQVDGYSLEGQKNSLKRFADREEMEIVGVYEDAGKSGKSIEGRPAFKKMLSDIKNGLEIDYILVYKLSRFGRNAADILNSLEFVQSYGINLICIEEGIDSSQTSGKLLISVLSAVAEIERENIIEQTMNGRREKARQGGWNGGFAPYGYYLENNQLLIEETEAKAIRIIFEKFGNSDIGLGGVAKYLNLQGIKKIPRQNGKLETWSSHFIRQILDNPVYCGKIAYGRRTREKVKGTKNEYKQVHTDDYILEDGQHEGIVSAELWEKVRAKRIATGIKQPSKVGKDRSHLLTGVLKCPMCGSSMYTNKHAWTNKDGTYKEVYYYICGRNKQERGHHCDYKASLRKTDIEPLVIEAVKELVSDKYFAREIKSRIGIQTDTGNVDKEIANYESKLKEVDLNKARLEREIDNLPADARYRERKIHDMTLRLDGLYDTIVELEERIEDAKLRRSSIEMEAITLENVYKIMKNFGKLYAIMSDEEKKSVISYLIKEIQIYPNGESEMPLKSIEFNFPIYRDGKEVRKVLWERGNTVETVALLSKLGVDKHIDVEIKLDELDLTSAESKATYAQIKEYVLEKFGLKVSTLYIAQIKKKCGIEMREHYNKSKKDNQAIPQCTPEKEEAIMDALRHFKMI

SEQ ID NO: 6965 - protein, 537 aa, synthetic construct
MKQQIYNTALYLRLSRDDELQGESSSITTQRSMLRLYAKEHHLNVIDEYIDDGWSGTNFERPSFQRMIEDIEAGKINCVVTKDLSRLGRNYIMTGQYTELYFPSHNVRYIAIDDGVDSEKGESEIAPFKNIINEWVARDTSRKVKSAFKTKFAEGAYYGAYAPLGYKKHPDIKGKLLVDEETKWIVEKIFSLAYQGYGSAKITKILREEKVPTASWVNFTRYGTFAHIFEGKPESKRYEWTIAHVKAILKSEVYIGNSVHNRQSTVSFKSKKKVRKPESEWFRVENTHEPIIDKEMFYRVQEQIKSRRRQTKEKATPIFAGLVKCADCGWSMRFATNKANKTPYSYYSCSFCGQFGKGYCSMHYIRYDVLYQAVLERLQYWAKAVQQDEEKVLNKIQKVGNAERMREKKKKANALKKAENRQNEIDRLFAKMYEDRACEKITERNFIMLSGKYQKEQIELEQQITSLREELSKMEQDMVGAEKWIELIKEYSVPKELTAPLLNAMIEKILIHEATTNEDNERIQEIEIYYRFIGKVD

SEQ ID NO: 6966 - protein, 603 aa, synthetic construct
MSRTSKITALYERLSRDDDLNGESNSITNQKKYLEDYARRNGFTNIRHFTDDGFSGVNFNRPSFQELIKEVEAGNVATIIVKDMSRLGRNYLQVGFYTEVLFPQKDVRFLAINNSIDSNNASDNDFAPFLNIMNEWYAKDTSNKIKAVFDARMKDGKRCSGSIPYGYNRLATDKQTLVVDPVASEVVKRIFLLANEGKSPRAIAELLTEEKVLIPAAHAKEYHPEQYNGTKFSDPYTWGMSTIRAILSRQEYLGHTVLRKSVSTNFKLHKRKNTDEDEQYVFYNTHEPIISQELWDSVQKRKKRANRTAARGTHSNRLSGYLFCADCGRRMTLQTHYSKKDRSLQYSYRCGGYASRVNSCTAHSISADNVEALILSTVKRLSRFVLNDEEAFAKELQVLWNEKQTEKPKHNKSELQRFQKRYDELSKLIRGLYENLVSGLLPERQYKQLMKQYDDEQAELETKIEEMQKELTEEKANTVDIKHFISLIRKCKEPTEISDLMFAELIDKIVVYEAEGVGKARTQKVDIYFNYVGQVDIAYTEEELAEIKAQEEQIEMERLAKQREREKVYREKRKAKKLAENGGEIVKAKVCPHCQKEFVPTSN

SEQ ID NO: 6967 - protein, 406 aa, synthetic construct
MKQQIYNTALYLRLSRDDELQGESSSITTQKSMLRLYAKEHHLNVIDEYIDDGWSGTNFERPSFQRMIEDIEAGKINCVVTKDLSRFGRNYIMTGQYTELYFPSHNVRYIAIDDGVDSEKGESEIAPFKNIINEWVARDTSRKVKSAFRTKFAEGAHYGAYAPLGYKKHPDIKGKLLIDDETKWIVEKIFSLAYQGYGSAKITKILREEKVPTASWLNFTRYGTFAHIFEGKPESKRYEWTIAHVKAILKSEVYIGNSVHNMQSTVSFKSKKKVRKPESEWFRVENTHEPIIDKEVFYRVQEQIKSRRRQTKEKATPIFAGLVKCADCGWSMRFGTNTANKTPYSYYACSFYGQFGKGYCSMHYIRYDVLYQAILERLQYWAKAVQQDEEKVLHKIQKAGNAERIR

SEQ ID NO: 6968 - protein, 547 aa, synthetic construct
MKLLVTYIRWSTKEQDSGDSLRRQTNLIDAFYAKHKEEYYLLPAHRYVDKGKSGFHQQHKNQGSDFRRMFENVMSGVIPEGSLIVVENFDRFSRADIDTAIDDVRQILRKGVSILTLGDGELYDKSALTDPVKLIKHIIIAERAHQESLVKQKRIAQVWNHKTQLARELKKPMGKQAPGWLELSEDGSHYIVDEDKASLVNIIYDKRLSGMSMFAICKWLNEQGYPTINQRKVRISKTKKPDGNWSALSVKHILTSRSVLGYLPAKISSEDRKTVLREEIEGFYPQIVTDSKFYAVQQLLEETGKGKTSSGDHWLYVNILKGLIRCKCGLVMTPTGIRKPVYQGTYRCNGNKESRCSYGTVSRKLLDTQLCSRLFSKLSQLHDEATDTAKLDELQRRLNTVDSELEKLTETLIQLPNITQIQEALRVKQEEKDELIVQLSREKARVKSVSSLDLSGLDMESVEGRTEAQIIIKRLVKEIVVSGNEKLVDIYLHNGNMIRGFPLDGKDDHTLTLEEATDEMQSLDDMLIFGEPVTRIYPAGDMEEVDA

SEQ ID NO: 6969 - protein, 526 aa, synthetic construct
MKAAIYARYSTDKQREASIEDQFTICTRCAEREELEVSQRYSDDGVSGSTPVARRAGGARLLMDAFNGRFDVLIVEGLDRLSRDQVEQEQLVRRLEHRGIVIIGVADSYDSRMGGRKIMRGVRGLINEMFLDDLRHKTHRGQAGQVERGYAAGGKSYGYDIVRDHLGSKYQINDVQAGWVRWIFGRYAEGWSVQRIAHELNARKVPSPRASTWVVSAIYGSPNKGSGILNNCLYQGLYIWNRSQWVKDPDTGKRQRVDRPREDWREIQVPELRIVDEDLWQTVRKRIDGRLPGRKQGAPVRTLFGGLMACPYCGGAIVAINSRLYGCANRKDRGPTVCKGIHFKRETADKNLLETLRDELLSPAAQEQMRRQVQAIIAERQRSSAADGAAAAGRRKELDGEIQRLVDAIASIGASQALADRLRAAEVERGQLAASKPRAGGDGPSAGEIGKRIKKTMANLESALAADVQQARILVAELYGKIDVVAEGENIYAEYNNAAEKLLLASSGMSLKLVAGAGFEPTTFGL

SEQ ID NO: 6970 - protein, 457 aa, synthetic construct
MDKIKRVALYIRVSTEEQVLHGDSIRTQTEALEQYSKDNNFIIVDKYIDEGYSATNLKRPNLKRMIEDVKNNKIDLVMITKIDRLSRGVKNYYKIMETLEKHKCDWKTILEDYDSSTAAGRLHINIMLSVAENEAAQTSERIKFVFQDKLKRGEVITGSVPFGYKIKDKHLVIKEDEASIVREAFDAYQDFSSLAKTIQHINTKFSTKYMFKWMPKMLKNKIYIGIYEKGDLVVENYCEPIISKEQFNFVQTLLKKNIRFSENKFKMNYLFSGMIVCGSCGRKMGGVHSRGGANRHYLYYRCPLSFATKLCDNKPYLNEKKVEAFLLENVKKELQKTILEHESNNKKRQKKNNNKNLRNKLEKQIEKLQDLYFDDLINKDTYKFKYKKLNDDLSELNKAKNEAESVEKDLKSMKIFLDTNFEDNYYDMNYSEKRTLWTSAIDRIEVQKNGELVIKFL

SEQ ID NO: 6971 - protein, 452 aa, synthetic construct
MLRVALYIRVSTEEQVLNGDSIRTQIEALERYSKENDFNIVDKYVDEGFSATNLKRPSLQRLLKDIEKDKVDLVLLTKIDRLSRGVKNYYKILEILEKHKCDWKTILENYDSSTAAGRLHINIMLSVAENEAAQTSERIKFVFQDKLQRKEVVSGTIPTGYKIENKHLVIDKEKEYIVKSIFDEYEKVCSVRSLIDIINNLCGELYSYNKIKNILKNELYIGIYNKRGFYVEDYCEPIISKEQFQRIQRILEKNKKSTPNKNRYYHIFSGLLKCKECGRTLKGNSGNVREKLYLSYRCSTFYLNKNCIHNVTHNEKHIENYLLTNLKPQLHKHMVKLEAQNEKIRQNKKSNKKDEKKKIMKKLNKIKDLYLEDLIDKETYRKDYEKLQSQLDNITEEQESQIIDTSHIKKFLDIDINDMYSDLSRVERRRFWLSIIDYIEIDNDKNITINFI

SEQ ID NO: 6972 - protein, 548 aa, synthetic construct
MNKKVAIYCRVSTIEQAEEGYSIDEQRRRNIEYCEKEGHENFKVYEDRGISGKNISGRPGLKELLQDANAGKFDLVIVWKLNRISRKLIDILNIVDTLDKNSIAFRSLTESFETETPAGKLQLNIMGAIGEFERGTIAENVKMGMMARAREGKWNGGKVLGYNILEIPSEGKKRKETKLVVNEKEAITVRRIFELYSEGHGYKATVNIVNKEGHKSKRGNAFSTAAIKEILKNPVYIGKIRYNVRQDWNEKRRRNINPDPIIVDGEHESIIDTETWERVQIILKDRSKTHNRVYDSELILSGLLKCPVCGASMTVSRSTRKRKDGTKVVNEYYACGNWKNKGTAVCNSNSVKAEVADEVVINKLIETVNNELLLKKVINNINKNKSSKLKPKLDEMNLVNKEIDKLNGKKNSSIELFEDGILTKTELAERVKKLNEEIDILKFRLDEIKQDVMLAEGEPIPFELVSQVMKKFGQVFKDSSTRQQRKQLLNLLVSKVTIDKSRNIDSIELQINEDVIKYLKKEGPSEKDEDPSFFNISMLNCTCLKFVI

SEQ ID NO: 6973 - protein, 588 aa, synthetic construct
MKEVEIIKKNDNLENRRRGKYIDRKRVAAYCRVSTDSEDQLNSYKSQVSYYTDLINNNIEWCMVDIYADEAITGTQVNKREDFQRMINDCMNNEIDMIITKSISRFARNTLDTLKYVRMLKEKNIAVYFEDEKINTLTMDGELLLVVLSSVAQQEVENISANVKKGLKMKMRRGELVGFQGCLGYDYHKEDKTLTINEKEAEIVRYIFNRYIEGAGGSIIGQELENLGYKTKYGSTTWSNSTVLGIIKNEKYIGDVLLGKTFTVDPISKRRLDNLGEEEKYYVKNNHEPIISREIFDKAHEILNRRSKNRGKYEAGVTKREKYSRKYAFSCMMECGFCGGTLTRRNWHSGSEYSKVIWQCVVATKKGKKYCPESKGIPERVIENAFVESYRLLCDEKKSVLEELLNRINDIVGSSEVNNKIKKIEKELSVIEKKINNLVDMRLDDIIEKETYEIKYQELIDNQEKLLNERNKLNVVAKNENSMKQRLKEFKKTLEENEVLDKFDRGVFESVVEKVIIGGKNKDGENDPTKITFIYKTGFKNTLSSDEFKIPRKNARGRHKRKELCLHGNNEVENLCSYSSSNTCGNCS

SEQ ID NO: 6974 - protein, 592 aa, synthetic construct
MKKDVKVIKGDTTLKRTASGCVERSIKRVAAYCRVSTDTEDQINSYNSQVEHYTEFIQKNKEWTLAGIYADEAITGTQVDRRIDFQRLINDCMNGDIDMIITKSISRFARNTLDTLKYVRKLKEFNVAVFFEEENINTLTMDGELLLTILSSVAQQEVENISANVKKGLRMKMERGEMVGFQGCLGYDYNPETKSISVNEKEAEIVRYIFRRYIEGVGGMVISRELEEQGYLSPRGNKRWTETTVLGIIKNEKYKGDLMMGKTYTVDPISKRRLDNFGEQDKFYIESHHEPIISKEDFEKAQGIRLRRSKNRNTVANNGGKREKYSRKYAFSSMLECGFCGHNLSRRNWHSSSEYTKVIWQCVNATKNGKKYCPHSKGIEEAAIEKAFMESYRQVCHNNVEITNEFLKTVEEELKDNSLAKDLKKISNQLDKIIKKEKDLVELRLNESISMDIYQDKYNEIAISKEKLLAEKRTLEVTLTDEKALKKRLEGFKKLLESNKYLEEFDRAVFESIVDKIIIGGTNDEGEIDPAMITIIYKTGKKDSQDGRLFKSRRKNAKEVNEETGGKLYPQSSDEVNNLYSYPIDNTCGNCS

SEQ ID NO: 6975 - protein, 663 aa, synthetic construct
MSKEKIKVYLYTRVSTSIQIDGYSLEAQKSRMKAFALYNDYEIVGEYEDAGKSGKSIEGRVQFTRMMEDIKSGKDGVSFVLVFKLSRFARNAADVLSTLQIMQDFGVNLICVEDGIDSSKDAGKLMISVLSAVAEIERENIRVQTMEGRIQKAKEGKWNGGFAPYGYQLIDGKLIINEEEAIAIRTIFDQYVNTSIGANGLSKYLENHGIRKIPRQNGKNPLFDAGLIRKILKNPVYNGKIAFGRRTLEKVHGTRNEYRQVEQDDYLVAEGIHEAIIPDELWQAAQVKLKAQAKKYEHVNKGKNMRTHLLSGIVKCPICGAGMFGNKSIKYKKDGTKYKDFYYYGCKHRLMNRGHKCTYNKQIREELLDDAVAEVIIKLVSNPKFASMIQEKINMKVDTSAIENEIDNYQNELRKSHSTKYKLIEEIDNLDVEDKHYKRRKNDLDDRLYRMYDKIEELESQLIEAKAKKETIEVEKLTGDNIYKVLIYFDKLYKVMNDVERRQLIEALISEIQIYEEKQPNGQWLKSITFKLPIIDEDLNISLENDEQVETVVLLSHKKPDSHINVKVEFGEGEGKVPLKAISERAEAYKPKERVTYKMIKEYIEAKYGFKVHTAYIAEVKRDLGLPMYDAPNAVEELKQPRKHPTAEKVEAIKDALKHFEVI

SEQ ID NO: 6976 - protein, 664 aa, synthetic construct
MSRRSTPNSPFGSADDADAAPPETVRRNRSASRYAGARKSILEELRAGNAPTQEAQIVAPAVRTERQARGRAVIYVRVSTEEQARVGGGAEGYSIPFQRDACRRKAEELNLTVVAEYAELGRSATTVNRPEFQRMFAEINDLGVTHVIVHKLDRLSRSPKADYYVDSGLEATRAALVSVSEYIDDTPQGKLNLQIQRGMASYYSNNLATEVIKGLKSKLAAGGTPGRAPIGYLNKRRLEGSADIRWVELDPERASHVRWAFTEYAKGEYSLANLADALEDRGLRTRATPKVPSRPVSISSLHRLLINPYYVGIVAYKGVYHQGTHEALVDMDTWLQVQDVMHAHNTAGEKDRTHNSYLRGTIWCSHCGTRMVYSKNRGKSGNLYEYFFCMGRKNKKNPCPRGFVKLPAIEAGIEDFYKHMQIKGSTAEKIRAIVLDELDTATREAADAMAAATRNKAQLERERAKLLEAHYAGAVPLDMLKSEMDRLTRALNIAERDLTEGTESRAQVKILLDQAVEAIMTCHRVYAETKPPIRRMLNQGFFNKLYINDDGSVSDGEIHEPFAHLVAHLSTVFFDKRKSRVPRVVQNQVLELEQTGTDGLSNRAALTLVKAVEASELATLLSFDRGKQNRPTLAGGPGLNNEHLAEAEGFELSHAPLLRVADLP

SEQ ID NO: 6977 - protein, 558 aa, synthetic construct
MSKEKIKVYLYTRVSTSIQIDGYSLEAQKSRMKAFALYNDYEIVGEYEDAGKSGKSIEGRVQFTHMMEDIKSGKDGVSFVLVFKLSRFARNAADVLSTLQIMQDFGVNLICVEDGIDSSKDAGKLMISVLSAVAEIERENIRVQTMEGRIQKAREGKWNGGFAPYGYQLIDGKLLINEEEAIAIRTIFDQYVNTSIGANGLSKYLEKHGIRKIQRQNGKNPLFDAGLIRKILKNPVYNGKIAFGRRTLEKVHGTRNEYRQVEQDDYLVAEGIHEAIIPDELWQAAQVKLKAQAKKYEHVNKGKNMRTHLLSGIVKCPICGAGMFGNKSIKYKKDGTKYKDFYYYGCKHRLMNRGHKCTYNKQIREELLDDAVAEVIIKLISNPKFASMIQEKINMKVDTSAIENEIDNYQKELRKSHSTKFKLIEEIDNLDVEDKHYKRRKNDLDDRLYRMYDRIEDLEGRLIEAKAIKETIEAEKLTGDNIYKVLIYFDKLYKVMNDVERRQLIEALISEIQIYEEKQMNGQWLKSITFKLPIIDKDLNICLDNDEQVETVAKIIKQ

SEQ ID NO: 6978 - protein, 624 aa, synthetic construct
MDAQEVMHMTDYSKITALYSRLSVGDEDRDGGESNSIQNQKIFLENYARGQHLTNIRHYIDDDESGRFFDRSAYSRMMDDVENGKIGVCIMKDLTRWGRDYLQVGNAMEIFRRNNVRFIAVNNGIDSEKPDTLEFAPFINIMSEWYAKDISKKVKTGIKTKGMSGKPIATEAPYGYMKDPDNKDFWIIDEEAAEVVRLIFRLFIGGKNRNQIAVYLTQEQIPTPTFYMKDRGRGTCKNKALNEDNRYKWNKVTLTHILTRQEYCGDVVNFKTTKHFRDKRNHYVDRSQWQITENVHEPIIDRADFETAQRILENAPVRRPNGDGEIHPLSGLLFCKDCGAKMHIRIDYRNGGKRHVAYCSEYHKGKAKNPKCHSPHIIDADLLMQTVAEVLKKIEDYSISNRAEFEALVKKNLAMQQTDQTKKQQKRIPQITTRLEQIDKVLNKLYEDNALGTIPQDRYEQMSQKYSEEYYTLKTELATLQEQLSAYENAGGRAQKFLKLTERYAAFTDLTPAILNEFISRIEVHERDKKRAKQAVQHIGIYFNYIGRFENEVTQLAEPTEQEVRQMREEIEEAQKEKSRAYHRQYSREYRARNLEKQREYDRMKAREYRARRKAQAAAAAPAQ

SEQ ID NO: 6979 - protein, 540 aa, synthetic construct
MKQPYNTTIYNTALYMRLSRDDELQGESGSIQTQRMMLRQYAAEHGLNVIDEYIDDGWSGTNFDRPDFQRMIDDIEDGKINCVVTKDLSRLGRNYILTGQYTEIYFPSKGVRYIAVNDNVDTINGENELAPFLNILNEMHARQTSKKVKAAMRTRFANGAHYGAYAPLGYVKDPDKKGHLLIDPETRWIIEKIFDLAVHGRGAASITRILVEEKVPTPGWLNFQRYGTFANIYAGAPEEKAYAWTIAQVKSILKEETYIGHSVHNKQTNISFKNKKKVRKPKEEWYRVENTHEAIISEDVFRQVQEQICNRRRRQKNGTTQIFSGLVKCADCGWSLAYGMNSQNKNPYAHYHCSKYGQGLHQCSMHYIRYDVLYAYVLSRLQYWSVLAQQDGDKLLKRLLNASDKERNTARKRQTAELKKAEKRKAEVDTLFAKMYEDWSAGRITEYNFNMLSEKYQGEQRELDAKIERLHEAMEAAAQTAVDAEKWIGLMKQYVNPTELTAELLNTLIEKILVHEAVKGEDGSREQEVEIFYRFIGKIE

SEQ ID NO: 6980 - protein, 503 aa, synthetic construct
MNNRIDAIYARQSVDKKDSISIESQIEFCKYELKGGNCKEYTDKGYSGKNTDRPKFQELVRDIKRGLIAKVVVYKLDRISRSILDFANMMELFQQHNVEFVSSTEKFDTSTPMGRAMLNICIVFAQLERETIQKRVTDAYYSRSQRGFKMGGKAPYGFHTEPIKMDGINTKKLVVNPDEAANIRLMFEMYAQPTTSYGDITRYFAEQGILFHGKELIRPTLAQMLRNPVYVQADLDVYEFFKSQGTVIVNDASDFTGMNGCYLYQGRDVKPSKKNDLKDQMLVLAPHEGIVPSDIWLTCRKKLMNNMKIQSARKATHTWLAGKIKCGNCGYALMSINNPVGKQYLRCTKRLDNKSCAGCGKIITSELETVVYQQMVKKLASYKTLTGRKKAAKANPKIAALQVELAHVDGEIEKLMDSLTGANNVLLSYVNVKIAELDGRKQELLARIAELTVEAISPEQISQISDYLDTWENISFDDKRRVVDLMITTIAATSDSLNITWKI

SEQ ID NO: 6981 - protein, 523 aa, synthetic construct
MAVSRNVTVIPAIKRVGNNKTSESRPKIRVAAYCRVSTDSEEQASSYEIQIEHYTNYIKKNKEWELAGIFADDGITGTNTKKREEFNRMIEECMAGKIDMIITKSISRFARNTLDCLKYIRQLKDKNIAVFFEKENINTMDSKGEIMLTIMASLAQQESQSLSQNVKLGIQYRYQQGEVQVNHKRFLGYTKDENKQLVIDPEGAEVVKRIYREYLEGASLLQISRGLEADGILTAAGKAKWRPETLKKILQNEKYIGDALLQKTYTVDFLSKKRVKNNGIVPQYYVENSHEPIIPRELFMQVQEEMVRRANLRGRKGGKKRVYSSKYALSSIVYCGHCGDIYRRVHWNNRGYKSIVWRCVSRLEEKGSECTAPTINEETLQTAVVKAINELLANKEPFLSTLQKNIATVFNEENDNATDDIEGKLEELQQQLLIQAKSKNDYEDVADEIYRLRELKQNALAENAEREGKRQRIAEMTDFLNEQSCELEEYDEQLVRRLIEKVTVFDDKLTVEFKSGVEIDIEI

SEQ ID NO: 6982 - protein, 640 aa, synthetic construct
MARQDGVHNLKCKELYMDAQEDMHMNDYNKITALYSRLSVGDEDRDGGESNSIQNQKKFLESYARQLKLTNIRHYIDDDESGRFFDRSAYSRMIEDVENGKIGVCIMKDMTRWGRDYLQVGNAMEIFRRNNVRFIAVNNGIDSEKPDTLEFAPFINIMSEWYAKDISKKVKTGIKTKGMSGKPIATEALYGYVKSPDNKDFWIIDEEAAGVVRLIFRLFLDGKNRNQIAVYLTQAQIPTPTFYMKERGRGTCKNRALNEDNRYKWNKATLTHILTRQEYCGDVVNFKTTKHFRDKRNHYVDRSQWQITENVHEPIIDRADFETAQRILENAPVRRPNGDGEIHPLSGLLFCKDCGAKMHIRIDYRNGGKRHVAYCSEYHKGKAKNPKCHSPHIIDADLLMQTVAEVLKKIEDYSISNRAEFEALVKKNLAMQQTDQTKKQQKRIPQITTRLEQIDKVLNKLYEDNALGTIPQDRYEQMSQKYSEEYYALKTELSILQEQLSAYENAGGRAQKFLKLTERHAAFTDLTPAILNEFISRIEVHERDQKRARYAIQHISIYFNYIGRFENEVTQLAEPTEQEIRQMREEIEEAKKEKSRAYHRKYSREYRARNLEKQREYERIKAREYRARRKAQTAAAQPAQ

SEQ ID NO: 6983 - protein, 540 aa, synthetic construct
MKQPYNTTIYNTALYMRLSRDDENYGDSVSIETQRTILQQYAKEQGLHVVGEYVDDGWSGTNFERPDFQRMMDDMEAGKVNCIVTKDLSRFGREHVMMDYYLEFLFPEKRVRYIAVAENEDTEKGLSDFVPFKNLFNEWFAKDTSRKVKAAFKAKFATGQRIGAYAPIGYRKHPEIKNKLIIDEETRWIVEKIFDLAIHGRGAASITRILIAEKVPTPGFINFQRDGTFANIYAGAPEEKSYAWTIAQVKSIMKDETYIGHTIHYRETNISFKNKRRVRKPQSEWVRVENTQEPIISEQVFRQVQEQIANRRRKCKDGTTQIFSGLVKCADCGWSLSYGENRQNSKPYGHYHCSKYGQGTRQCSMHYIRYDVLYAYVLFRLQYWSGLVQHDEERLLKQLLNATDKGQAAARKKQAAELKKAEKRKAEVDTLFARMYEDWAAGRITEYNFSMLSGKYQSEQAELDEKIEQLQSAIATESQNAVDAEKWIALMKECVNPTELTAELLNMLIEKIVVHEAVKGEDGSREQEVEIFYRFIGKID

SEQ ID NO: 6984 - protein, 537 aa, synthetic construct
MKQQIYNTALYLRLSRDDELQGESSSITTQRSMLRLYAKEHHLNVIDEYIDDGWSGTNFDRPSFQRMIEDIEAGKINCVVTKDLSRLGRNYIMTGQYTELYFPSHNVRYIAIDDGVDSEKGESEIAPFKNIINEWVARDTSRKVKSAFKTKFAEGAHYSAYAPLGYKKHPDIKGKLLIDDETKWIIEKIFSLAYQGYGSAKITKQLRAEKVPTASWLNFTRYGTFAHIFEGKPESKRYEWTIAHVKAILKSEVYIGNSVHNMQSTVSFKSKKKVRKPESEWFRVENTHEPIIDKEVFYRVQEQIKSRRRQTKEKATPIFAGLVKCADCGWSMRFGTNKANKTPYSYYACSYYGQFGKGNCSMHYIRYDVLYQAVLERLQYWAKAVQQDEEKVLNKIQKVGNAERIREKKKKASTLKKAENRQNEIDRLFAKMYEDRACEKITERNFVMLSSKYQKEQIELEQQITSLREELSKMEQDMIGAEKWIELIKEYSVPKELTAPLLNAMIEKILIHEATTNEDNERIQEIEIYYRFIGKVE

SEQ ID NO: 6985 - protein, 502 aa, synthetic construct
MMYDALYGRQSIEKKDSISVESQLEYCRYETHGDPYIEYADRGFSGKNTNRPDFEKMMNDIRAGKIKRVIVYKLDRISRSILDFANMMEVFQEYHVEFVSSTEKFDTSTPIGRAMLNICIVFAQLERETIQKRVTDAYYARNKRGFYMGGRIPYGYRLKETIIDNIRTSMYEEVPEESEQLKLIYSLYADPANSLGDIIRYLNKHGIKQLRGGNWTSARISEMLRNPVYVEADIDVYNFFKSQGADVYNPASDFTGYNACYLYKGTVSTTRKQCDLTDKEIVLAPHKGFISSATWLACRIRCLNNRQSTQTCKPKNSWLTGKVKCGNCGYALVIRKAKTKWGRYFVCSQSGHSGNCKGTGSTVYADVLEEYMLKAIREKLSEFKKLSDEEENKSVPKVSKNKIRLTQIDEEINDLLSKVGSANAILMKYINDKVSELDTERQTLQEEIISLTCTHTENKMGQITDHVKKWDNISFEDKQAVVDALIKVIKVANGNIEITWKI

SEQ ID NO: 6986 - protein, 706 aa, synthetic construct
MSRTSKITALYERLSRDDDLNGESNSITNQKKYLEDYARRNGFTNIRHFTDDGFSGVNFNRPSFQELIKEVEAGNVATIIVKDMSRLGRNYLQVGFYTEVLFPQKDVRFLAINNSIDSNNASDNDFAPFLNIMNEWYAKDTSNKIKAVFDARMKDGKRCSGSIPYGYNRLATDKQTLVVDPVASEVVKRIFLLANEGKSPRAIAELLTEEKVLIPAAHAKEYHPEQYNGTKFSDPYTWGMSTIRAILSRQEYLGHTVLRKSVSTNFKLHKRKNTDEDEQYVFYNTHEPIISQELWDSVQKRKKRANRTAARGTHSNRLSGYLFCADCGRRMTLQTHYSKKDRSLQYSYRCGGYASRVNSCTAHSISADNVEALILSTVKRLSRFVLNDEEAFAKELQVLWNEKQTEKPKHNKSELQRFQKRYDELSKLIRGLYENLVSGLLPERQYKQLMKQYDDEQAELETKIEEMQKELTEEKANTVDIKHFISLIRKCKEPTEISDLMFAELIEKIVVYEAEGVGKARTQKVDIYFNYVGQVDIAYTEEELAEIKAQEEQIEMERLAKQREREKVYREKRKAKKLAENGGEIVKAKVCPHCQKEFVPTSNRQIFCSKDCCYQARQDQKKADREAEKGNHYYRQRVCAVCGSTYWPTHSQQKFCSEECQKQNHNEKSLEFYHKKQKEKSKCKDLLQTKEPVSSTNSSEIITIPA

SEQ ID NO: 6987 - protein, 403 aa, synthetic construct
MNRSGKKCVLYPRVSTEMQVDGFSLDGQKNSLKRFADREEMEIVNIYEDAGKSGKSIEGRPAFMQMLSDIENGLGIDYVLVYKFSRFGRNAADILNSLEHIQSFGVNLICIEEGIDSSQTSGKLLISVLSAVAEIERENIIEQTMNGRKEKARQGGWNGGFAPYGYFLKDKQLFIQEDEAEAVRIIFDKYVNENMGFYKIANYLNLQGIQKVKRDNGTLTQWSTHFVRMIIDNPVYMGKIAFGRRTREKVKDTKNEYRQVHQDDYILADCQHDGIISEELWTQAHEKREITGVKAPSKIGRDRAHLLSGILKCPKCGGPMYTNKHAWTNKDGTYKEIYYYVCSKARTTRGKSCDYKAMLKKTDIEPLVVEAIRDLIKNEDFSAEIKSKIGKQIDTSTLNRERT

SEQ ID NO: 6988 - protein, 558 aa, synthetic construct
MLQTDKITALYCRLSQEDMQAGESESIQNQKLILQKYADEHHFFNTRFFVDDGFSGVSFEREGLQAMLHEVEAGNVATVITKDLSRLGRNYLKTGELIEIIFPEYEVRYIAINDGVDTAREDNEFTPLRNWFNEFYARDTSKKIRAVKQAKAQKGERVNGQVPYGYIADPNDRNHLLPDPETAHIVKQIFAMYVRGDRICEIQNWLREHEVLTVAELQYRRTGSHRHPRPHPNCIYNWPDKTLYDILARKEYLGHTITGKSYKVSYKSKKTKKNPEEKRYFFPNTHEPLIDEETFELAQKRIATKHRPTKVDEIDLFSGLLFCGDCGYKMYLQQGAGTLERKHAYTCGKYRNRIRTGELCTTHYIRKSVLKELVLADLQRVLSYVKEHEQEFIETANECSAKAVQKTLTQQRKELDKAQSRISELNILFRKLYEDNALGKLSDEQFAFLTSGYDEEKKTLTRRIAELSQEIDNATERSADVKRFVALVRKYTAITELTYENVHEFVDRILIHELDKETNTRKIEIFYSFVGRVDTGDKPTESISYFRQIGADVKSYAI

SEQ ID NO: 6989 - protein, 509 aa, synthetic construct
MSRAIAYLRFSNAIQQNGDSVRRQRNLINQWLDLNPQYDLDDTNYEDLGLSAYTGAHAERGAFGEFMEAVDLGLIEPGTVLLIESLDRLSRERIGEATERLRSILKAGIEVVTLCDGSHYTASSLDDPYASIKAILIAQRANEESEIKSKRLKSAWEKKREEAALTGRVMTSACPRWMKLNPQTREFELINERVKVIRDIFEYRIKGMSFNKITKILNDESTPTFKGKVKEWNPSTIEHLLSNKALIGTCVPSYASKLKGMKEIQNYYPPAMSDDVFNSVQDIKLSPFGKLSERDNPNLINIFRSIMKCSVCNHSMIVTTVAGDNPGYYVCPMRRLHRCYAPPIKRGLIDSVLIHQVLVFTTKFTKSGNSKSLVQQITKRNFELNKQIEKLIVALKMAPEVSILANEIKELDKELRKNETTLRLLREKKRISIIDDVNKLDLKVKADRETCQKYAFKIFKDIRIDTSRKTCCIFFINGLKFIDFPLYKTTRGEAIVEALAYIDEDILFF

SEQ ID NO: 6990 - protein, 515 aa, synthetic construct
MKTAIYLRKSRADLEAEARGEGETLAKHRTTLLKIAKEMNLNVLAVREEIVSGESLVKRPEMLALLEEIEDNKYDVVLCMDMDRLGRGGMKEQGIILETFKRSNTKIMTPRKTYDLNDEWDEEYSEFEAFMARKELKIITRRMQRGRVASVEAGNYLGTHAPFGYDIHRLNKRERTLTINSEEASIVRMIFDWYANEDMGANAIRSKLNDLGYKSKLGNDWNPYSILDILKNNVYIGKVTWQKRKEVKRPDAVKRSCARQDKSDWIIADGKHEPIISESLFEQVQEKLNSRYHVPYNTNGIKNPLAGIIKCSKCGYSMVQRYPKNRKETMDCKHRGCENKSSYTELIEKRLLEALKEWYINYKADFEKHKQDDKLKETQVIQMNEAALRKLEKELVDVQKQKNNLHDLLERGVYTVDMFLERSNVVSDRITEITSTMENLKKEIKTEIKKEKVKKDTIPQVEHVLDLYFKTDDPKKKNSLLKSVLEKAVYKKEKWQRLDDFELVLYPKLPQDGDI

SEQ ID NO: 6991 - protein, 488 aa, synthetic construct
MSSYAVYVRVSTDRDEQISSVENQIDICRNWLERNGFEWNEQCVYKDEGISGTLFTDRPAIQLLLQKAKTKKINMVVFKSISRLARDLKDSLEIREVFLAHNVRIISVEEGYDSTKAGKNDMAFELWSLFSAQYSRTLSSSISAALAAKVRRGEHIGKVPYGYNREDQKLIINKEEAEVVRNIYGWYNIGWGFKRITNELNRLGIKPKSKEFWQMTSVQRIVRSPIYKGTFILNQYTSVKVGGKKKQIRNPKEKWFIFPKHHPAIVDEETWSRVNEKNITDNKTKITAWNEFRNLAKCAVCGSNMVIVQSHLRKKSGERREWKYLKCSQYRRAGKHGCVNHVPIQYHDFRQFIIDLLVKKGESVNLKLQSNVEEGQEKKIKKLQQLLNVNEQKKKTLLDLYLEELINKEEFEKKRSDLEAEITKVSQELFILQQNDVVQTDIKTIKEAFEQLQKQEQDLFHVFQKLIQEIMIHQNGTVDITYTFEAPL

SEQ ID NO: 6992 - protein, 540 aa, synthetic construct
MSPTVTTIPAIKPVLGQTRNSTGIPQTIKRVAAYARVSTDMDEQTSSYEAQIDYYTTYIHSRADWQFAGMYCDEGISGTSIKRREGFQTMIDDALAGKIDLILTKSVSRFARNTVDSLTTVRKLKEAGVEVYFEKENIYTFDTKGELLITIMSSLAQEESRSISENATWGHRKRFQDGKIMVPYKSLLGYKKGEDGNLEIDEEQAPIVRRIYADYLNGSSPKTIAHTLTNEGIPTPRGKTKWSTTTIRSILTNEKYKGDALLQKTFTTDFLSKTTKTNEGEVPQYYVTGNHEAIIDPAVWDLVQAEIARRSTPGESSHHPFASRIKCGQCGGWYGRKTWHSTSKHRRHVWRCNNKYEHATRCTTPHLSEKQIQDAFTSVLTKLAPPPSQETLNLIIAQTCDTTKLEEQLAQEARARNAILTRLNQLITTNATHTQDQDTYQHTFDQLHADYERHTQHYDNLEAQIRHTHEKRHRIEQAHAYRTKHPALDYTDEAWNTLISHATIHTDGIAKFYLKDGSVLISLILRRDMLNGLPAERVSK

SEQ ID NO: 6993 - protein, 540 aa, synthetic construct
MSPTVTTIPAIKPVLGQTRNSTGIPQTIKRVAAYARVSTDMDEQTSSYEAQIDYYTTYIHSRADWQFAGMYCDEGISGTSIKRREGFQTMIDDALAGKIDLILTKSVSRFARNTVDSLTTVRKLKEAGVEVYFEKENIYTFDTKGELLITIMSSLAQEESRSISENATWGHRKRFQDGKIMVPYKSLLGYKKGEDGNLEIDEEQAPIVRRIYADYLNGSSPKTIAHTLTNEGIPTPRGKTKWSTTTIRSILTNEKYKGDALLQKTFTTDFLSKTTKTNEGEVPQYYVTGNHEAIIDPAVWDLVQAEIARRSTPGESSHHPFASRIKCGQCGGWYGRKTWHSTSKHRRHVWRCNNKYEHATRCTTPHLSEKQIQDAFTSVLTKLAPPPSQETLNLIIAQTCDTTKLEEQLAQEARARNAILTRLNQLITTNATHTQDQDTYQHTFDQLHADYERHTQHYGNLEAQIRHTHEKRHRIEQAHAYRTKHPALDYTDEAWNTLISHATIHTDGIAKFYLKDGSVLISLILRRDMLNGLPAERVSK

SEQ ID NO: 6994 - protein, 365 aa, synthetic construct
MIVVGTVEIIPTKPVVPYRMQVAAYTRVSTGAERQLHSLNEQVSYYSRLIQSTPGWVYAGVFTDEGITGTSTKSRQGLADLMEVARGGGIDIVLCKSISRLARNTVDLLATVRELKNLGVAVRFEREGIDTLSSDGELLLTLLASFAQEESRSLSQNVKWSIQRRFTQGIPNSTLIYGYRWVEGQFVIEPREAKAIQLAYQWFIEEGVSAETITKRLNNAGYRSRFGKRIEPNLIRRALRNERYTGKMVLQKYYSTHIRQNNPPIKIPGNCHATWLKTLIHPSLPKMCSMLLKPRLDADKKEDRQQSPLLTPGVLLPASPARGVVNTINVKAVSKRETKSGFGGVGALVKDKAIPATPLTYAKLC

SEQ ID NO: 6995 - protein, 540 aa, synthetic construct
MSPTVTTIPAIKPVLGQTRNSTGIPQTIKRVAAYARVSTDMDEQTSSYEAQIDYYTTYIHSRADWQFAGMYCDEGISGTSIKRREGFQTMIDDALAGKIDLILTKSVSRFARNTVDSLTTVRKLKEAGVEVYFEKENIYTFDTKGELLITIMSSLAQEESRSISENATWGHRKRFQDGKIMVPYKSLLGYKKGEDGNLEIDEEQAPIVRRIYADYLNGSSPKTIAHTLTNEGIPTPRGKTKWSTTTIRSILTNEKYKGDALLQKTFTTDFLSKTTKTNEGEVPQYYVTGNHEAIIDPAVWDLVQAEIARRSTPGESSHHPFASRIKCGQCGGWYGRKTWHSTSKHRRHVWRCNNKYEHATRCTTPHLSEKQIQDAFTSVLTKLAPPPSQETLNLIIAQTCDTTKLEEQLAQEARARNAILTRLNQLITTNATHTQDQDTYQHTFDQLHADYERHTQHYGNLEAQIRHTHEKRHRIEQAHAYRTNHPNLAYTDDAWNTLISHATIHTDGIAKFYLKDGSVLISLILRRDMLNGLPAERVSK

SEQ ID NO: 6996 - protein, 419 aa, synthetic construct
MIVVGTVEIIPTKPVVPYRMQVAAYTRVSTGAERQLHSLNEQVSYYSRLIQSTPGWVYAGVFTDEGITGTSTKSRQGLADLMEVARGGGIDIVLCKSISRLARNTVDLLATVRELKNLGVAVRFEREGIDTLSSDGELLLTLLASFAQEESRSLSQNVKWSIQRRFTQGIPNSTLIYGYRWVEGQFVIEPREAKAIQLAYQWFIEEGVSAETITKRLNNAGYRSRFGKRIEPNLIRRALRNERYTGKMVLQKYYSTHIRQNNPPHQNTGQLPRYLVENSHPPIITQDVFNAAQAEIRRRQKGGWAAIPTINTGCFTARITCAGCGKHYQRKSRIKAGNKIRFWRCWSACKGQGNPCHAPNLRETMLENLITNLLELETFEPQAVMAQVETIEVHPDHLDVHLARKETLKVCLDEKGEPL

SEQ ID NO: 6997 - protein, 525 aa, synthetic construct
MGKVRIIPAHQPKGNSVHHQRSPQPFEKLRVAAYCRVSTDYDEQASSYETQVAHYKELIQKEPTWEFAGIYADDGISGTNTKKREQFNKMIAACKAGKIDLIVTKSISRFARNTIDCLKYIRDLKAINVAIFFEKENINTMDAKGEVLITIMASLAQQESESLSQNVKMGIQYRYQQGKVFVNHNHFLGYTKDDQGNLVIEPEEAKVIKRIFYSYLNGMTMKQIADSLKADGILTGGKTKNWRSSSVAKILKNEKYMGDALLQKTYTVDFLNKKRVKNEGIMPQYYVENDHPAIIPKSVFMQVQQIIKQRRNGITTKNGKHRRLNGKYCFSQKLFCGKCGDILQRNMWYRPEKVAVWRCASRIRRSKTGRRCMIRNVKEPLLKEATIEAFNQLIEGHELANKQIKANIMRVIENSKGPTLDQINQQLEDVQMKLIQAANQHQDCDALTQQIMDLRKQKEKVQSCETDQQAKLHSLDEINKLVELHKYGLVDFDEQLVRRLVEKVTIFQRYMEFTFKDGEVIRVNM

SEQ ID NO: 6998 - protein, 551 aa, synthetic construct
MDKKKVAIYARVSTVEQAEEGYSIDEQERLLREYCDKHDLEVYKSYSDRGISGKDIKHRPELKEMLKDSEENKFDMVLVWKINRLSRKLADVLKMVELFEKNNVTFKSYSEPFETNTPAGKMQFQMMALIGEFERGTIAQNVKMGMLARAREGKWCGNRVLGYDIVPVEGSLNKKRKETKLVINEKEAETVRLIFNEYSNGNGYKAITNKLNKLGYKTKKGNNFSVGSIKDILTNPVYIGKIRYNVRQDWSEKRRKNINPNPIIVDGLHDAIISEELWDKVQKILESKKGKPARIYDGEYPLTGILKCPVCGAGMVIMRTTNKLKDGTKKRITYYACGNWKNKGTAVCNSNAIRVDKANEYVFGKIEELLSNEKMIKSIIENINNTRRSNVEPNKKKLEKIDKDLSKLKSRKTKILEAYEDDLITKEELVERKSELDKNISALEEEREKLLITVTDENQIEISYDVIKEILQSFGRIMSNCTSREKQKMLLHMLVSEITIGKDREIDSIKLKINDGLIDYLSNEEEVPMKGASSFLMQHFRFGRMKLNLVI

SEQ ID NO: 6999 - protein, 571 aa, synthetic construct
MVAGLNNKCSKQIAVIYARVSGTKQVREGDGLASQESRCREFASYKRYEVMRVFADDMSGKYAKRPQMDAMLSFLRKNRARNPVVIIDDISRLARGLEAHLQLRASISKAGGQLESPSIEFGDDPDSIMVENLLATVAQHQREKNGQQTINRMRGRMMNGYWSFYPPVGYHYEKVDGHGKLLVPHEPDATYIREAFEGYASGRFASASELKRFFEQTDVFPKDRHGEIHLSRIQEMLDRAIYAGYIDYEPWGLHLIQGKHDPLISLEIWEAVQDKRERRANAPARKDINRDFPLRGFVCCDDCGEPYTAGWSKGRHKHYPYYLCDTKGCASYRKSIQRDKIEGGFEAMLQTMQPSRELFELSFAIFQKIWSHHEERAASKKKSMQSEIRQLDKQQEQFLDRIVDTSNQSVIAAYENRIEELDRKKARLTDQMNRSHKPNGSFKEIYRTAFAFLANPCNLWASDKLEDKRAVAKLVFADTLRYKRNEGYRTAKTSNIFNMLEDLTMEKSEMVPPAGIEPALPKERDFESRASTSSARGATDTEAAAYHGYLKRCKRVCAGLQKNPRLAQFWC

SEQ ID NO: 7000 - protein, 706 aa, synthetic construct
MSRTSKITALYERLSRDDDLNGESNSITNQKKYLEDYARRNGFTNIRHFTDDGFSGVNFNRPSFQELIKEVEAGNVATIIVKDMSRLGRNYLQVGFYTEVLFPQKDVRFLAINNSIDSNNASDNDFAPFLNIMNEWYAKDTSNKIKAVFDARMKDGKRCSGSIPYGYNRLATDKQTLVVDPVASEVVKRIFLLANEGKSPRAIAELLTEEKVLIPAAHAKEYHPEQYNGTKFSDPYTWGMSTIRAILSRQEYLGHTVLRKSVSTNFKLHKRKNTDEDEQYVFYNTHEPIISQELWDSVQKRKKRANRTAARGTHSNRLSGYLFCADCGRRMTLQTHYSKKDRSLQYSYRCGGYASRVNSCTAHSISADNVEALILSTVKRLSRFVLNDEEAFAKELQVLWNEKQTEKPKHNKSELQRFQKRYDELSKLIRGLYENLVSGLLPERQYKQLMKQYDDEQAELETKIEEMQKELTEEKANTVDIKHFISLIRKCKEPTEISDLMFAELIDKIVVYEAEGVGKARTQKVDIYFNYVGQVDIAYTEEELAEIKAQEEQIEMERLAKQREREKVYREKRKAKKLAENGGEIVKAKVCPHCQKEFVPTSNRQIFCSKVCCYQARQDQKKADREAEKGNHYYRQRVCAVCGSTYWPTHSQQKFCSEECQKQNHNEKSLEFYHKKQKEKSKCKDLLQTKEPVSSTNSSEIITIPA

SEQ ID NO: 7001 - protein, 600 aa, synthetic construct
MPQNMTEKIPAAQKAVIYCRVSSKKQSTDGAGLESQEHRCREYAESKGYHVEAVFPDDTSGGGDFMNRPGMVALLAYLDAKPQENYVVIFDDLKRYARDTEFHLKLTREMAQRNAKRECLNFNFEDTPEGKFIETIIAAQGELERKQNRRQVIQKMKARVEQGFWIFRAPVGYKYINSKRGGKELIIDEPVASTVRQALEGFASGRLNTQFAVRKFLEECPHFPKDLPNGEVRRQTVVRVLRQVAYAGFVQAPNWNVKPRLGNHEPLISYETYTKIQNILDEGVYAPQRKDLHHDFPLRGAVCCSSCSTPMTAGWSKGKTKSYPYFWCRTKGCDQYGKVINRDKMETEFKTLLKGIQPTPSLLNLFKTMFNDAYEMHMAQAQDRLKAFKQESIDLEKQIAGLVERVMDASSQTVIAAYESKIDLLEKKRLVALEKSKQRTSNNDTQSNLFELSFQFLANPCKIWESGRFDLQRLVLKLVFLEHLPYTKGKGFLNSKKSLPFNVLGDFSSMKCQMVLPERFELSTSPLPRECSTPELRQQSRLWVALQATDRDAQPTVSTGMTRLLPQLACWCKSAICFFWNNDKVVHSAMSTSSNAHHLP

SEQ ID NO: 7002 - protein, 559 aa, synthetic construct
MLHPHAILPPLEKVESHTTMRTLIYARYSSQLQNSRSIEDQIAVCRERAEREGWQIIDIFTDYAISGAAGIEEGQRPGLNAMLARVESGGIDQVLAEATDRIARHQGDAFAIRERLNYAGARLFTLSDGEVDDITGTIKGLMDARFRKELGAKIKRGQRGTVSQGRVPAGLAYGYRTANQVDSRGNLLRGLRVIDEEQAAIVRRIFREVATGRSTRAIAASLNAEGVPGPRGGEWRGSTIHGDRQRMNGLIQNQIYIGKIVHNRTSKVTDPRTRKTLIKPNPESEWMSEDAPDLRIIDDELWNAAQAARAKTEGVTFRKAKRPKRLLSGIGRCGCCGGPWNVIGDGVWACGSRRDGGNCTNNRTIRNHLYEQRVLAALQEGLLDPRYVAIFVKEYHEDLARRTAEIKAERSVLERKLRNATDKVKRLAAALAEGAGEFMEVREIMTKAAKERADAEEQLANLEALPVIALHPKIADDYREQIRALSDALAGNAEAQLEAIPRLRALIDTVTITPAKTPRGVEIEVSARLRAIIGLASGRPLDDELMFQVERVKGIEPSS

SEQ ID NO: 7003 - protein, 986 aa, synthetic construct
MIDKILKDIKGLFKVQDKAKFLKQNIPYLAFFYVGNIFSHHVRAYTGGDVIDKIFQGILELNTMSFLPSFHPTDILIGVGVATLIKFIAYTKGKNAKKFRQGKEYGSARWGTRKDIEPYIDEKFQNNILLTQTERLTMNGRPKNPKYARNKNVLVIGGSGSGKTRFYVKPNLMQMHSSYCVTDPKGTIVLECGKMLEDNGYEIKILNTINFKKSMKYNPFAYLRSEKDILKLVQTIIANTKGEGEKAGEDFWVKAEKLYYTALIGYIFYEAPREEKNFATLLDMIDASEVREDDETYMNPIDRLFEALEKKEPTHFAVKQYKKYKLAAGVVCSKRLLNQAVGKSLRTHNLKPKKGAQVMRKNEKITALYERLSRDDFGKDDDQQRESNSISNQKAMLEEFAARQGFTNIVHFTDDGISGTCFDRPGFLAMMKEVEAGNVEYLCIKDMSRMGRDYLKVGQIMEILRQRGVRLIAINDGVDSVRGDDDFTPFRNIMNEYYARDTSRKIRSTFQSKGKSGKHLTGTVIYGYLWNEARDQWLVDPEAAEVVKRIFAMTIEGYGPYQIASKLKEEKVLIPSAYLAQHGEGVNKNKTFKDVYGWGSSTICNILEKREYLGHTINFKTRKHFKDKKSHYVPEDEWTIFENTHEPIIDQQTFDLVQKIRGNVRRYPDGWGEAAPLTGLLYCADCGGKMYVHRTNNGKRISQYTCSQYTKVPCGTLCKTQHRINEDVVLSLVSEMLKAIAEYAKHDRAEFVRVVQEAQSSQQTAEVRKQRTRLATAKQRVSELEVLLCKIYEDNILGKLSDSRYATLDAQYEKEQSELTAEISALEKAIKSYEKHEKDADRFIALIDKYENFDKLTIAMLNEFIEKILVHERDRKGSIQTTQEVEIYFNFVGRFVPPAFGEVELTPEELEEIRKREERKDRLHQNYLKRKASGAQKRCEDKIKKRKKAEIEAKKAAIRAEDIAKGVFVPVSSLPQREPMKGVQTA

SEQ ID NO: 7004 - protein, 493 aa, synthetic construct
MNAAIYARVSTDKQAEQGYSLGAQIADCTAKARSLGATLVQEFIDDGYSGAYLDRPALTSMRDAVRAKMFDFVVVYDIDRLSRNLSHQLLITDDIESAGAQLHFVNADYKASAEGRLFYAIRGAFAGYEREKIRERSMRGRVAMLKQGKVIEDSHVYGYDFDKENHCYIINELEARNIREIFRLYLMGFGGTSAIARHFNANIDKFPPPNRRKWAVSTIHDILKREMYTGRFFAHKTYHFRTGLKSERRIERPPDEWIPMQCPPIISDEEHKRAVELLSKNRTFDLHRKRTPFLFQGLLYCTQCGRMLNVRRNGKNVAYYMCIHNQNDGNFASCGSRNFQCAPTDAALWELLESICQSPEAVENYIRKSLPPPAPGAGAEDARQQELSRIHQERQSILQWVGDGLISHEDATARLKALKAAENRLARVNTCKPLAPVRTDAGAVYEAVRNCPPTPDAKRQIVRQVIDHINIMRTDAGTGRKHYQFDIQIFFRK

SEQ ID NO: 7005 - protein, 521 aa, synthetic construct
MIRITKIESTPSFVRQKKVRVAAYARVSTDSDEQLLSLETQKEHYESFIKEHQGWEYAGLYFDEGISGTKIERRDGLLKLLKDCEEGKIDRVITKSISRFSRNTTNTLEMVRKLSKLGIYIFFEKENIDTEHMSSELMLSILSSIAESESRSISENSKWSVKRRFEEGKFIISYPPYGYTKVGEKIVVVPEEAEVVKEIFRMALSGVGSYGIANTLNEKGIKTKRNRRWGESTVLEILKNEKYTGDAIFQKTFTDDGFNRHINYGEENMYLCKNHHEAIISHETFDMVGKAMTRRGQEKGNSENTDKYQNRYSLSGKIICGECGSTFKRRSHYKPSGDYIAWTCKGHLADKDSCSMLYVKDAHIKLAFVRMMNKLQVGWKHMMRPFVDGLRGFNNIDRLHQINDLESRIERNDGQQRVLVSLLSSGYIEPEVYHAEHNALTQEADSLMKEKQQLSQSISGDMTHLTEAEKLQRFLAKKVDITEYDEEIFTEYVESITVQNRKTFTFNMKCGLKLTESVALE

SEQ ID NO: 7006 - protein, 525 aa, synthetic construct
MNKNVILIPARKRKGNSVAKEVDKPKLKVAAYCRVSTDSDEQAGSYEVQVEHYTDYISRNNKWELAGIYADEGISGTNTKKREGFNEMIDDCMKGKIDLVITKSISRFARNTLDCLKYVRKLRDKNIAIIFEKENINTLEASGELLLTIMASLAQQESQSLSQNVKLGLQFRYQNGDVQVNTNHFLGYTKDKDGKLIIDKKEAVIIRRIYREYLEGASIRDIAKGLERDKIKTGGKRYKWHFSTVHGILTNEKYIGDALLQKTITTDFIEKTRIKNDGSYPEYPQYYVTGNHEAIIPRDIFTQVQEEIARRANMSSGNGKRKRLYSSRYALSSLCTCSRCGDIYRRVAWNNRGKRSNVWRCCTRVESGPKACDAPTIPESELQEATIKAINQLLKCSPSMIKTLLDNVRETIVDDNSCELETLDELLKVKQTELVKLTQAKKDYSDLLDEMDILQEKRQKLLVERAEREGVKRRLSELELFIKVTSREITEYDEALVRKYIKEIKIYDYRFQVFFKAGIDLDITR

SEQ ID NO: 7007 - protein, 519 aa, synthetic construct
MKKVTKIKAKQAPAAEKAKLRVAAYCRVSTDTDAQLESLEAQKQHYESYIACRDDWTFAGLYYDEGITGTKKDKRPELMRMIRDCEAGKIDFVITKSISRFSRNTTDCLEMVRKLLALNIPIYFEKENLNTGSMESELFLAILSSMAEGESVSISENSKWSIQKRFKNGTFKISYPPYGYDWDGEQMVVNPEQAENVRWIFDQVLAGRGTQDIAKDLNAKGICTKKGNRWTAHTVRTLIVNEKYTGDVIFQKTYTDSQFNRHVNYGERDQYALTDHHEAIVSREVFAAAGEVIRQHSKEKGIVKGCGKYLNRYCFSGKIICSECGDVFKRRTHYCSEYKYIVWTCSTHLDDKSKCSMKFIHDDALKAAFVTMINKLIFARKLILKPYVQALRKGNNDDSLHRIQELQTLLMENSQQKERLTGFMAQGYIDQILYNEEMNTLLAQADRYNAEIEMLSNSVKGDASHIQAATALLRFTEKSAMLDFFDEELFEETVSRVRVLSREKIAFELKCGLTLTERM

SEQ ID NO: 7008 - protein, 520 aa, synthetic construct
MANVTFIPAKRQVGNNIKKAEKPKLRVAAYCRVSTDSDEQATSYDAQIEHYTEYISKNPDWVLAGIFADDGITGTNTKKRDEFNRMIDECHAGNIDMIITKSISRFARNTLDCLKYIRELKDKNIPVFFEKESINTMDSKGEVLLTIMASLAQQESQSLSQNVKMGIQYRYQQGKVQVNHNRFLGYTKDADGNLVIEPKQAEIVKRIYREYLEGKSMDKIAAGLEADGILTGAGKERWHPSTIKKILTNEKYIGDALLQKTYTTDFLTKKRIKNNGTMPQYYVEGDHEAIIPKDIFLLVQEELARRRRVHTTENGKRRCYSCKHCFAQIVFCGECGEYYRRVHWNNRGCRSIVWRCCSRLENTGHACRSRTVNETILEQVVIDAINQVLCQKNDFLKTLQSNMKTAITDRDSLSPEVIDARMKELQKELLKKANQSADYDAIADEILRLRDMRKQSEVDSVLRDDQMKRIKDLQDFIKKQSTDITEFDEALVSRHIAKITVFEDHFIVDFKSGITIDIEA

SEQ ID NO: 7009 - protein, 527 aa, synthetic construct
MTRKVTAIPATRNRFTETPLVSKEKRKVAGYARVSTDHEEQTSSYEAQMDYYRNYINSRSDWVFAGMYADEGVTGTSTKARAGFKKMVEDALAGKIDLIITKSVSRFARNTVDSLSTVRKLKENGIEIYFEKENIWTLDAKGELLITIMSSLAQEESRSISENTTWGTRKKMADGRFTLAYSRFLGYDKGEDGQLVINPEQAKTVRLIFRLFLDGLSYKAICDELMRRGIPTPAGKKKWSHSTIVSILTNEKYKGDALLQKTYVSDFLTKATKKNNGEIPQYYVENDHEAIIEPRIFDLVQAEKERRSSQPGKYSGVGIFSSKIKCGCCGNWYGSKVWHSNDKYRRVVYRCNHKYKGDEKCSTPHLTENEIESIFIKAVNALISNRQSVLDDVKIIRDRLCDTSILEKEQTRLGGELEIVADLIEKYVRENASTVLDQDEYKARYEELVERYNRTKDEYDNIESMLASRHNKALMLDNFMLEMKKHKKFIEKFDGAMWSSLVDYITVYSRKDIRVTFRDGTIITINE

SEQ ID NO: 7010 - protein, 552 aa, synthetic construct
MRTVTRLEPSVPAIRELKKVAAYCRVSRDSERLMHSLSAQVSHYSELIQKNPEWIYAGVYADEGISGTRADRRDEFSRMVGDCRAGKIDIILTKSISRFARNTVDLLNTVRELKSLGVEVRFERESISSMGADGELLLTILASYAQEESRSLSDNVKWSRLKGYELGKPHARTPIFGYDWVGDRLVPKPGEAEAVKSIFSLYLDGKTSNQIAKWLAENDIRTIRGKTFTNTQVFYILRNITYTGNLLFQKSFTEDPITKKRKRNNGELTQFLVENTHEPLISMEEFDRVQTELDRRGKLSSYANRVDGMNCFYTKVRCGVCGQNYVRRKFRNSTEEYYSWLCRSHFKNKTENACEGRAVRQSVLEDGFETATGIAFTEEAFAEMVEVVLISGDEELTYRFKDGTEKKVYWERSNRSKPPLKRKKVEQKEQKHFFTGKVICGCCGKPMRRIQSYSVNNDAIARWKCQDSARCGTHFIYEDTLMETLSHVLWLTDFDESVYQKKVGSIEVSGRGLLRITMKSGEAVTVRFETRQRRSKRDEESNGNPGHEEQVH

SEQ ID NO: 7011 - protein, 507 aa, synthetic construct
MKRVISYIRFSSEKQAKGDSLRRQSKMVTDWLKAHPEYYLDESLTFRDLGVSGFTGKHLKGGLGDFLTAIEKGLVKAGDTLLIESLDRLSRQNVDRASELLRNILRSGVDVVTLSDGEHYTRESLKDPLALIKSILIMQRSHEESLRKSERIQAAWNRKKELISEGIKISKRCPAWLKLNDDRKSFSVIPDKVETVKRCFQLRLEGKSIWEIVRTLNAEGHRSMNQYKPGKFGQTSVQDLLKNRSVIGYFTPKGREEIAGYYPSVIDETTFYKVQQLSHSRYGRKPASAKPLSVNLFKGVIRCSECGHALIITGFSDTRNGIYRCPLRNENRCSAKGLSRKQTDGTLLTLLSRLDRFDSDTTNTVDMLRLHREHISSNIEKLVQLSLEIEDLNAITSKLKQLKGELSQVDADIEKETQRLKSIDVGCLSDCDLTTKAGRIEAQLIIKSAVKEVVLNTAKRRCKVTFHNGRAITLPITENPSDNVTEAIQSLSEVTERGLIDVDVVEI

SEQ ID NO: 7012 - protein, 535 aa, synthetic construct
MEKKTVKKVVKIEPVSTISNMEKPLVKRVCAYCRVSTESAEQISSFESQVEYYERLIQEKDSWVCVGIYADQARSGTKTSGRDQFRQMMQDCRLGKIDLILTKSVTRFARNTVDSIKAIRELKRLGIEIYFEKERISTLSEKSEQLLTILSSIAQGEAESISTNSRWSVQYRFQNGTFIISSPAYGYINDENGELIIQPEEAKIVRRIFDQYLGGKGSYAIAKELRKAGIPTIRGSKGWQDGVVKEILQNPVYAGDLLFQKTYTTEGVPFTKKHNRGEMPQVMITDNHEPIISREEEQAVRELYAYRRQKQCVENVEVYQNRYAFSSRIICGECGSIFRRQKIYIGKPYEKVQWCCHQHIEDISKCSQKSIREDCIQHTFITLWNKLASNYEDILYPLLAILKAVPDDPEQVQELLELENKIRELKQQSHMLQKVLTGGDIGSVVFIEKRGLIDTELEKAYRRQQLLKEQKLFDEQISQTEYLMAVFRNRPAILDDYDEELFRMMIETVTAYPGQRLVFKLKNGLELEETYGKEL

SEQ ID NO: 7013 - protein, 547 aa, synthetic construct
MQAVKKNISIIPATRGYDRTIRPQMKALRVAAYCRVSTLQEQQETSYEAQVNYYTEKIENNPSWKLAGIYADDGKSATSTKNRSNFQAMIEDCMAGKIDMVITKSISRFARNTVDSLMNIRKLKEKNIAVFFEKEGINTLEGSGELLVTILSSQAQEESRNISENCHWGIVRKFESGKVIVNHSKFLGYTKNKDGNLVIIPEEADLVRRIFRLFLEGNSSYKIKRILEADGIPTVTGKTVWQATVIDKMLSNEKYMGDALMQKTYTVDFLTKKKVINKSIVPQYYIEDNHEAIIPKELYHRVQEEKARRGAIYRPASKKVDAPSIKGKYSAKYVLSDIMVCAECGQPYRRQVWSKYGMKKAVWRCDNRLKHGSKRCKHSPTLKEDSLHEAIMTAINNVVEDQGEFVQAFRENVIRIIGSYSAQAEPTEYDEQIEQLRQGMMKLIEESAKTECADDTFDKEYRIIADEIKELRKKKAKVLQERHLAESYEQRLQEMSSYTKKINYLKREFDDDLVRRLLQTIRVISECKIEIQFQSGIVIRQDVLCDD

SEQ ID NO: 7014 - protein, 507 aa, synthetic construct
MKRVISYIRFSSEKQAKGDSLRRQSKMVTDWLKAHPEYYLDQDLSFRDLGVSGFTGKHLKGGLGDFLTAIEKGLVKAGDTLLIESLDRLSRQDVDQASELLRNILRSGVDVVTLSDGEHYTSESLKDPLALIKSILIMQRAHEESLRKSERIQAAWNRKKELISEGIKVSKRCPAWLRLNDDRKSFSVIPEKVETVKRCFQLRLEGKSIWEIVRTLNDEGHQSMSQYKPGKFGQTSVQDLLKNRSVIGYFTPKGCEEISGYYPAIIDETTFYKVQQLSHYRYGRKPVSDKPLSVNLFKGVIRCSECGHALIITGFSDTRSGIYRCPLRNENRCSAKGLSRKQTDGTLLALLSRLDRFDSDTTNTIDTLKLHREHISSNIEKLVQLSLEIEDLNAITNKLKQLKNELSQVDADIEKETQRLKSIDVGCLSDCDLSTKAGRIEAQLIIRSAVKEVVLNTAKRRCKVTFHNSKSITLSITENPSEDVTEAIQSLSEVTERGLIDVDEVII

SEQ ID NO: 7015 - protein, 520 aa, synthetic construct
MMYNIARYDALYGRQSVDKKDSISVESQLDFCKYETHGQPYQTYTDKGFSGKNTNRPDFERMMRDIRAGRIKRVIVYKLDRISRSILDFANMMEVFQEYDVEFVSSTEKFDTSTPIGRAMLNICIVFAQLERETIQKRVTDAYYSRNKKGFFMGGRVPYGFKLEPIVIDGIRTSFYLPIEEEMQQIELIYQLYAEGVKENGEPYSVSDIRNYLLEHNIPQLRGGYWTVSSISSILANPSYAIADLSLYEFFHSQGANITNPMELWEGGNGCYLYQGTVSKDKSRNSFKDKEVVLAPHVGRVPSYIWIKCRLRCMNSRQMATTNKGKSSWLVGKVKCGNCGKGLQISPSRVSKKTGKSIRYMNCSHKYVTKGLGCSGTGSRIYVDELENYVLKQIKGKLAEFEGLNEQNATQTNPRLNENKIRLAQIDKEINDLVEKVSGANSVLMRYINEKIEQLDAERRALSEENLSMTVNQSSDTLNMIFNHVSTWEETSFEDKQKVLDAFVKVIKIANGNIEMTWNI

SEQ ID NO: 7016 - protein, 556 aa, synthetic construct
MNREGKKCVLYPRVSTEMQVDGYSLEGQKNSLKRFADREEMEIVGVYEDAGKSGKSIEGRPAFKKMLSDIKNGLEIDYILVYKLSRFGRNAADILNSLEFVQSYGINLICIEEGIDSSQTSGKLLISVLSAVAEIERENIIEQTMNGRREKARQGGWNGGFAPYGYYLENNQLLIEETEAKAIRIIFEKFGNSDIGLGGVAKYLNLQGIKKIPRQNGKLETWSSHFIRQILDNPVYCGKIAYGRRTREKVKGTKNEYKQVHTDDYILEDGQHEGIVSAELWEKVRAKRIATGIKQPSKVGKDRSHLLTGVLKCPMCGSSMYTNKHAWTNKDGTYKEVYYYICGRNKQERGHHCDYKASLRKTDIEPLVIEAVKELVSDKYFAREIKSRIGIQTDTGNVDKEIANYESKLKEVDLNKARLEREIDNLPADARYRERKIHDMTLRLDGLYDTIVELEERIEDAKLRRSSIEMEAITLENVYKIMKNFGKLYAIMSDEEKKSVISYLIKEIQIYPNGESEMPLKSIEFNFPIYRDGKEVRKVLWERGNTVETVAKIIKQ

SEQ ID NO: 7017 - protein, 548 aa, synthetic construct
MSKRVAIYCRVSTVEQAEEGYSIDSQYQNIKEYCEREGHEIYKLYEDRGISGKNISNRPGIKQLLEDAKNNKFDLVLSWKLNRLSRKLLDILNIVEFLDKHNVAFRSLTESFETETPSGKLQLNIMGAIGEFERETIADNVRMSLIAKSKEGLWCGGVVLGYDTVEIPNEGKKRKNTKLQINEKEASTVRRIFELYSQGYGYKAVVNRINKEGYKTKRNNEFAVATVKEILKNPIYIGKIRYNVRQDWSKKRRNNINQNPIISDGQHEPIIDMETWNKVQVILKERSKKHNKIYDSEFPLTGILKCPVCGAGMTISRSTSKRKDGTKKVLEYYSCGNWKNKGTAVCRSNSIRVEVADEYVLNKIMTVINNKSILKRVIDNINRNKSSKLQPTIDELGRITNEINKLNSKKNKNIELFEDGILDKDELSTRVKSINDDIDKLKYREQELKQEVQLAEGEPIPFEIVKDIMDKFKEVFFNMSTSQQRKQLIHLLVSQITMNEKREVDSIEIQINDDVITYLMKDELPKLKGNSSFLHLLGMNSINIKIII

SEQ ID NO: 7018 - protein, 532 aa, synthetic construct
MKAAIYSRKSRFTGKGDSIENQIQLCIDYAKSIGVKDFLIYEDEGFSGSNIDRPQFKKMMQDAKDKKFSYLVCYRLDRISRNVSDFSTLIEKLNELNISFISIKEQFDTSTPMGRAMMFISSVFAQLERETIAERIKDNMYELARSGRWLGGNTPHGFNSEKITFLDENLKERSMYKLQVNDEQMEIVKLIYNKYLELRSLSKLYKYVYNNGIRGPRGGKFDPSSLSRILRNPAYVKANDEILDYLKNSGMDVVGTPDRKCGILTYAKNTSNSIAAIAKHHGVIEPEIWLEVQNQLDKNRDKTPRISTGKTALLSGLIKCGKCGSNMRITYKGKKTDKDLKYYYICGTKKTLGSDSCNCKNLNGPLVESLVIDKIKNCKEESIISAFNSNNIKADNVFNAFKSETNLLKNQILDKERLIKNLVIELAKNTGSTASDYIVSQIESLNNEISILKDKINTLESSNINISSDSINIDIIVSNLKRFNDEVDNASLDNKRLLLSTIINSIVWDSSLGNLNIVYMGAEVDNSVSLSN

SEQ ID NO: 7019 - protein, 549 aa, synthetic construct
MNREGKKCVLYPRVSTEMQVDGYSLEGQKNSLKRFADREEMEIVGVYEDAGKSGKSIEGRPAFKKMLSDIKNGLEIDYILVYKLSRFGRNAADILNSLEFVQSYGINLICIEEGIDSSQTSGKLLISVLSAVAEIERENIIEQTMNGRREKARQGGWNGGFAPYGYYLENNQLLIEETEAKAIRIIFEKFGNSDIGLGGVAKYLNLQGIKKIPRQNGKLETWSSHFIRQILDNPVYCGKIAYGRRTREKVKGTKNEYKQVHTDDYILEDGQHEGIVSAELWEKVRAKRIATGIKQPSKVGKDRSHLLTGVLKCPMCGSSMYTNKHAWTNKDGTYKEVYYYICGRNKQERGHHCDYKASLRKTDIEPLVIEAVKELVSDKYFAREIKSRIGIQTDTGNVDKEIANYESKLKEVDLNKARLEREIDNLPADARYRERKIHDMTLRLDGLYDTIVELEERIEDAKLRRSSIEMEAITLENVYKIMKNFGKLYAIMSDEEKKSVISYLIKEIQIYPNGESEMPLKSIEFNFPIYRDGKEVRKVLWERGNTVET

SEQ ID NO: 7020 - protein, 550 aa, synthetic construct
MSRKKQVNQKITALYCRISLEDGGDNESMSISNQKLMLRDFAEKNGMFQYEYYVDDGYTGRNFNRPSFQRMIADIEAGKIGCVITKDLSRLGRNYIEAGSYIEIFFPKHNVRYIAITDGVDSLTRQEMDITPFKNILNDMYSRDISKKVLAGRMTRSRQGKFCGGQPPLGLMRDPEDKGHLIRDPETAPVIRKIYDMALDGWGCMRIAKQLMDDKVPITRVKSNTECDVNYYSWGSARISHILRNPFYKGAHLVCRTHQKGIRSNTYDIIPREDWEIIEDCHEAIISPEEWEQVQEIIDRRPTIMKGNSCPFYNLFHGIIYCATCGKSMQVRYENVGRTGKNRFTGEQREPIDKAYYICQTYNRLGKNACTSHKIEARDLYNLVLKDIQELAKTALKDADAFYQRLSSRMERRYLLDASQTQKECQRLESRNREIDEMFLSLYTDKAKGILTEQRFMKLTATLEQEQEANQKRLQDLLLMMRHSDEQENEVRTFIKEIRRYAAIEELDEAVLNRLISKILVGEVKKIDGQKVQEVRIVYNFVGEIPEITA

SEQ ID NO: 7021 - protein, 506 aa, synthetic construct
MRSVITYLRYSSAIQGAEGADSTRRQNDLFKQWLKKNSDAQVVASFSDEGLSGFKGKHLTGQFGDMLARIESGEFPEGTILLVESIDRIGRLEHLETEALMNRILGNGLEIHTLQDGLIYTKDALADDLGISIIQRVKAYIAHQESKQKSFRVSQKWEQRAKLALAGEQRLTKMVPGWIDPDTFKLNEHAETVRLIFKLLLSGESLHNIARHLQANNISSFSRRKDANGFSVHSVRTILRSETTIGTLPASQRNDRPAIPNYYEPAIDASTFNKAQEILDKNRKGRTPASDNPLTINIFKGLFRCQCGASVHPTGTKNKYAGVYRCNSHLDGRCGVPPLKRKPFDKWMIDNFLGMIDVGNDGEAEKEIASLQHEVETVTARIKKATALLLEMDDIDELKIQLKELNQKRTELQTTIDSMRRKASLTDKELPQLKDIDLTTKAGRVECQLILSKHLESLTLGRGQVTVKLSNGTEIIVPTDPLPLTDGAAIFEIAEKNLLNIDTFQL

SEQ ID NO: 7022 - protein, 532 aa, synthetic construct
MKAAIYSRKSRFTGKGDSIENQIQLCIDYAKSIGVKDFLIYEDEGFSGSNIDRPQFKKMMQDAKDKKFSYLVCYRLDRISRNVSDFSTLIEKLNELNISFISIKEQFDTSTPMGRAMMFISSVFAQLERETIAERIKDNMYELARSGRWLGGNTPHGFNSEKITFLDENLKERSMYKLQVNDEQMEIVKLIYNKYLELRSLSKLYKYVYNNGIRGPRGGKFDPSSLSRILRNPAYVKANDEILDYLKNSGMDVVGTPDRKCGILTYAKNTSNSIAAIAKHHGVIEPEIWLEVQNQLDKNRDKTPRISTGKTALLSGLIKCGKCGSNMRITYKGKKTDKDLKYYYICGTKKTLGSDSCNCKNLNGPLVESLVIDKIKNCKEESIISAFNSNNIKTDNVFNIFKSETNLLKNQILDKERLIKNLVIELAKNTGSTASDYIVSQIESLNNEISILKDKINTLESSNINISSDSINIDIIVSNLKRFNDEVDNASLDNKRLLLSTIINSIVWDSSLGNLNIVYMGAEVDNSVSLSN

SEQ ID NO: 7023 - protein, 460 aa, synthetic construct
MDKIKRVALYIRVSTEEQVLHGDSIRTQTEALEQYAKDNNFIIVDKYIDEGYSATNLKRPSLQRMLEDIKENKIDLILLTKIDRFSRGVKNFYKIIEILEKHKCDWKTILEDYDSGTAAGRLHINIMLSVAENEASQTSERIKFVFNNKIRRGEVISGSTPFGYKIVDKHLVIDEEKAEIVRECFISYEKLTSMIKVLQHINNSFNANFSYNFVYKLLRDNIYTGIYIRNDFVVENFCDAIISPEQFETVQKLLSKNAKVYNNKFLNNLGMQYIFSGMVICKCGRKMSGTYSLSTDKRIYKYYRCHISQTTKKCDNTKRLSEKKLEIFLLKNVRKQLEEIAFRHESNNTKPKSKNNNKQLQDKIKKQINKLQDLYFDDLIDKENYKLKYQKLNTQLIELEKNKSEEKNSIINLQAIKSFLEINFEEIYADLNDQEKRTLWTSIIDTIVIDENKNPTIIFL

SEQ ID NO: 7024 - protein, 508 aa, synthetic construct
MKKAIAYMRFSSPGQMSGDSLNRQRRLIAEWLKVNSDYYLDTITYEDLGLSAFKGKHAQSGAFSEFLDAIEHGYILPGTTLLVESLDRLSREKVGEAIERLKLILNHGIDVITLCDNTVYNIDSLNEPYSLIKAILIAQRANEESEIKSSRVKLSWKKKRQDALESGTIMTASCPRWLSLDDKRTAFVPDPDRVKTIELIFKLRMERRSLNAIAKYLNDHAVKNFSGKESAWGPSVIEKLLANKALIGICVPSYRARGKGISEIAGYYPRVISDDLFYAVQEIRLAPFGISNSSKNPMLINLLRTVMKCEACGNTMIVHAVSRSLHGYYVCPMRRLHRCDRPSIKRDLVDYNIINELLFNCSKIQPVENKKDANETLELKIIELQMKINNLIAALSVAPEVTAIAEKIRVLDKELRRASVSLKTLKSKAVSSLGDFHAIDLTSKNGRELCRTLAYKTFEKIIINTDNKTCDIYFMNGIVFKHYPLMKTISAQQAISTLKYMVDGEVYF

SEQ ID NO: 7025 - protein, 507 aa, synthetic construct
MKRVISYIRFSSEKQAKGDSLRRQSKMVTDWLKAHPEYYLDQDLSFRDLGVSGFTGKHLKGGLGDFLTAIEKGLVKAGDTLLIESLDRLSRQDIDIASELLRNILRSGVDVVTLSDGEHYTRESLRDPLALIKSILIMQRAHEESLRKAERIQAAWDAKKEAAKAGIKVSKRCPAWLKLNDDRKSFSVIPEKVETVKRCFQLRLEGKSIWEIVRTLNDEGHQSMSQYKPGSFGQSSVQDLLKNRSVIGYFTPKGCEEIAGYYPAIIDETTFYKVQQLSYARYGRKPASDKPLSVNLFKGVIRCSECGHALIITGFSDTRSGIYRCPLRNENRCSAKGLSRKQTDGTLLALLSRLDRFDSDTTNTIDTLKLHREHISSNIEKLVQLSLEIEDLSAITSKLKQLKGELSQVDADIEKETQRLKSIDVGCLSDCDLTTKAGRIEAQLIIKSAVKEVVLNTAKRRCKVTFHNGKVIDLSITENPSDNVTEAIQSLSEVTERGLIDVDEVII

SEQ ID NO: 7026 - protein, 1241 aa, synthetic construct
MSKEKIKVYLYTRVSTSIQIDGYSLEAQKSRMKAFALYNDYEIVGEYEDAGKSGKSIEGRVQFTRMMEDIKSGKDGVSFVLVFKLSRFARNAADVLSTLQIMQDFGVNLICVEDGIDSSKDAGKLMISVLSAVAEIERENIRVQTMEGRIQKAKEGKWNGGFAPYGYQLIDGKLIINEEEAIAIRTIFDQYVNTSIGANGLSKYLENHGIRKIPRQNGKNPLFDAGLIRKILKNPVYNGKIAFGRRTLEKVHGTRNEYRQVEQDDYLVAEGIHEAIIPDELWQAAQVKLKAQAKKYEHVNKGKNMRTHLLSGIVKCPICGAGMFGNKSIKYKKDGTKYKDFYYYGCKHRLMNRGHKCTYNKQIREELLDDAVAEVIIKLVSNPKFASMIQEKINMKVDTSAIENEIDNYQNELRKSHSTKYKLIEEIDNLDVEDKHYKRRKNDLDDRLYRMYDKIEELESQLIEAKAKKETIEVEKLTGDNIYKVLIYFDKLYKVMNDVERRQLIEALISEIQIYEEKQPNGQWLKSITFKLPIIDEDLNISLENDEQVDGVSVPGVDPNTGFPLPDIGGGIGVEVTFDVVVESIPNPNPTNNIATIDYSYTPVEGGIPNDFSVDSNPVPVEVISADVEVTKLSEPTIVNPGEELIYTIKVVNNGPFPSENVVLTDDVPASIINPEYSLDGGVTFQPWTGSLNIGTLEVGETRVIIIRGIVNPSTVGIITNTAVVSSTTADPNLNNNTSTIETEVNLLADILVMKTAEPNSAVPGTLLRYTIQVENLGPANAENVILNDDIPASIINPEYSLDGGASFQPWNGSLNIGTLNSGISLTVLIQGTVSLNSSEYIVNTATVSSTTPDPDLSNNISTIITPVNPQAGISIIKVADEDVAVPGEEFVYTIEIFNEGPSNATNVVLTDDIPDVILNPEYSLDGGATFQPWNGSLNIGTVAPGQLIRIIIKGLVSSTATGDITNTAEVSADVPEPVTDSSTVTTPIVPSADIEVIKTSNMDTAVPGETFSYTITVINLGPSAAQSIVLTDDIPDVILNPEYSLDGGVTFQPWNGNLSIGTLDAGEIRSIIIRGTVSQTAVGTIINTATISSPTPDPNPDNNTSTDETDISPLADISVIKGNEPVAIPGGRFIYGIEIANAGPSFAENVTLTDNIPASILNPEYSIDNGVTFQPWNGSLNIGTLDAGEIRNIIIRGTVSQTAIGTIINTATVSSTTPDPNLNNNTSTSEAEVSSSADIS

SEQ ID NO: 7027 - protein, 582 aa, synthetic construct
MNDVQVIKANRNENRIRGRKVEILRVAAYCRVSTDSEDQLNSYKSQVMYYTDLIKKKPEWSLADIYADEAITGTQVTKREDFQRMINDCMNGDIDMVITKSISRFARNTLDTLKYVRMLKEKGIAVFFEDENINTLTMDGELLLVVLSSVAQQEVENISSNVKKGLKMKMQRGELVGFQGCLGYDYHKDTKSISVNEKEAEIVRYIFNRYIEGAGCTVIANELENLGYKTKYGSSRWVQSTVIGIIKNEKYKGDLLLGKTFTVDPISKRRLENFGEEDKFYIRDHHEAIISEEIFEEAQKILAKRNVNRGVHQEGQKRNKFSRKYAFSCMIKCGFCGGTLSRRNWHSSSAYTKTIWHCVTATKHGKKNCPHCKGIPEEVIENAFVKSYQLLCSDQHEVVSEFLQKVEDILKDDASLKRLPKIEKEMTDLQRRKEKLLDLRLDNNIDRDIYDKKNQELSEQLKKLQAEQLQLVELSKNQESTKTRIREFRKNLNSGELLESFDRVVFESVVERIIIGGYNDEGVEDPLKITFVYKTGIHSNLNAKDFKPKRKNAAAVHTDAELCSYASVEDNKLCLHSSSDTL

SEQ ID NO: 7028 - protein, 532 aa, synthetic construct
MGIFMYTSEIYKSKQQLITPSSTRPLAFSYIRFSSKKQELGNSLQRQMEAAERWCAYNNVELSPITFDDLGVSAFKEGTRPALADMLEYIKTGIIPKGSFILLENSDRLSRRGFKHAVDIVHEIVNNDVYLVVLGNNPVVYDKHNIVDLSSMLSLLLDSDRGRQESARKSVLIKAAKKHLRSTREAKGKLPWWLSAVDGKAELNEFSAVIREMVDMKLQGVSAQKIATHFNNKGVLNAQGTAWKAVSINASFKNKLLYGTKVYYEVVGTNGRDCAPVEEVPNWAPAICSKREFDAIQPKKRVKGELTRTSAFTGLLRCPNCHGAMQQRKQYHKGKEYTYRRCLNYGEGRCAVKDNFKDVDVVAKAALQHLKVINTSSSNDELNQAIEQLNAAKNKLETQEASLAYIKIPEILGRTYDDIYKTQQEIAHLEASVQLLQTTSHEVNTISLFDLPNKEVNVELKKVIKAIYFFKLAPLTDKLIIQYVNDVKSTFVITHKRNGRSEATWKMQLVADSTKWDVADTREAWERDDLNN

SEQ ID NO: 7029 - protein, 547 aa, synthetic construct
MSKKVAIYCRVSTVEQAEEGYSIDEQRRRNIEYCEKEGHEVFKVYEDRGISGKNISGRPGLKDLLQDANAGKFDLVIVWKLNRISRKLIDILNIVDTLDKNKIAFRSLTESFETETPAGKLQLNIMGAIGEFERGTIAENVKMGMIARAREGKWNGGKVLGYDIVEIPSEGKKRKETKLVINEKEAMTVRRIFDLYSEGHGYKATVSRVNAEGHRSKRGNAFATATIKEILKNPVYIGKIRYNLRQDWNEKRRRNINPDPILVDGEHDAIIDTQTWEKVQIILKDRSKTHNRVYDSELILSGLLKCPVCGASMTVSRSTRKRKDGTKAVNEYYACGNWKNKGTAVCNSNSVRAEVADEVVINKLIETVNNELLLKKVINNINKNKSSKLKPKLDEMNLVNKEIDKLNGKKNSSIELFEDGILTKNELAERVKKLNEEIDTLKFRVDELRQEVMLAEGEPVPFELVSQVMNKFGQVFKESSTRQQRKQLLNLLVSKVTIDKSREIDTIELQINEDVIRYLVKEGSSEDEDPSFFHVHMINCTCLKFVI

SEQ ID NO: 7030 - protein, 654 aa, synthetic construct
MAGIKEEKKIYSVGIYCRLSKDDGTENESASIATQKSILTDYVKKQGWHLAKTYVDDGYSGTNFQRPSFQNMIKDIENGLINCVITKDLSRLGRNYLDCGLYLEVFFPENNVRYIAVNDGVDTLNKSAMDITPFRNILNEMYSADVSVKIKSAYRARFQQGKFMGTYAPYGYIKDPADHNHLLIDDKVAHVVREIFDLALAGNGLAKIRKHINSQHILRPAAYAAEQGAAGYERYFEGNEENRYIWSENSVRGILRSPIYAGNLAGYKRIAANMKSKKRPSKLPEEWEVIPDTHEGIVTQEEFDIVQQLMTSRRREKNKGGFENIFSGVIKCADCGYALRAMSANRRKRPDIIDCIQYTCNNYGRYGNVMCTAHAIEARDLFNAVLADINRFADMAVNDERAVRAIEKRLTETDQSKAKAMEKERKKLNKRLAELDRLFSSLYEDKVMERITERNFEMMSGKYQKEQLEIEARLKEVTETLNESYEKSQGIRDFLSLIRNYQGLKELDATVVNALIDKILVPEREKSADGTVKQEIKIYYKFIGFVGELHITPTKRWTALPAKHCTVCGIEYVPGSGISKYCPACAKKIQREKSNESKRRSREQKRMACIELSAKNDRLIWCRKRDTYLSLHRERGYDFETIRLPKDDTVSVGL

SEQ ID NO: 7031 - protein, 562 aa, synthetic construct
MAVNTEQNKIKNVVIYCRTSSNLQADNFSIDGQTSVIKEYCKRNKFTIVGTYIDECKSGTTTKNRLEYERMINDIKNNSNEIDAIIIYKLSRISRNMADMVNIVSLLEGYNVNLISVEDNIDTSSPMGKTIFYLIGAFAEMDRENIVSNCKMGMKERATKGLWNGGRSIGYKSNSEKQLEIIDSEAEIIRLIFDLYANKNWGYKKIACHLNVRGYKTIKGSTWSIQSIKQIIDNPIYIGLIRWGQYVDWAKKRRKGKKNDYQLIKGEHLPIIDIKTWEKAQAIRQVNKDKFTKIYEGDFILTGLLKCPQCGASMISHRVKKQNKVNEFYRYYQCSNFFNKGTSICKSNLINADIAEKYVLDRLNELVQSKEIINCILKKMKNNNETEIAPIKKKIALLEKELLKIELKKKENFQLQFEDKISFDILNSQLLFLKNKEDTIIPQLNILKNDLNSLSYSDAFDVTTILTVLSNFNDIFYKSTINQKKTLLNSIIESISLIDSPNIKERNINKIKLYFEPVDIQAQNLTKNFATTCDTVLHYLSYKPYKSVLTISISSSDEEKSS

SEQ ID NO: 7032 - protein, 558 aa, synthetic construct
MNREGKKCVLYPRVSTEMQVDGYSLEGQKNSLKRFADREEMEIVGIYEDAGKSGKSIEGRPAFKKMLSDIKYGLEIDYILVYKLSRFGRNAADILNSLEFVQSYGINLICIEEGIDSSQTSGKLLISVLSAVAEIERENIIEQTMNGRREKARQGGWNGGFAPYGYYLKDNKLLIQETEAEAIRIIYDKFGNSDIGLGGIAKYLNLQGIKKIPRQNGKLETWSSHFIRLILDNPVYCGKIAYGRRTREKVKGTKNEYKQVHTDDYILEDGQHEAIISEELWQKVHAKRLATGVKQPSKIGKDRAHLLTGLLKCPICGSSMYTNKHAWTNKDGTYKEVYYYICGRNKQERGHHCDYKASLRKTEIEPLVIEAVKELVSDKYFAQEIEKRIGAQTDTSMIDKELANYERKLKEVDLNKARLEREIDNLPIDARYRERKLHDMILRLDGLYDTIVELEERIEDAKLRRNSIEMEAITLDNIYKIMLNFGKLYDIISDEEKKSIITYLIKEVQIYPHGESEMPLKSIEFNFPIYRDGKEVRKILWESGNTVECVVLMSRVEK

SEQ ID NO: 7033 - protein, 706 aa, synthetic construct
MSRTSKITALYERLSRDDDLNGESNSITNQKQYLEDYARRNGFTNIRHFTDDGFSGVNFNRPSFQELIKEVEAGNVATIIVKDMSRLGRNYLQVGFYTEVLFPQKDVRFLAINNSIDSNNASDNDFAPFLNIMNEWYAKDTSNKIKAVFDARMKDGKRCSGSIPYGYNRLATDKQTLVVDPVASEVVKRIFLLANEGKSPRAIAELLTEEKVLIPAAHAREYHPEQYNGIKFTDPYLWGMSTIRGILSRQEYLGHTVLRKSVSTNFKLHKRKNTDEDEQYVFYNTHEPIISQELWDSVQKRKKRANRTAAKGTHSNRLSGYLYCADCGRRMTLQTHYSKKDRSVQYSYRCGGYASKVNSCSAHSISADNVEALILSAVKRLSRFVLNDEEAFAKELQALWNEKQTEKPKQNKSELHRFQKRYDELSKLIRGLYENLVSGLLPERQYKQLMKQYDDEQAELETKIEAMQQELTEEKANTVDIKHFISLIRKCKEPTEISDLMFAELIDKIVVYEAEGVGKARTQKVDIYFNYVGQVDIAYTEEELAEIKAQEEQIEMERLAKQREREKAYREKRKAKKLAENGGEIIKTKVCPHCQKEFVPTSNRQIFCSKDCCYQARQDQKKADREAEKGNHYYRQRVCAMCGSTYWPTHSQQKLCSEECQKQNHNEKSLEFYHKKQKEKSECKDLLQTKERVSSTNSSEIITIPA

SEQ ID NO: 7034 - protein, 403 aa, synthetic construct
MNRSGKKCVLYPRVSTEMQVDGFSLDGQKNSLKRFADREEMEIVNIYEDAGKSGKSIEGRPAFMQMLSDIENGLGIDYVLVYKLSRFGRNATDILNSLEHLQSFGVNLICIEEGIDSSQTSGKLLISVLSAVAEIERENIIEQTMNGRKEKARQGGWNGGFAPYGYFLKDNQLFIQEDEAEAVRIIFDKYVNGNMGFYKIANYLNLQGIQKVKRDNGTLTQWSTHFVRMIIDNPMYMGKIAFGRRTREKVKGTKNEYRQVHQDDYILADGQHDGIISEELWTQAHERREITGVKASSKIGRDRAHLLSGILKCPKCGGPMYTNKHAWTNKDGTYKEIYYYVCRKARTTRKKSCDYKAMLKKTDIEPLVVEAIRDLIKNEDFAAEIKSKIGKQIDTSTLDRERT

SEQ ID NO: 7035 - protein, 616 aa, synthetic construct
MNDYNKITALYSRLSVGDEDRDGGESNSIQNQKIFLENYARGQRLTNIRHYIDDDESGRFFDRSAYSRMIEDVENGKVGVCIMKDLTRWGRDYLQVGNAMEIFRRNNVRFIAVNNGIDSEKPDTLEFAPFINIMSEWYAKDISKKVKTGIKTKGMSGKPIATEAPYGYMKDPGNKDFWIIDEEAAEVVRLIFRLFIGGKNRNQIAVYLTQEQIPTPTFYMKDRGRGTCKNKALNEDNRYKWNKATLTHILTRQEYCGDVVNFKTTKHFRDKRNHYVDRSQWQITENVHEPIIDRADFETAQRILENAPVRRPNGDGEIHPLSGLLFCKDCGAKMHIRIDYRNGGKRHVAYCSEYHKGKAKKPKCHSPHIIDADLLMQTVAEVLKKIEDYSISNRAEFEALVKKNFAMQQTDQTKKQQKRIPQITTRLAQIDKVLNKLYEDNALGTIPQDRYEQMSQKYSEEYYTLKTELAGLQEQLSAYENAGGRAQKFLKLTERHAAFTDLTPAILNEFISRIEVHERDQKRARYAIQHISIYFNYIGRFENEVTQLAEPTEQEIRQMREEIEEAKKEKSRAYHRQYSREYRARNLEKQREYDRIKAREYRARRKAQTAAAQPAQ

SEQ ID NO: 7036 - protein, 526 aa, synthetic construct
MIEEKAVVYARFSSDNQRDESIDAQLRSIEEYADKNNIKIVNKFIDRAKSATSDKRPAFQEMVKYCEADNTGISMVIVHKLDRFSRDKYDSAMYKQKLKVKGIRVVSVLENLDNSPESLILESVIEGMAQYYSANLAREVAKGQRENGLRAMHNGGDAPLGYDVTNDKRYAINKEEAQAVKIIFDMYINGYSYSNIIDKLNDLGYKTKRGNKFGKNSLHGILSNEKYTGVYVFNKTQRKGVNGKRNGHKQKSEDEIIKVEGGMPQIIDKDVFIKAQEMMQKRKKSPGAHKATTLYLLTGLIRCGECGHAMQGNKRKDKYGNDYISYRCGCRKQKRDCKNKEIKRDYLEEFVLTELEKHILNDEAIPVLSKALNERLKTKSNDNHEMLNNLRNKLEKVNKEIENILTAIMSGIVNSMLKDKLDELEQVKLNLDLKINELSIESNGVESVNITEDQIRSMFGKFKEFVLTRNLPECKKFISDYVKEVIVYKDHIEVIFNVVFSFVDNEIAHDLHITTSREKIIYCILK

SEQ ID NO: 7037 - protein, 536 aa, synthetic construct
MLRQTNQQPITALYPRLSHEDELQGESNSISNQKRILETYAKQNGFSNLRWYTDDGYSGANFQRPGFQAMLADIEAGKVGTVIVKDMSRLGRNYLQVGMYTEMIFPQKGVRFIAINDGVDSAQGDNDFAPLRNIFNEWLVRDTSKKIKAVKRSKGMSGKPITSKPVYGYLMDEDENFIIDEEAAPVVKQIYNLCLAGNGPTKIARMLTEQQIPTPGTLEYRRTGSTRRYHPGYECKWATNTVVHILENREYTGCLVNFKTEKLSYKVKHSVENPEEKQAIFENHHEPIIDTQTWERVQELRKQRKRPNRYDEVGLFSGILFCADCGSVMYQQRYQTDKRKQDCYICGNYKKRTHDCTAHFIRTDLLTAGVLSNLRKVTSYAAKHEARFMKLLIEQNEDGGKRRNAAKKKELEATEKRIAELSAIFKRLYEDSVTGRISDERFTELSADYEAEQRELKERAAAIQAELSKAQEATVNAEKFMNVVRRHTSFEELTPTLLREFVEKIVVHECSYDENKTRRQDIEIYYSFVGKVDLPE

SEQ ID NO: 7038 - protein, 565 aa, synthetic construct
MSKEKIKVYLYTRVSTSIQIDGYSLEAQKSRMKAFALYNDYEIVGEYEDAGKSGKSIEGRVQFTRMMEDIKSGKDGVSFVLVFKLSRFARNAADVLSTLQIMQDFGVNLICVEDGIDSSKDAGKLMISVLSAVAEIERENIRVQTMEGRIQKAKEGKWNGGFAPYGYQLIDGKLIINEEEAIAIRTIFDQYVNTSIGANGLSKYLENHGIRKIPRQNGKNPLFDAGLIRKILKNPVYNGKIAFGRRTLEKVHGTRNEYRQVEQDDYLVAEGIHEAIIPDELWQAAQVKLKAQAKKYEHVNKGKNMRTHLLSGIVKCPICGAGMFGNKSIKYKKDGTKYKDFYYYGCKHRLMNRGHKCTYNKQIREELLDDAVAEVIIKLVSNPKFASMIQEKINMKVDTSAIENEIDNYQNELRKSHSTKYKLIEEIDNLDVEDKHYKRRKNDLDDRLYRMYDKIEELESQLIEAKAKKETIEVEKLTGDNIYKVLIYFDKLYKVMNDVERRQLIEALISEIQIYEEKQPNGQWLKSITFKLPIIDEDLNISLENDEQVDVVCVMLIRISYLVKF

SEQ ID NO: 7039 - protein, 986 aa, synthetic construct
MIDKILKDIKGLCKVQDKVKFLKQNIPYLAFFYVGNIFSHHVRVYVGGDIIDKIFQGILEINTMSFLPSIHPTDILMGVVVAVLIKIIVYTKGKNAKKFRQGKEYGSARWGTKKDIEPYMDEKFQNNILLTQTERLTMNGRPANPKYARNKNVLVIGGSGSGKTRFYVKPNLMQMHSSYCVTDPKGTIVLECGKMLEDNGYEIKILNTINFKKSMKYNPFAYLRSEKDILKLVQTIIANTKGEGEKSGEDFWVKAEKLYYTALIGYIFYEAPREEKNFATLLDMIDASEVREDNETYMNPIDRLFEALEKKEPTHFAVKQYKKYKLAAGVVCSKRLLNQAVEKSLRTHNLKPKKGAQVMRKNEKITALYERLSRDDFGKDDDQQRESNSISNQKAMLEEFAARQGFTNIVHFTDDGISGTCFDRPGFLAMMKEVEAGNVEYLCIKDMSRMGRDYLKVGQIMEILRQRGVRLIAINDGVDSARGDDDFTPFRNIMNEYYARDTSRKIRSTFQSKGKSGKHLTGTVIYGYLWNEARDQWLVDPEAAEVVKRIFSMTIDGYGPYQIASKLKSEKVLIPSAYLAQHGEGVNKNKTFKDVYGWGSSTICNILEKREYLGHTINFKTRKHFKDKKSHYVPEDEWTIFENTHEAIIDQQTFDLVQKIRSKVRRYPDGWGEVAPLTGLLYCADCGGKMYVHRTNNGKRISQYTCSQYSKVPVGKLCKTQHRINEDVVLSLVSEMLKAIAEYAKHDRAEFVRVVQEAQSSQQTTEVRKQRTRLATAKQRVSELEVLLCKIYEDNILGKLSDSRYATLDAQYEKEQTELTAEISALEKAVKSYEKHEKDADRFIALIDKYENFDKLTIAMLNEFIEKILVHERDRKGSIQTTQEVEIYFNFVGRFVPPAFGEVELIPEELEEIRKREERKDRLHQNYLKRKASGAQKRYEDKIKEKKKAEIEAKKAAIRAEDIAKGVFVPVGSLPQREPQKGAQIA

SEQ ID NO: 7040 - protein, 599 aa, synthetic construct
MRKDGSTSHMVPADIPADRLDVVRVFLYARQSSARADGSEVSTEAQLAAGRALAEARSQQGVPWVVVGEFVDVGRSGWDPNVVRSDFEDMMRGVRDGEADVVIVNELSRLTRKGAHDALEIDKEFKKHAVRFMSILEPFLDTSTAIGVAIFALIAALAKQDSDIKAERLKGAKDEISAVGGRHSSSAPYGMKTVRKQIDNLVVSVLEPDEDNPEHVKTVERIIEMCFNGKADNKIATLLEGDGVPAPGNAKRRATPKRMESIKKRRISEKDAPIRWRAQTVAWILDHPAIGGFASERVKRGKSYVNAVARDSTGAPLTPHKGIITGAKWLQLQEVRKKPTKANRQPGGESDPTLMSGWRFLTCRLCGGSAGQTPSTSGGGSYMCSNPKGHGGLSIKREAADDYVAQRVWSRLLTADIENEDERHWLAAAALRFARQHDLAGVEEERRETQAHLDHVRESIHELQADRKAGVYRGSQELAVFRATIEQYHAYEDQCVGRLKELDEKTSASVRIPDEWLAPTEDDNVIGPKSHWAKWDVFKRREFLDLFLEGVSIGPGRDEDKKIIPVERRLKLTWRRLPKEDEESAEEDATAELAATPAV

SEQ ID NO: 7041 - protein, 504 aa, synthetic construct
MKRKKVAFFSRVSTDLQHSSMENQEKIFQQWLERNPDCVFYKLYEDEGISGSKGYKRVNWLQMLEDGKDGLYDVVVAKSFSRFGRNQTETLQAIKELRLKGIRCVFLEDSLDSEKDMSKFGLFAWLAEQEAQKSSERIKMVWDSFNQQGKVHVTLAPYGYFYDKEIKNFIVNEIEANTVRRIFNLYLEGYGFNNIALTLTNEGVPTKRGGKWAGATVRGILTNEFYIGTLVQGKTRTLDATMKESIKIDEAEWYKHQDNHEAIIEVEVFEKVNQQIQERSSRAKGTYTKEHGNSKRNSNKSLFSNLLLCGECKATMTIKRKKKDDYKPFYQCIEYDKHSLKCGHSSNRVNESFLIEIVKDELNSLSSNNFERLKAIDASRKENKNNIKLQKELDAIERKIDEQIQLANNLLLLYTQGKITELQYGLQNESLNKVLNSFMERKRNLFEQIHQDTTKEQTEAIYGGIERILNKPVEEWSNSQLKEVIDSIIIYTDKTIKINIKYFN

SEQ ID NO: 7042 - protein, 456 aa, synthetic construct
MKAIAAIEAGLAQEIAVWKFSRFGRSRHGAAINLTRVEKVGGQLYSATEDADPRTATGWFTRGVLFEVAAFEADRIGEQWKEAHEYRHAIKLPAMGKPRFGYIWHKRYDPATGVLQQERYEVDPELRDIVARLYARYLNGEGFKVLALWLNGLGCTTTRGGIWGLEGLRYYMGSGFAAGLLRVRREDCPRGRHQGQCNHYDLVPGAQEAIISDETWKEYEKRRKQVAGTHPRSRLPSSEVTGLTRCGQCTGAATLASSRGNPGFRCSRRVQYGDAGCVGVWARGAEVVAEALKKLGEWASGIDEAPSTPLESSGRNDDRARAARERARVQNEHAKVEASLTRLAIDAAKDPDKYPDGVFEAARDELVAERDALAERISALVEVEEMPEAEDYLPLVVGVLDEWDTLTVAERNLILRKLIGRIVLHQPERPGPIRIEIIPVWEEAREPDQRLYATMA

SEQ ID NO: 7043 - protein, 532 aa, synthetic construct
MKAAIYSRKSRFTGKGDSIENQIQLCIDYAKSIGVKDFLIYEDEGFSGSNIDRPQFKKMMQDAKDKKFSYLVCYRLDRISRNVSDFSTLIEKLNELSISFISIKEQFDTSTPMGRAMMFISSVFAQLERETIAERIKDNMYELARSGRWLGGNTPHGFNSEKITFLDENLKERSMYKLQVNDEQMEIVKLIYNKYLELRSLSKLYKYVYNNGIRGPRGGKFDPSSLSRILRNQAYVKANDEILDYLKNSGMDVVGTPDRKCGILTYAKNTSNSIAAIAKHHGVIEPEIWLEVQNQLDKNRDKTPRISTGKTALLSGLIKCGKCGSNMRITYKGKKTDKDLKYYYICGTKKTLGSDSCNCKNLNGPLVESLVIDKIKNCKEESIISAFNSNNIKTDNVFNIFKSETNLLKNQILDKERLIKNLVIELAKNTGSTASDYIVSQIESLNNEISILKDKINILESSNINISSDSINIDIIVSNLKRFNDEVDNASLDDKRLLLSTIINSIVWDSSLGNLNIVYMGAEVDNSVSLSN

SEQ ID NO: 7044 - protein, 541 aa, synthetic construct
MRVLAVKRISRDTESSDALTAQGERLERGIRDGGHVAVGIVEDATVSGAINLDDRPSLGQWMRSPQWEQWDAIMVTTLDRITRNQFHWELFAERCHQGGKEIICLDDPGLDIHTSQGRLIAYVKASQAQQYRDVIVQKRRDQTQSFRDQDLWPGGLWPFGYRAMTVMVDGKRRKRLFLDPVTSKLIREAYDRIVNQAHTVTDVARDWNARGVMTAKDYQAHVNASEGRDEKMTEIKGFQWSHASLKIVLSKPALMGYATHKGEVRMRDGLPVQWSEPILSPAEFEKLQERMSVRSISPSNKPVPNPLREVLWCPCGQHMNSDSSESKTGKRYRYFRCRTFSTYKRCRYRVSWPVDIAHEFLTEEFMVQLGDKEMTTKEFIPGKDNRTEIKNLRTAIGNLAATLGQFEPGSIAHTQTVETMKRHEANLKTLEAEPVVEAAWKVSGTGETYGEWWSRETDWYARGDMLRKAGIRVYLGGSPKNPTVPIIHTFIPHDLEARAGDVISGMIEPGFLEQANEDARESALMMSRPLWDRFWDDREVS

SEQ ID NO: 7045 - protein, 528 aa, synthetic construct
MLDNSNVAPGKNKTLRCAIYTRKSHEEGLEQEFNSLDAQRESAEHYIEAQRMRGWTALPDRYDDGGFSGGNMERPGLRRLLADIDAGKIDVIVVYKVDRLSRSLLDFMKMIDLFNEKGVSFVSVTQHFSTTDPTGRMFLGILITFAQYEREVIAERIRDKVAAAKRRGKYCGGVPIFGYDVDRDNKKLLVNPDEAKTVQYIFRRFIQIGSAKKLGQELNEQGYRTKAWTTKKGKVREGSEWNTAHIYRLLNNRIYIGEIAHKDRSYPGEHEGIIDRATWDKVQAILEDNKPVKVSMARTKMVAPLKGVIRCGHCGCSMGPTYARKNGRHYTYYICQKDSKRTVSRCPLKRIPAGDIEQAVVEQLSAVFRTPTLVAKTYFAARDIEQAERERLFKQKAQLEMELSQAREQALELMKPGNDQPGKAEMLTTVNRQAVELSKQLTHVSERCRAYQGNSITEQDVSEAFQNVEGFWEDLFPVERNRLIRLLVDKVEIRETGIDMELRTNGLTTLIAELAGLACEVTERRTNR

SEQ ID NO: 7046 - protein, 506 aa, synthetic construct
MRTVITYLRYSSAIQGAEGADSTRRQNDLFKQWLKKNSDAQVVASFSDEGLSGYKGKHLTGQFGDMLARIESGEFPEGTILLVESIDRIGRLEHLETEALMNRILGNGLEIHTLQDGLIYTKDALADDLGISIIQRVKAYIAHQESKQKSFRVSQKWEQRAKLALAGEQRLTKMVPGWIDPDTFKLNEHAETVRLIFKLLLSGESLHNIARHLQSNGIKSFSRRKDANGFSVHSVRTILRSETTIGTLPASQRNDRPAIPNYYEAAIDASTFNKAQEILGKNRIGRTPASDNPLTINIFKGLFRCQCGASVHPTGTKNKYQGVYRCNNHLDGRCDVPPLKRKPFDKWMIDNFLGMIDVGNDGEAEGKIASLQHEVEIVTTRIKKATALLLEMDDITELKTQVKELNQKRTELQTTIDSMRRKTSLSDKGLPQLKDIDLMTKEGRVECQLILSKHLKGLTLGKDSVTVTLQNDTEITIPTDPLPLNDGTSIFEIAEKNLLNIDTFQL

SEQ ID NO: 7047 - protein, 464 aa, synthetic construct
MDKKAAIYIRVSTQEQATEGYSIQAQTDRLTKYVEAKDFILYKKYIDAGYSASKLERPAMQELIQDVQSKKVDVIIVYKLDRLSRSQKDTMYLIEDIFRPNDVELISMQESFDTSTAFGSATVGMLSVFAQLERKSISERMITGRVERAKKGFYHTGGQDRPPAGYQFNSDNQLIINEYEAAAIKDLFRLYNDGLGKSSISEYLKKNYPGKNKWLPSSIDRMLKNSLYIGKVKFSGAEYDGIHEPIIDEVTFYKTQKEIARRKQSNTKRYNYVALLGGLCECGICGAKMANRRAVGRKGKVYRYYRCYSKKGSPKHMMKTDGCSSKAQQQFIIDEAVINNLKNIDVEAELKRRSAPQTNTSLISSQIESIDKQINKLIDLFQVDSMPLDVISEKIDKLNKEKQSMEKLLERKNRLDKTELQHRFDILKSFDWDNSSIESKRAVIEMLVQKVIIHDNSIEIILVE

SEQ ID NO: 7048 - protein, 547 aa, synthetic construct
MTKAYSYIRFSTPEQAQGDSLRRQTAKAEAWANERGITLDNSLRDLGVSAYHGANRTTGALKSFLDMVEDGRIQRGSYLIVESLDRISREAVMDATSRLFDLIRAGIIVVTLSDGQEYSEERLRTDWTPLMFSLIVMARAHEESRIKSERVGEAWRQKKDAARREKKPLTPRCPEWLEIRDGAFVERAERVALVRRIFQETINGFGRREIVRRLNAEGIPAFRGSNGWHTSSVAKVIQSRAVLGEYQPHTGTHRNRNRKPEGDPIQNYYPPIVDSGIFWQAQGATQGRRQDAAGRKGMSGSHLFQGLAKCAHCGGSMHVQNKGPLPKGGIYLACSANLRKMGCENRRRWRIDTLEPLLLAAIDMLDQTALSNENDEAGQLRAKAEALRTQIADFERRQRGLIPLVELGDETATARSLELAKLIKRSKKELKTTEDQQATAAAEPNLAARVSAAASISRQLEESAGIEERRELRTRLREIIRGIVERIECHQRFGATAFFIPRDEFSINNRRSAYRFNFMTREGIPRILLDQNVPDDIIDEWVGPWPF

SEQ ID NO: 7049 - protein, 551 aa, synthetic construct
MNCIAYLRVSSHSQLEKGDSIDGQRNYIESWAKNNNHSIERWYIDDGKSAFNGKREQYELMLNELDNDVVQAEAIVVYSLSRFSRNLRSQLSSLEKLNSLGIKLISTTESLPEAEDDSYMMSTMLGLMNEQYSRQNAKVVCHRLKDTARKGYFTGGPIPFGYISVGVNGDTSKHRKILQIFEEEAVVVKDIFQMSDHGDSGLGIGVKNIAKILNQRGDKRRGTVWNRNSVHRILTNPAYCGNFIFGKNSSEPITVLIPKIISKEQFNRVQDGLKERDFTSTENKKFRSNSLLTGILICPQCGSSMVVTSGKSGKYKYYQCSLQVRQSPDKCSSKRIRKDIIEPIVKEKFCNQLLTEERLKTICKLAREVHKLASKELLSEQLKLTKRISQAKEKSYRLISLIAQGTLEPSKQINDQINDYTITLERLEFQLQQVKRKLTLPVKNFGKRRIEEFAIELKQHLTEIDDASLKQLMLATLNSIEGDVSEKKIRFRGSNMTMLYIIANAKTGTDFSVPVFVTKWRRDRDLNPRYAINVCRFSRPVLSTTQPSLRC

SEQ ID NO: 7050 - protein, 470 aa, synthetic construct
MKGESELDKKAAIYIRVSTQEQATEGYSIQAQTDRLIKYVEAKDFILYKKYIDAGYSASKLERPAMQELIQDVQSKKVDVVIVYKLDRLSRSQKDTMYLIEDIFRPNDVELISMQESFDTSTAFGSATVGMLSVFAQLERKSISERMITGRVERAKKGFYHTGGQDRPPAGYQFNSDNQLIINEYEAAAIKDLFRLYNDGLGKSSISEYLKKNYPGKNKWLPSSIDRMLKNSLYIGKVKFSGVEYDGIHEPIIDEVTFYKTQKEIARRKQTNTKRYNYVALLGGLCECGICGAKMANRRAVGRKGKVYRYYRCYSKKGSPKHMMKTDGCSSKAQQQFIIDEAVINNLKNIDVEAELKRRSAPQTNTSLISSQIESIDKQINKLIDLFQVDSMPLDVISEKIDKLNKEKQSMEKLLERKNKLDKTELQHRFDVLKSFDWDNSSIESKRVVIEMLVQKVIIHDNSIEIILVE

SEQ ID NO: 7051 - protein, 520 aa, synthetic construct
MKTAYLYVRVSTDEQADKGYSQRDQQERLKRYCEINSIQVIDVVMEDYSAKTFKRPAWTELLTDLKKRKGKVDHVLFTKWDRFSRNAGDAYMMISKLRLLGVEPQAIEQPLDPSIPENKIMMAFYLAAPEVENDRRALNTFYGMRRARKEGRYMGVAPLGYENKITEYGRKYISIVEEEAEHIRWIFQQLVDGHYAAEQVRKQANERGFKCGSAHFWNIIRNPVYCGKIEVPKFKEEEGYLVQGQHEGIISDKLFFDVQDILTSRAKGAYGAKMVSIDKLPLRGLLICPKCGRMLTGSASKGYSAYYNYYHCQHKCKVRFKAEDANEKFEKVLAGFTIRPERAEIFENELLVEYQNANKHGAFSSSRKDLLKQITEVNVRLSVARKKYYMEETDAADYKIYKAECEAEMVGLEKKLGEMSEGVQKIDKVLHEAVENVSKLQIYWKTYDSMGKRRLFNAVFPEKIWYDGSKYRTVRVNEGIEVIYLKNKELGAFENRKSDLEDHFSAQVAGSRIELPTLGL

SEQ ID NO: 7052 - protein, 478 aa, synthetic construct
MKVALYVRVSTLEQAEEGYSINEQKDKLKKYCEIKDWTIVKEYVDPGRSGSNINRPSMQQLIKDADTGLYDAVLVYKLDRLSRSQKDTLYLIEDVFQKNNIHFISLSENFDTSTAFGKAMIGILSVFAQLEREQIKERMSMGRIGRAKSGKIMEFNNPAFGYEIDGDNYKVDPLRAEIVKRIYKMYLSGTSINKIKETLNSEGHIGNKKNWSDTRIRYILSNPTYLGKIRYDGKTYDGKFSPIIDEETFNKTQNELKERQTATYKRFNMKLRPFQSKYMLSGLLRCGYCGATLFVNSYVYNGKRKLRYNCPSTYKSKQKTRTYKIMDPNCPFKLVYAKDLEPAVINEIKNLALNPQSIQKPVKKTPDIDVEAIQKELAKVRKQQQRLIDLYVISDDVNIDNISKKSADLKLQEETLKKQLAPLEDPDDDDKIVAFNEILDQIKDIDSLDYDKQKFIVKKLIKKIDVWNDNKIKIHWNI

SEQ ID NO: 7053 - protein, 547 aa, synthetic construct
MKLLVTYIRWSTREQDSGDSLRRQTNLIDAFYAKHKDDYYLLPAHRYVDKGKSGFHQQHKAQGSDFRRMFENVMSGAIPEGSLIVVENFDRFSRADIDTAIDDVRQILRKGVSILTLGDGELYDKSALTDPVKLIKHIIIAERAHQESLVKQKRIAQVWNHKTQLARELKKPMGKQAPGWLELSEDGSHYIVDEDKASLVNIIYDKRLSGMSMFAICKWLNEQGYPTINQRKVRISKTKKPDGNWSALSVKHILTSRSVLGYLPAKVSSEDRKTVLREEIEGFYPQIVTDSKFYAVQQLLEETGKGKTSSGEHWLYVNILKGLIRCKCGLVMTPTGIRKPVYQGTYRCNGNKESRCSYGTVSRKLLDTQLCSRLFSKLSQLHDEATDTAKLDELQRRLNTVDSELEKLTETLIQLPNITQIQEALRAKQEEKDELIVQLSREKARVKSVSSLDLSGLDMESVEGRTEAQIIIKRLVKEIVVSGNERLVDIYLHNGNMIRGFQIDGKDDHTLTLEEATDEMQSLDDMLIFGEPVTRIYPAGDMEEVDA

SEQ ID NO: 7054 - protein, 565 aa, synthetic construct
MGLKKLVNDINVEKRRKLISIYCRVSTEEQSEKGYSIDEQERLLKEWCKANDYIIYKCYSDRGISGKNIKDRPALKELLSDAKEGKFDMVISWKINRVSRKLEDVLKIVNLLEKNNITFKSYSEPFETDTPAGRMQFQMMALIGEFERGTIAQNVKMGMIAKAKTGNWCGGRVLGYDLVPNNSPEEEKKGKNKLEINEKEAEIVRFIFNEYSKGKGYKAITNKMNKLGYKTKKGNNFSVGSIRDILTNPVYIGEIRYNVRQNWSEKRRRNINPNPIRVKGKHEAIIDRELWDKVQLILESKKGKPSRIYDGEYPLTGILRCPKCGAGMVISRTTNTLADGTKKRIAYYCCGNWKNKGTSVCNSNTIRVDKANEHVFKKIEELVSNEAMIKAVVKNINKERKDKVKPAKRLLGDIDKELEKLDKRKRKIFEAYEDDILTKDEFQTRKNELNEKIRILEEEKKPLLNTISEEVSEEIPYEFIKDILMNFSKVLNSSVSREQQKKLLHMIISEITMNESREIESIKLNINDKLVEYLVKEGGVPIKGIPSSFMLRNVGLKILNLNIII

SEQ ID NO: 7055 - protein, 483 aa, synthetic construct
MKKKVAAYVRVSTLEQAESGYSIGEQIDKLKKFADIKDWHLYNVYEDGGFSGSNTTRPALERLISDAKRHLFDTVLVYKLDRLSRSQKDTLFLIEDVFKPNDIDFVSLNENFDTSTAFGTAMIGILSVFAQLEREQIKERMKLGRVGRAKSGKAMGWHMTPFGYTYDKISGNFIIEPVAAKVVKNIFTDYLQGMSISKLRDKLNENGHIAKDIKWSYRTLRQTLDNPTYAGMIKYNNTVYQGNHEPLISKETFDQVQIELDKRQKQAYAQNNNPRPFQAKYMLSGLVRCGYCHAPLTVTLGNKHKDGTRLKKYQCLNRKNKNFNPVTVYNKGKTCQSGFYMMEDLESFVIQAISDIQLNPEKRKDIVSHEEPDTVDINFLQAELLQITKRVKKLSDLYMNDLLSLDELKIKTAELKNKRQLIENQIEENANNNVTQLKLAQLSSILGGSNIADIPYDQQRDICKQLIKKVNVTDEEITIEWLF

SEQ ID NO: 7056 - protein, 547 aa, synthetic construct
MRTAYSYVRLSSKKQIQGYGQERQWQAIQAAALAHGWELSEKTFSDLGVSGWKGANIETGALSQFLQCVEDGYIEKGSVLIVENVDRLSRAGVQRAVSLLMQLLASGISIYTFTDSKLYEPDSHNPLMDLMAWALSAQRAFEESERKSQMILNAKAKAREKARLTGEIITRRCPSWLRVNQDKTAFELIPERVETVRKIFDLYVNGYGTPRIGRLLTEEGRKPLTGRAWYPRSISRILQYRAVLGEYQPTLNGKPEGDAIKNYYPAIIDEDRFNEVQAVLKEGGAGKGRRGKEMRNYFAGLLRCSCGEGMHIVSSCVKGKRYYQLRCLQYRISCFGSSWNFYKLSSFVLFALRRLPILEVMGSQDNNNIKELNAKERELTFLLEDTRRQLDNTINAIAALGLNDQLQSKFRELKTSVTNIEKQLSNVKTELETSQGKLVIQKQDSEMLTGRFLELIDSTKDIDGRIKLNQVLRRYLSKIEMHADKKEEYRYIKIYRKDGDELVSIQCDHSLKGALFESKDGLETFELLPATDAKRNEISNTLLCTPK

SEQ ID NO: 7057 - protein, 529 aa, synthetic construct
MRKVYSYMRFSRPEQAKGTSIERQSNFAEQYALEHGLELDKSLTMMDKGLSAFHGVHKTKGAFGQFLAAVTAGKVPSGSVLVVESLDRLSREDPLIAQAALTDLILSGITVVTAADNQVYSREEIQQNPFKLIMSLVVMIRANEESETKQRRSNAFLKSALNQYQANGKIRRLGSDPSWLDFNKDNDTYSFNERVEVIRRILNLYNQGIGSLKIARQLTEENIPTLSGKRSAWGQTTVANIVKSHALYGMKRINVQGVEYDLEDFYPALITKSKWLALQQHRTKRSKSMHGRGEVVHLITGHGKGFTTCGYCGGGLGAQTQKQYKRSGEYIRTVTRLHCLTHKETSSCCSSVFLEPIESAVLFAACIGVEPQSLVPTVNNVNYSALIDEVENKVKHIVEQVTAGAPWDLFKDAHDKLKLEKQKLIKERDLQKPDVNQSDVQKWVNKLVELADKARANDKEARLKCRTLINSICKSIVIKLRGHDLKSEPVVTITFVTDEQFEFKVGKNGAVQFVDNGMAVNRRLKPLLA

SEQ ID NO: 7058 - protein, 463 aa, synthetic construct
MIADILQRVSTKKQSKDEKTGLQRQDENITNWLNRNTGYEVRNVFIVKDSSFRRDDDQRKKKTFHEKGEFHDYLESLRSKKQTPPDILIVDDFSRLSRLPYEAAKDLVKELASFGITIVTATDDQVYAPNVHKSVIGELPISIRLEQTHLESLRKSTMIRAAKKSRRDKAMKEGGILKFGNMPKWLEVQNDQYILIPHRVDAIRFMFDCVVSGMSKGATARELNKKGFKGWDRNGNDTENKWDATKVARIIDSKSVTGTHVSRTWKSDTERSSSYMGKAQSMEQGLEIPNAYPRIISDEVFHNAQLKRGSAITKQKKNCKTHNDGTCIIRNAVCSLCGSSMLYKHASRGEQYSEFLCSKRKYGGSCSNSSINYQKAEKAVLTLLFEHVNLSLLFEQDDSRDLLRAQQQAVQDEIDVLNARIKEKKHKHQKVSIEVALLLDDKETELEDIKQQLRAKQGEDFQM

SEQ ID NO: 7059 - protein, 575 aa, synthetic construct
MTKIAYSYTRLSTEKQIKGHGFTRQREAIEKVCCQHGWQLSDQTFNDLGVSAWKGANATTGALSQFIDLAKKGAIRPNSVLIVESVDRLSRQQVDKSLRLMLELLEVGVSIFTLSDSKLYTTNSDSVMLDLMMWLMTAQRAHEESEIKSLRVRAAKKKNKELIRKGIIVTRKCPEWLTVSDDKSCFLVNNERAEIVRKIFTWYSQGFSTKPIALKLNELGIPYWGKSSTWSYRHIRSLLKHRGVIGEIQLLKRIDGRDVADGDPVEDYYPAIIDRGLWATCQQIKSSKTTAKGRVVERGMANLFRGLLKCECGSGLAINSSTVKGRTYRFLRCSQLKTTGCQAKNWHYEKTERILLIALRHSLSSFSEEDHAVSLRECQHYLARISEELKEKERQAENAINYLLDKPSKLLEARLQTLEDDIARLKAIQEQAEHRLEAVHYEKSTALDKVEELQRVLEDIANDDDSRHKANGLLRRLIDTITLGSISNPRSKEFMEVSGNDYHGLIIIKRRDGLELRIEVLKDYGLSISWEGDDFTVIECSPTQQLNSQHEHQKFINVGEQTVDLWDDEGWVASS

SEQ ID NO: 7060 - protein, 547 aa, synthetic construct
MRTAYSYVRLSSKKQIQGYGQERQWQAIQAAALAHGWELSEKTFSDLGVSGWKGANIETGALSQFLQCVEDGYIEKGSVLIVENVDRLSRAGVQRAVSLLMQLLASGISIYTFTDSKLYEPDSHNPLMDLMAWALSAQRAFEESERKSQMILNAKAKAREKARLTGEIITRRCPSWLRVNQDKTAFELIPERVETVRKIFDLYVNGYGTPRIGRLLTEEGRKPLTGRAWYPRSISRILQYRAVLGEYQPTLNGKPEGDAIKNYYPAIIDEDQFNEVQAVLKEGGAGKGRRGKEMRNYFAGLLRCSCGEGMHIVSSCVKGKRYYQLRCLQYRISCFGSSWNFYKLSSFVLFALRRLPILEVMGSQDNNNIKELNAKERELTFLLEDTRRQLDNTINAIAALGLNDQLQSKFRELKTSVTNIEKQLSNVKTELETSQGKLVIQKQDSEMLTGRFLELIDSTKDIDGRIKLNQVLRRYLSKIEMHADKKEEYRYIKIYRKDGDELVSIQCDHSLKGALFESKDGLETFELLPATDAKRNEISNTLLCTPK

SEQ ID NO: 7061 - protein, 506 aa, synthetic construct
MRHVITYLRYSSATQGAEGADSTRRQNELFKQWLRKNSDAQVVASFNDEGLSGYKGKHLSGQFGDMLSRIESGEFSKGTILLVEAIDRIGRLEHLETEALMNRIIAHGIEIHTLQDGLIYTRDALSDDLGISIIQRVKSYLAHQESKQKSFRVSQKWKQRAKLALAGEQRLTRNVPGWIDPETFKLNEHAETVRLIFKLLLDGESLHNIARHLQSNGIRSFSRRKDANGFSVHSVRTVLRSESVIGTLPASQRNDRPAIPNYYEAAIDASTFNKAQEILDKNRKGRTPASDNPLTINIFKGLFRCQCGASVHPTGTKNKYAGVYRCNNNPDGRCDVPPLKRKPFDKWMIDNFLGMIDVGNDGEAEGKIAALQHEVEIVTARIKKATALLLEMDDITELKTQVKGLNQKRTELQTTIDNMRRKASLTDKELPQLKDIDLTTKAGRVECQLILSKHLKGLTLGKDSVIVTLQNDTEITIPTNPLPLNDGTSIFEIAEKELLEIDAYQL

SEQ ID NO: 7062 - protein, 507 aa, synthetic construct
MKRVISYIRFSSEKQAKGDSLRRQSKMVNDWLKAHPEYYLDQDLSFRDLGVSGFTGKHLKGGLGDFLTAIEKGLVKAGDTLLIESLDRLSRQAVDRASELLRNILRSGVDVVTLSDGEHYTSESLKDPLALIKSILIMQRAHEESLRKSERIQAAWDAKKEAAKAGIKVSKRCPAWLKLNDDRKSFSVIPEKVETVKRCFQLRLEGKSIWEIVRTLNDEGHQSMSQYKPGKFGQTSVQDLLKNRSVIGYFTPKGCEEIAGYYPAIIDETTFYKVQQLSHSRYGRKPVSAKPLSVNLFKGVIRCSECGHALIITGFSDTRNGIYRCPLRNENRCSAKGLSRKQTDGTLLALLSRLDRFDSDTTNTIDMLRLHREHISSNIEKLVQLSLEIEDLSAITSKLKQLKNELSQVDADIEKETQRLKSIDVGCLSDCDLTTKAGRIEAQLIIKSAVKEVVLNTAKRRCKVTFHNGKVIDLSITENPSEDVTEAIQSLSEVTERGLIDVDEVII

SEQ ID NO: 7063 - protein, 547 aa, synthetic construct
MKLLVTYIRWSTKEQDSGDSLRRQTNLIDAFYAKHKDDYYLLPAHRYVDKGKSGFHQQHKNQGSDFRRMFENVMSGVIPEGSLIVVENFDRFSRADIDTAIDDVRQILRKGVSILTLGDGELYDKSALTDPVKLIKHIIIAERAHQESLVKQKRIAQVWNHKTQLARELKKPMGKQAPGWLELSEDGSHYIVDEDKASLVNIIYDKRLSGMSMFAICKWLNEQGYPTINQRKVRISKTKKPDGNWSALSVKHILTSRSVLGYLPAKISTEDRKTVLREEIESFYPQVVTDSKFYAVQQLLEETGKGKTSSGEHWLYVNILKGLIRCKCGLVMTPTGIRKPVYQGTYRCNGNKESRCNYGTVSRKLLDTQLCSRLFSKLSQLHDEATDTAKLDELQRRLNTVDSELEKLTETLIQLPNITQIQEALRVKQEEKDELIVQLSREKARVKSVSSLDLSGLDMESVEGRTEAQIIIKRLVKEIVVSGNEKLVDIYLHNGNMIRGFPLDGKDDHTLTLEEATDEMQSLDDMLIFGEPVTRIYPAGDMEEVDA

SEQ ID NO: 7064 - protein, 509 aa, synthetic construct
MRRAISYIRFSSERQLKGDSVRRQSKLVTDWLDKNPEFYLDSSLSFKDLGKSAFSGKHLKGGLGDFLTAIEKGLVKAGDTLLIESLDRLSRQDIDIASELLRRILRAGVDVVTLSDGEHYTKESLKDPLSLIKSILIMQRAHEESLRKSERVQAAWNRKKELISEGIKISRRCPAWLKLNDDRRTFTIIPDKVEVVKRAFDLRLQGLSFWAITRTLNDEGHLSLNQYTPKQKGWSDTAVKKLLRNRAVIGCFTPAGREEVQGYYPAIISESLFYRVQQLNTGQYGRASVSSNPLSVNLFRGIIKCSECGATIVLGGYALKRFGMYRCPNRSANRCSAKAISRKQTDATILYMLALCDRFETENTDTIDSLKLQREDLQRKISKMAELAIELDDMTIITEKLRDMKNALSKLNHDIEEETKRIKAITTGSLKDIDRTTKEGMIETQLLIKGVLKEIVIDAAKRRCKVTFHNGKVIDLPITENPSEDVTEAIQSLSEVTERGLIDVDVVEI

SEQ ID NO: 7065 - protein, 547 aa, synthetic construct
MKLLVTYIRWSTKEQDSGDSLRRQTNLIDAFYAKHKDDYYLLPAHRYVDKGKSGFHQQHKNQGSDFRRMFENVMSGVIPEGSLIVVENFDRFSRADIDTAIDDVRQILRKGVSILTLGDGELYDKSALTDPVKLIKHIIIAERAHQESLVKQKRIAQVWNHKTQLARELKKPMGKQAPGWLELSDDGSHYIVDEDKASLVNIIYDKRLSGMSMFAICKWLNEQGYPTINQRKVRISKTKKPDGNWSALSVKHILTSRSVLGYLPAKISTEDRKTVLREEIEGFYPQIVTDSKFYAVQQLLEETGKGKTSSGDHWLYVNILKGIIRCKCGLVMTPTGIRKPVYQGTYRCNGNKESRCSYGTVSRKLLDTQLCSRLFSKLSQLHDEATDTAKLDELQRRLNTVDSELEKLTETLIQLPNITQIQEALRVKQGEKDELIVQLSREKARVKSVSSLNLSGLDMESVEGRTEAQIIIKRLVKEIVVSGNEKLVDIYLHNGNMIRGFPLDGKDDHTLTLEEATDEMQSLDDMLIFGEPVTRIYPAGDMEEVDA

SEQ ID NO: 7066 - protein, 507 aa, synthetic construct
MKRVISYIRFSSERQAKGDSLRRQSKMVNDWLKAHPEYYLDQDLSFRDLGVSGFTGKHLKGGLGDFLTAIEKGLVKAGDTLLIESLDRLSRQDIDIASELLRRILRAGVDVVTLSDGEHYTKESLRDLLSLIKSILIMQRSHEESLRKSERIQAAWNRKKELISEGIKISKRCPAWLKLNDDRKSFSVIPEKVETVKRCFQLRLEGKSIWEIVRTLNDEGHQSMSQYKPGKFGQSSVQDLLKNRSVIGYFTPKGCEEISGYFPPIIPETDFYKVQQLSYSRYGRKPASDKPLSVNLFKGVIRCSECGHALIITGFSDTRNGIYRCPLRNENRCSAKGLSRKQTDGTLLALLSRLDRFDSDMTNTIDTLKLHREHLSSNIEKLVQLSLEIEDLNAITNKLKQLKNELSQVDADIEKETQRLKSIDVGCLSDCDLTTKAGRIEAQLIIKSAVKEVVLNTARRRCKVTFHNGKVIDLPITENPSEDVTEAIQSLSEVTAKGLIDVDVVEI

SEQ ID NO: 7067 - protein, 507 aa, synthetic construct
MKRVISYIRFSSEKQAKGDSLRRQSKMVTDWLKAHPEYYLDQDLSFRDLGVSGFTGKHLKGGLGDFLTAIEKGLVKAGDTLLIESLDRLSRQDVDQASELLRNILRSGVDVVTLSDGEHYTSESLKDPLALIKSILIMQRAHEESLRKSERIQAAWDAKKEAAKAGIKVSKRCPAWLKLNDDRKSFSVIPEKVETVKRCFQLRLEGKSIWEIVRTLNDEGHQTLNQYKAGKFGQTSVQDLLKNRSVIGYFTPKGREEIAGYYPAIIDETTFYKVQQLSHYRYGRKPVSDKPLSVNLFKGVIRCSECGHALIITGFSDTRSGIYRCPLRNENRCNAKGLSRKQTDGTLLALLSRLDRFDSDMTNTIDMLRLHREHISSNIEKLVQLSLEIEDLSAITSKLKQLKNELSQVDADIEKETQRLKSIDVGCLSDCDLTTKAGRIEAQLIIKSAVKEVVLNTAKRRCKVTFHNGKSITLPITENPSEDVTEAIQSLSEVTERGLIDVDVVAI

SEQ ID NO: 7068 - protein, 506 aa, synthetic construct
MRTVITYLRFSSAIQGAEGADSTRRQNDLFKQWLKKNSDAQVVASFSDEGLSGYKGKHLTGQFGDMLARIESGEFPEGTILLVEAIDRIGRLEHLETEALMNRIIAHGIEIHTLQDGLIYTRDALSDDLGISIIQRVKSYLAHQESKQKSFRVSEKWKQRAKLALAGKQRLTKMVPGWIDPDTLKLNEHAETVRLIFKLLLSGESLHNIARHLQANNISSFSRRKDANGFSVHSVRTVLRSESVIGTLPASQRNDRPAIPNYYEAAIDAATFNKAQEILDKNRKGRTPASDNPLTINIFKGLFRCQCGASVHPTGTKNKYAGVYRCNNHLDGRCDVPPLKRKPFDKWMIDNFLGMIDVGNDGEAEGKIASLQHEVEIVTTRIKKATALLLEMDDITELKTQVKELNQKRTELQTTIDSMRRKTSLSDKGLPQLKDIDLMTKEGRVECQLILSKHLKGLTLGKDSVTVTLQNDTEITIPTNPLPLNDGTSIFEIADKELLDIDAYQL

SEQ ID NO: 7069 - protein, 470 aa, synthetic construct
MRVAIYIRKSRGTEEDLLKHDEVLTNLCNANNWSYDLYKEIGSSQDNQREQYNRMKENIENYSKIVVMALDRLSREKQEQAELTKLINKYNFEIVTPTRIYTKHDNLLMDIQELLARQEYQMIRARQIQGTKTSFERGNWVGGIPTIGYKYDRNIRKLVIDEEKAKIYLFIKELALKGYNSSTIVSECYKKNYRSLTNKDFTPTAINRILKCRTYLGEVPYSGEWRKGNHEPLCTYEEYDTICDYITHRRVGIKSKAKTFPLSNLIVCGQCGALYGSTRRKDRGNREYLKKCWRKNVATGEKCNNKGVNAYKVHQAIKQQLEKRMFELKNTLDNFDRTNFENMKNDIQAQIYSLEDNISVLESRNDNIRNMCENGLYTVATAKEKISKNEITIKEYQNKIEILKNKLNNISNKDIENNFEKTKEVLNILYKLNLDDEKNDELINKIYKTIIDKIEMTLSDEKKELKIYYK

SEQ ID NO: 7070 - protein, 505 aa, synthetic construct
MRHVITYLRYSSAIQGAEGADSTRRQNDLFKQWLKKNSDAQVVASFNDEGLSGYKGKHLSGQFGDMLSRIESGEFSEGTVLLVEAIDRIGRLEHLETEALMNRIIAHGIEIHTLQDGLIYTRDALSDDLGISIIQRVKSYIAHQESKQKSFRVSQKWEQRAKLALAGEQRLTRNVPGWIDPDTFKCNEHAETVRLIFKLLLDGESLHNIARHLQSNDIKSFSRKDANGFSVHSVRTVLRSESVIGTLPASQRNDRPAIPNYYEAAIDAATFNKAQEILDKNRKGRTPASDNPLTINIFKGLFRCQCGASVHPTGTKNKYAGVYRCNNHLDGRCDVPPLKRKPFDKWMIDNFLGMIDVGNDGEAEGKIASLQHEVEIVTTRIKKATALLLEMDDITELKTQVKELNQKRTELQTTIDSMRRKTSLSDKGLPQLKDIDLMTKEGRVECQLILSKHLKGLTLGKDSVTVTLQNDTEITIPTNPLPLNDGSPIFEIADKELLDIDAYQL

SEQ ID NO: 7071 - protein, 507 aa, synthetic construct
MKRVISYIRFSSEKQAKGDSLRRQSKMVTDWLKAHPEYYLDQDLSFRDLGVSGFTGKHLKGGLGDFLTAIEKGLVKAGDTLLIESLDRLSRQDVDQASELLRNILRSGVDVVTLSDGEHYTRESLRDPLALIKSILIMQRAHEESLRKSERIQAAWDAKKEAAKAGIKISKRCPAWLKLNDDRKSFSVIPDKVETVKRCFQLRLEGKSIWEIVRTLNDEGHQTLNQYKAGKFGQTSVQDLLKNRSVIGYFTPKGREEISGYYPAIIDETTFYKVQQLSHSRYGKRSVSDKPLSVNLFKGVIRCSECGHALIITGFSDTRNGIYRCPLRNENRCNAKGLSRKQTDGTLLALLSRLDRFDSDTTNTIDTLKLHREHLSSNIEKLVQLSLEIEDLNAITNKLKQLKNELSQVDADIEKETQRLKSIDVGCLSDCDLTTKAGRIEAQLIIKSAVKEVVLNTARRRCKVTFHNGKVIDLPITENPSEDVTEAIQSLSEVTAKGLIDVDVVEI

SEQ ID NO: 7072 - protein, 507 aa, synthetic construct
MKRVISYIRFSSERQAKGDSLRRQSKMVTDWLKAHPEYYLDQDLSFRDLGVSGFTGKHLKGGLGDFLTAIEKGLVKAGDTLLIESLDRLSRQAVDRASELLRNILRSGVDVVTLSDGEHYTSESLKDPLALIKSILIMQRAHEESLRKSERIQAAWNRKKELISEGIKVSKRCPAWLRLNDDRKSFSVIPEKVETVKRCFQLRLEGKSIWEIVRTLNDEGHQSMSQYKPGKFGQTSVQDLLKNRSVIGYFTPKGCEEISGYYPAIIDETTFYKVQQLSHYRYGRKPVSDKPLSVNLFKGVIRCSECGHALIITGFSDTRNGIYRCPLRNENRCSAKGLSRKQTDGTLLTLLSRLDRFDSDTTNTIDTLKLHREHISSNIEKLVQLSLEIEDLSAITSKLKQLKGELSQVDADIEKETQRLKSIDVGCLSDCDLTTKAGRIEAQLIIKSAVKEVVLNTAKRRCKVTFHNGKVIGLSITENPSEDVTEAIQSLSEVTERGLIDVDVVEI

SEQ ID NO: 7073 - protein, 506 aa, synthetic construct
MRTVITYLRFSSAIQGAEGADSTRRQNDLFKQWLKKNSDAQVVASFSDEGLSGYKGKHLTGQFGDMLARIEAGEFPASTILLVESIDRIGRLEHLETEALMNRILGNGVEIHTLQDGLIYTKDALADDLGISIIQRVKAYIAHQESKQKSFRVSQKWEQRAKLALAGEQRLTKMVPGWIDPDTFKCNEHAETVRLIFKLLLDGESLHNIARHLQANNISSFSRRKDANGFSVHSVRTILRSETTIGTLPASQRNDRPAIPNYYEASIDVSTFNKAQEILDKNRKGRTPASDNPLTINIFKGLFRCQCGASVHPTGTKNKYAGVYRCNNHLDGRCDVPPLKRKPFDKWMIDNFLGMIDVGNDGEAEGKIASLQHEVEIVTTRIKKATALLLEMDDITELKTQVKELNQKRTELQTMIDNMRRKASLTDKELPQLKDIDLMTKAGRVECQLILSKHLKGLTLGKDSVTVTLQNDTEITIPTNPLPLNDGTSIFEIADKELLDIDAFRL

SEQ ID NO: 7074 - protein, 506 aa, synthetic construct
MRTAITYLRFSSAIQGAEGADSTRRQNDLFKQWLKKNSDAQVVASFSDEGVSGYKGKHLTGQFGDMLARIEAGEFPEGTILLVESIDRIGRLEHLETEALMNRILGNGIEIHTLQDGLVYTKDALADDLGISIIQRVKAYIAHQESKQKSFRVSQKWKQRAKLALAGEQRLTRNVPGWIDPDTLKLNEHAETVRLIFKLLLSGESLHNIARHLQSNGIKSFSRRKDANGFSVHSVRTILRSETTIGTLPASQRNDRPAIPNYYEAAIDAATFNKAQEILDKNRKGRTPASDNPLTINIFKGLFRCQCGASVHPTGTKNKYAGVYRCNNHLDGRCDVPPLKRKPFDRWMIDNFLGMIDVGNDGEAEGKIASLQHEVEIVTTRIKKATALLLEMDDIDELKIQLKELNQKRTELQTTIDNMRRKASLTDKELPQLKDIDLTTKAGRVECQLILSKHLKGLTLGKDSVTVTLQNDTEIIVPTDPLPLNDGTSIFEIAEKELLEIDAYQL

SEQ ID NO: 7075 - protein, 547 aa, synthetic construct
MKLLVPYIRWSTKEQDSGDSLRRQTNLIDAFYSKHKNDYYLLPAHRYVDKGKSGFHQQHKAQGSDFRRMFENVMSGAIPEGSLIVVENFDRFSRADIDTAIDDVRQILRKGVSILTLGDGELYDKSALTDPVKLIKHIIIAERAHQESLVKQKRIAQVWNHKTQLARELKKPMGKQAPGWLELSDDGSHYIVDEDKASLVNIIYDKRLSGMSMFAICKWLNEQGYPTINQRKVRISKTKKPDGNWSALSVKHILTSRSVLGYLPAKISTEDRKTVLREEIESFYPQIVTDSKFYAVQQLLEETGKGKTSSGDHWLYVNILKGLIRCKCGLVMTPTGIRKPVYQGTYRCNGNKESRCSYGTVSRKLLDTQLCSRLFSKLSQLHDEATDTAKLDELQRRLNTVDSELEKLTETLIQLPNITQIQEALRVKQEEKDELIVQLSREKARVKSVSSLDLSGLDMESVEGRTEAQIIIKRLVKEIVVSGNEKLVDIYLHNGNMIRGFPLDGKDDHTLTLEEATDEMQSLDDMLIFGEPVTRIYPAGDMEEVDA

SEQ ID NO: 7076 - protein, 507 aa, synthetic construct
MKRVISYIRFSSERQAKGDSLRRQSKMVNDWLKAHPEYYLDQDLSFRDLGVSGFTGKHLKGGLGDFLTAIEKGLVKAGDTLLIESLDRLSRQAVDRASELLRNILRSGVDVVTLSDGEHYTSESLKDPLALIKSILIMQRAHEESLRKSERIQAAWNRKKELISEGIKISKRCPAWLKLNDDRKSFSVIPEKVETVKRCFQLRLEGKSIWEIVRTLNAEGHQSMSQYKPGKFGQTSVQDLLKNRSVIGYFTPKGCEEIAGYYPAIIDETTFYKVQQLSHSRYGRKPVSAKPLSVNLFKGVIRCSECGHALIITGFSDTRNGIYRCPLRNENRCSAKGLSRKQTDGTLLALLSRLDRFDSDMTNTIDMLRLHREHISSNIEKLVQLSLEIEDLSAITIKLKQLKGELSQVDADIEKETQRLKSIDVGCLSDCDLTTKAGRIEAQLIIKSAVKEVVLNTAKRRCKVTFHNGKSITLPITENPSEDVTEAIQSLSEVTERGLIDVDVVEI

SEQ ID NO: 7077 - protein, 547 aa, synthetic construct
MKLLVTYIRWSTKEQDSGDSLRRQTNLIDAFYAKHKDDYYLLPAHRYVDKGKSGFHQQHKNQGSDFRRMFENVMSGTIPEGSLIVVENFDRFSRADIDTAIDDVRQILRKGVSILTLGDGELYDKSALTDPVKLIKHIIIAERAHQESLVKQKRIAQVWNHKTQLARELKKPMGKQAPGWLELSEDGSHYIVDEDKASLVNIIYDKRLSGMSMFAICKWLNEQGYPTINQRKVRISKTKKPDGNWSALSVKHILTSRSVLGYLPAKISTEDRKTVLREEIESFYPQIVTDSKFYAVQQLLEETGKGKTSSGEHWLYVNILKGLIRCKCGLVMTPTGIRKPVYQGTYRCNGNKESRCNYGTVSRKLLDTQLCSRLFSKLSQLHDEATDTAKLDELQRRLNTVDSELEKLTETLIQLPNITQIQEALRVKQGEKDELIVQLSREKARVKSVSSLDLSGLDMESVEGRTEAQIIIKRLVKEIVVSGNEKLVDIYLHNGNMIRGFPLDGKDDHTLTLEEATDEMQSLDDMLIFGEPVTRIYPAGDMEEVDA

SEQ ID NO: 7078 - protein, 604 aa, synthetic construct
MIKIIGYARVSTTKQDLSRQKLKIKEFCENNNYELIEIIEDFGISGVVADRKGYIELQSKTYKDADMIVISELSRLSRQEDVTETVYNIQQIINKGLSVILLDSPSKIYEANKLLDITEILILTIKAWAAAQERLDIKKKDQDGKQALFQAYPYAVVDQKIPYGYKAVPNPNGKRPKYILEEVPEEVENIKRLFALVNSGKTLGAVARYFNERNITFRGYYSTVAILSNYIHSDIYRGIRRRTQRLGREEPYTIEVRIKPIISEEDFMKAQELIKNNYKNTPTGKVNHNPLKGIIRCRCGRAMTVKDKKPAAGISKLTYRCSCVDRKSHPDFCKYNIDEVSYDLTNEILYSLFKSMHTAEYINFFRNQTDNRVTELQEEIAGIEKRLSALYLDKENLSNESQDNANKFLLTTNPTLLNIIQEKQNQLDEKIKSIDKEIIRYKKSQSKKMADIERIKDNNGKEKLQNLSIEEQGELYHKYLERVNYIPVTTMQGYYIVQFLNGIKFYIAITKVRSIAMASLLLDNWTIDEKGIITANYDTLKSSDMKNFSIEMIRKTKTMTLQEYLKSDLAKERALHLDLSYRERYLEELHKAGLDGRLRPLKKE

SEQ ID NO: 7079 - protein, 589 aa, synthetic construct
MCSDFIIFAPTNQRRSIMRKRIVGYARVSTEKQDLERQKILIREYCSNNNYDLVKIISEKVSGAKKDRESINELLAVTKDTADMVVVSELSRISREKECLTVLNTINDILENGLDVLFLDDTSKVYSAYTELNVIDIITLTVKAHSAAEERDKITARMRTGKITKLNINPYMYTGSLVPYGFKVIDNPDYKGQKCNIPARKLMVIDESKTKDVQFIYQLVLNGTTLRDAAEEVNKLGLRTQLNKPFCETSISKMIKNPIYNGRRRFKGLNLPLMDKIISDNDWNRAQICVSQNQLFKGKTTKNFNPLKGLVFCPCGYALMLHKMIRKDGSGYFVMTCCKKNDKEYRKKCRNSGIVSHVLLPTVWKCVKDTLLLSEYTTKTTSEVHRINGIIEGLEDRISGLIDEIDSHKKEMARLSKAITLVTVKGLITQYENEYVTEEAKVTEIEAKINNIRDEISNYKANITKINSITYNSQLTNLTDQEKASVYQKVLSKVVYYSIDYFRGFIVISYKNGLENIIAINKTTTGYISPLPSSFSFNAETRKIRVTIGKKQTSIKEFSLSDIENIEYSFKELEANFNPQQWDIQSQIL

SEQ ID NO: 7080 - protein, 530 aa, synthetic construct
MLDLSGTYYMYLRKSREDRDAEAHGEGETLSRHENRLNELAEQLGITISHVYREVVSGETIAARPEMMQLISDIENNRPEGVLVIELERLARGDTRDQGLIMETFKYGNTKIITPMKTYDPNDEFDEEYAEFGLFMSRREYKVINRRLQNGRRASVKEGKWTGNVAPYGYERMKLPHEKGFTLKPLPEESKIVQFVFQLFTTGTPESDNIPLGTTQIAHLLDDMKIPPRKSDHWETSVIRGMLRNYAYIGKLETGKRKQIKIIENGVPKRSRPINADCEIFDALHPPIIDESVFYSAQKKLKANFRPPTFSTTKSPLAGLIYCSECKMSMYRRPPGSKNPTETILCKTHNCPTVGSFYYLVEERLLQFLERYLSDYKIIIQNEDTGDWTEVIDRKMSVLAGYQNEAFILDKQLEMVYDYFEQQVYSLDLFRKRCDELTRKIDENNKLMETIQGEIIEIKEHIAKKEEFIPYFEGILRSYTKTEDPLKKNILLKQVVDHVYYTKNKKGNRMGQGNDLFSLDVYLKLPYKDL

SEQ ID NO: 7081 - protein, 547 aa, synthetic construct
MKLLVTYIRWSTREQDSGDSLRRQTNLIDAFYSKHKDDYYLLPAHRYVDKGKSGFHQQHKAQGSDFRRMFENVMSGAIPEGSLIVVENFDRFSRADIDTAIDDVRQILRKGVSILTLGDGELYDKSALTDPVKLIKHIIIAERAHQESLVKQKRIAQVWNHKTQLARELKKPMGKQAPGWLELSEDGSHYIVDEDKASLVNIIYDKRLSGMSMFAICKWLNEQGYPTINQRKVRISKTKKPDGNWSALSVKHILTSRSVLGYLPAKISSEDRKTVLREEIEGFYPQIVTDSKFYAVQQLLEETGKGKTSSGDHWLYVNILKGLIRCKCGLVMTPTGIRKPVYQGTYRCNGNKESRCSYGTVSRKLLDTQLCSRLFSKLSQLHDEATDTAKLDELQRRLNTVDSELEKLTETLIQLPNITQIQEALRVKQEEKDELIVQLSREKARVKSVSSLDLSGLDMESVEGRTEAQIIIKRLVKEIVVSGNEKLVDIYLHNGNMIRGFPLDGKDDHTLTLEEATDEMQSLDDMLIFGEPVTRIYPAGDMEEVDA

SEQ ID NO: 7082 - protein, 507 aa, synthetic construct
MKRAISYIRFSSEKQSRGDSLRRQSKMVNDWLKAHPEYYLDQDLSFRDLGVSGFTGKHLKGGLGDFLTAIEKGLVKAGDTLLIESLDRLSRQDVDQASELLRNILRSGVDVVTLSDGEHYTRESLKDPLALIKSILIMQRSHEESLRKSERIQAAWDAKKEAAKAGIKISRRCPAWLKLNDDRKSFSVIPEKVETVRRCFQLRLEGKSIWEIVRILNDEGHQTLNQYKAGKFGQTSVQDLLKNRSVIGYFTPKGCEGIAGYFPPIIPETDFYKVQQLSYSRYGRKPASDKPLSVNLFKGVIRCSECGHALIITGFSDTRNGIYRCPLRNENRCNAKGLSRKQTDGTLLALLSRLDRFDSDMTNVIDALKLHREHISNNIEKLVQLSLEIEDLSAITIKLKQLKGELSQVDADIEKETQRLKSIDVGCLSDCDLTTKAGRIEAQLIIKSAVKEVVLNTAKRRCKVTFHNSKSITLPITENPSEDVTEAIQSLSEVTERGLIDVDEVII

SEQ ID NO: 7083 - protein, 507 aa, synthetic construct
MKRVISYIRFSSEKQAKGDSLRRQSKMVTDWLKAHPEYYLDQDLSFRDLGVSGFTGKHLKGGLGDFLTAIEKGLVKAGDTLLIESLDRLSRQAVDRASELLRNILRSGVDVVTLSDGEHYTKESLRDPLSLIKSILIMQRAHEESLRKAERIQAAWDAKKEAAKAGIKISRRCPAWLKLNDDRKSFSVIPEKVETVKRCFQLRLEGKSIWEIVRTLNDEGHQSMSQYKPGSFGQSSVQDLLKNRSVIGYFTPKGCEEIAGYYPAIIDETTFYKVQQLSYARYGRKPASDKPLSVNLFKGVIRCSECGHALIITGFSDTRSGIYRCPLRNENRCSAKGLSRKQTDGTLLTLLSRLDRFDSDTTNTIDMLRLHREHISSNIEKLVQLSLEIEDLNAITNKLKQLKNELSQVDADIEKETQRLKSIDTGSLSDCDLSTKAGRIEAQLIIKSAVKEVVLNTAKRRCKVTFHNGKVIDLPITENPSDNVTEAIQSLSEVTERGLIDVDEVII

SEQ ID NO: 7084 - protein, 547 aa, synthetic construct
MKLLVTYIRWSTKEQDSGDSLRRQTNLIDAFYSKHKNDYYLLPAHRYVDKGKSGFHQQHKNQGSDFRRMFENVMSGVIPEGSLIVVENFDRFSRADIDTAIDDVRQILRKGVSILTLGDGELYDKSALTDPVKLIKHIIIAERAHQESLVKQKRIAQVWNHKTQLARELKKPMGKQAPGWLELSEDGSHYIVDEDKASLVNIIYDKRLSGMSMFAICKWLNEQGYPTINQRKVRISKTKKPDGNWSALSVKHILTSRSVLGYLPAKISTEDRKTVLREEIESFYPQIVTDSKFYAVQQLLEETGKGKTSSGDHWLYVNILKGLIRCKCGLVMTPTGIRKPVYQGTYRCNGNKESRCSYGTVSRKLLDTQLCSRLFSKLSQLHDEATDTAKLDELQRRLNTVDSELEKLTETLIQLPNITQIQEALRVKQEEKDELIVQLSREKARVKSVSSLDLSGLDMESVEGRTEAQIIIKRLVKEIVVSGNEKLVDIYLHNGNMIRGFPLDGKDDHTLTLEEATDEMQSLDDMLIFGEPVTRIYPAGDMEEVDA

SEQ ID NO: 7085 - protein, 506 aa, synthetic construct
MRTVITYLRFSSATQGAEGADSTRRQNELFKQWLRKNSDAQVVASFSDEGLSGYKGKHLTGQFGDMLARIESGEFSEGTVLLVEAIDRIGRLEHLETEALMNRIIAHGIEIHTLQDGLIYTRDALSDDLGISIIQRVKSYVAHQESKQKSFRVSQKWKQRAKLALAGEQRLTRNVPGWIDPDTFKCNEHAETVRLIFKLLLDGESLHNIARHLQSNDIKSFSRRKDANGFSVHSVRTVLRSESVIGTLPASQRNDRPAIPNYYEPAIDASTFNKAQEILDKNRKGRTPASDNPLTINIFKGLFRCQCGASVHPTGTKNKYAGVYRCNSHLDGRCGVPPLKRKPFDKWMIDNFLGMIDVGNDGEAEKEIASLQHEVETVTARIKKATALLLEMDDIDELKIQLKELNQKRTELQTTIDSMRRKASLTDKELPQLKDIDLTTKAGRVECQLILSKHLKGLTLGKDSVTVTLQNDTEITIPTNPLPLNDGSPIFEIADKELLDIDAYQL

SEQ ID NO: 7086 - protein, 517 aa, synthetic construct
MENLIKRAAIYARVSSDKQDVDLSISAQLRALKEYAKHNNYEIVREFIDEAETGRTTARPAFREMISLARHPQKPFEIILVWKYSRFARSREDSIVYKAMLRKNGVQLISINEPRDDTPTGRLLEAIIESLDEFYSDNLGEEVTRGMRESASRGYYLSSKPPYGYIKVRFKDGEKERTKLEIEPNQAAIVVSIYQDIIAGKGLTAITKELNQKGIASPKGKGWGKTGLRIILKNEAYTGTLVYGRNSKRGLEPIKVENACPAIISKAVFEQVQELIKSRTFKSIHPKRASSPFLLSGITFCGHCGKALTGQVAKSGKFAYYICGTLNKKGAGTCPAHYHNSRAFEQKVIQTLKDNILTEENLTHLAEVVNQEMDENSIQYREELNAVLDEMIEVNHRLERLYDAVETGSIPMADLAPRIRELRTRHEKLNERKLQVEQQLSDRHIELASPEILSQYVNDLRKLLTVSELTEKKAFIRSFVQKINVIGDEATLTYEMPLNGLLEQKIGVLPIVQYGGQ

SEQ ID NO: 7087 - protein, 566 aa, synthetic construct
MLILKGDQKLSTDNIMHLIGKINALIYARVSTTDQANKGFSIESQIERCKERAISKFGYKESEIIALVEPGGMGDDPNRPALNHALYLLEKGLGKKFIVLHPDRLTRDNTLQGVVSRRIWGMGVDIEFIEFEVNPHDPESMLMYNIQGSIAQYNKAKIHANSKRGRLAKAKKGEFPSFKRLYGYKFNTVTDLPEYNEEEKEILLEMKDMLLNKKMSSNEIAKELSRRGVAAPNGKTWYQATVSRMLQNEDYTGDFYYGKSKVVQINGKKKQVPTNKDEWILIKIPPMWDKATREQIIERLKSNFKGRSRATKDYLLKNKAKCGRCGGACGSGITSKTKSGVYKYYSCRAKTAKGYQNGKKVVSCEGKNWRVDIVDEVFWNWFIKLMKNPEKFLESFLEEASDQKKIDELKAKASRLEKQLGEIDEEIANYVILFGKGKIKESMFDQLSQPLEQNKEHIENEIKIINSQLAANKQTEDKKQKMIEYIGSFSKMIKNEITIEEKRQFLDFFIEKVTLFDDDHMEVVWKSSSLNNENSHVDFLNGEQGGQFINSHKRLNHIQAYGRQTA

SEQ ID NO: 7088 - protein, 495 aa, synthetic construct
MNIDENSKVAVYSRKSREDPDTEDTLLKHRDQLKALLNRYSFTDVEWFEEVVSSDSIDNRPIFSRLLPRIRSGEFDVVCVIANDRLSRGSQIDSGRIMEAFKESNTLLITPQKIYNMSNESDEMLSEFELVIARNEYRAIKRRLLNGRKGAVKEGRPHSGSVPYGFKWDKNDKTAKVDEEKIKIYRMMIDWFLNEEMSSVAIADRLNQLEIPPPSSRGKMWYGEVVTYLLINDFHRGYVWYGKDEQNKGIHQPTKTEEEHIKIVERLSKLRTYPEAGRRLNMNTNRLSGIVRCPYCLKVQSIDQPKGRQKHVRKCLRRSTAREPMCDTTKGINEDILYGAILQEMKQYSSELFKRNKNTETEEQATFSVQLIELKEKAIKKLRGRIDRLKELYLDGDLDKNEYKEKLEKAQENLIKSEKELSELYSSVEYQKEKALEKRTYLWQKEDVQALLESDQGMSESEINIILKKLISHVSYKVKDEDGKQPELSVKVYYN

SEQ ID NO: 7089 - protein, 535 aa, synthetic construct
MELKHIVNSYNVTKIIGYLRRSRQDVEREKRTGEDTLTEQKELMNKILTGIEIPYETRTEIGSGESIEGRPVFKSCLADLRSGKFQAIAVKEITRLSRGSYSDAGEIVNLLNEKRIIIITPYKIYDPRNPVDARQIRFELFMAREEFEMTRERMNGAKFTYAAQGKWISGLAPFGYKLNKRTSRLEPADESKAVVQLIFDIFLNGLDGKDLSYTAIATHLTKLQFTTPRGGKRWSKDSVKKILQNEAYMGRVRYKARETTKDGKRIFRPESEHIVVDDAHEPIISKEDFEAVQTKIANKVPLLPVVTSFEPNELAGLCVCSVCGKSLQKYESEYNRQNKDGTSSYFHVKLLICRINKCTSVRYQYVEDAILDYLEQLIALENDKLKDVIEKSMEAAENNNSEKTSEQMVVQANQKQKELENKLTFIFEKFESGIYTDEIFLQRKAAIEKEISDIKKLKQELSMTFEVKDKDVNEFRVNIADVVKFYKESKSRGMKNEKLRTVFDYIVLEMTEKRRGPIPAKFEIYPYLRIASASH

SEQ ID NO: 7090 - protein, 542 aa, synthetic construct
MAAKARVYSYLRFSDPKQAAGGSVDRQLEYAARWAADNEMELDASLSLRDEGLSAYHQRHVRQGALGVFLRAVEDGQVPGGSVLVVEGLDRLSRAEPLQAQAQLAQIVNAGITVVTASDGREYNRERLKAQPMDLVYSLLVMIRAHEESDTKSKRVKAAIRRQCQGWIAGTWRAPIRVGRDPHWVRETDSGKFELVEDRAAAVRLVIEMFKQGHGAVRIVRELAERGLKITESGRTASSHLYKLLANRMLIGEKSVEVDGESFRLDGYYPALLSSAEFADLRYLAEQRGRRKGKGEIPGVVTGLGITYCGYCGAAIVAQNLMRRKRMADGRPAPGHRRLHCVTYSTGAGCKVSGSCSVVPVERALMLYCSDQINLTRLLEGDAGTASLTAQLASARLRVAELEAQVQRVTDALLLDDGEAPAAVLRRVRELENQLALERRDVDSFEHQLAASASNAAPAAADAWRELVQGVEQLDYDARLLARQLVADTFSRIVIYQSGFRPDTDEGTIGLVLVAKRGGTRLLNVDRRTGNWRAAEDFSYAD

SEQ ID NO: 7091 - protein, 588 aa, synthetic construct
MHRVNYCARNVNTETAKPLAYSYIRFSTAQQALGDSLRRQVELTEKYCEEHGLTLARASAYRDLGVSAFRSKNIEAGKLAEFIAAVRAGRVAPGSFLIIEQFDRLSRAEVNVALRLFLDLVDAGIVVVTLADKKVWDKESVTDVGDLITAIIYMSRANDESARKSDRLSAVWAQKKKRAADGTASRIVTSEVPRWLRANDDKTGFVIVPELAESVRRVFEMRINGAGVVAICRRANQERWPVPGKPPVRKAGEADEDFSKRKLASGQWHQSLVSRILRNRAVLGEYQPRRIDAENSRNRIPVGEPIRGYYPAVIDEATFLRAHATSLRRGTRPGRRDAQARNWLYGLVKCGECGNSLVRKNKTSAKQPGYSRYYCVARVRGLTKCGSVNSELLEASVKYIAASWLPNNWNSDASLDSLKARADSLEVQIASSRRAIDGLADLAASVTAESARRTLIERLNEEGELLGTREAELARVRTELADKSYATGAMTAHEGLERMAHEIDEIAAGRGGTDASLRLREEIARILQKVVVYEADGYVEFWVKGREKPVWIPFDFFSQKPPTAPSEAQLEEAWRDMDALQTARDSHD

SEQ ID NO: 7092 - protein, 560 aa, synthetic construct
MAKKPKGKVYSYLRFSDPKQAAGSSADRQMEYAARWATEHDMQLDATLTLRDEGLSAFHQRHIKQGALGVFLRAIEDGRIQPGSVLIVEGLDRLSRAEPIQAQAQLAQIINAGITVVTASDGREYNRERLKAQPMDLVYSLLVMIRAHEESDTKSKRVKAAIRRQCEGWVAGTWRGIIRNGKDPHWVRLGEHGKFEHVPERVLAVRTMIDLFREGHGAIEITRRLTEQNLYVSNAGNYSVHMYRIVRNHALIGEKRISVDGEEFRLDGYYPPILTREEFAELQQTMSERGRRKGKGEIPNIITGLSITVCGYCGRAMTTQNSKARAPKGKSVVRRLSCPMNSFNEGCPIGGSCESEIVERALMRYCSDQFNLSRLLEGDDGTARRTAQLAVARQRASDIEAQIQRVTDALLSDDGKAPAAFTRRARELETQLEEQRREIEALEHQIAASSAHGIPAAAEAWAQLVDGVLALDYDARMKARQLVADTFRKIVVYQRGFAPIDDAAADRWKRSGTIGLMLVTKRGGMRLLNVDRRTGCWQAEDDLDPSLIPSDGLPMLPLDA

SEQ ID NO: 7093 - protein, 512 aa, synthetic construct
MLLDDTLTLRDEGLSAYHQRHVTRGALGVFLRAVEDGRVPPGSVLVVEGLDRLSRAEPIQAQAQLAQIINAGITVITASDGREYNRERLRAQPMDLVYSLLVMIRAHEESATKSNRVKAAIRRQCQGWIAGTWRQPVRVGKDPQWVREVDGRFELIPERAAAIRLVVEMYRQGHGAVRVVRELAERGLTITNTGRTPSSHIYKLLANRMLIGEKTVELDGEEYRLEGYYPAVISPAEFAELRYLAEQRFRRKGKGEIPGIVTGLGITYCGYCGTAVTAQNIMGRRRDDAGRPQHGHRRLSCFSYRNALGCPVSGSVSVVPIERALMHYCSDQINLSRLLEGDSGATALAAELARARQRAADVEAQIQRATDALLTETDAPPAAVLRRIRELEAQLESARHEISSLEHRLSAESTTTPAAAQAWAELVKGVEELDYDARMKARQLVADTFSRIVVYHRGFKPREDSSTIGLLLIAKRGTTRMLHVDRKTGNWQAAEDLDLSAVPSREVPLPSA

SEQ ID NO: 7094 - protein, 509 aa, synthetic construct
MSKPRAYSYLRFSTPEQLKGDSYRRQTTMALEYATRKGLALDQDLTFEDLGVSAFRGTNAEAGRLAEFLEAVRAGLVPRGSYLLVEALDRLSRLSPRKAVRVLEDIVEEGITVVTLNDGREYTSANLDDDPTALLIAIVLFMRANEESATKSRRLSAAWEGKRQRVEDRPLTAITPAWVSLNEASGKLELVPERAAIVQRIFDMYAAGIGYALIAETFNREGIPCFGRARHWHRTYIRKILVNDAVIGIFTPHRIVHEGGKKIRLPLEKVPGYFPSVISEDLFTKAQSQLNGNAGPAPKHRGAVISNLIAGLARCPICGSTMTRVMKGAGPKSGKPKLVCTKAKAGAGCQYHAVPLDSVETAVISNASYVTGTVPSGRDGLDSDLDAAEVRIEATQDEIENLLRALAVTPSTAIAERIKDLEVSLEALRTERDGLADQLMAANGPLLAKRVEELRQALEAAPLDRAKANAALRVLLSSVTVDYDSGKLLFQWKHGGETEVIYSMPREVR

SEQ ID NO: 7095 - protein, 569 aa, synthetic construct
MILRTSEPVMAKNPKGKVYSYLRFSDPKQAAGSSADRQMEYAARWAIEHDMQLDASLTLRDEGLSAFHQRHIKQGALGVFLRAIEDGRIQPGSVLIVEGLDRLSRAEPIQAQAQLAQIINAGITVVTASDGREYNRERLKAQPMDLVYSLLVMIRAHEESDTKSKRVKAAIRRQCEGWVAGTWRGIIRNGKDPHWVRLGEHGKFEHVPERVLAVRTMIDLFREGHGAIEITRRLTEQNLYVSNAGNYSVHMYRIVRNHALIGEKRISVDGEEFRLDGYYPPILTREEFAELQQTMSERGRRKGKGEIPNIITGLSITVCGYCGRAMTTQNSKARAPKGKSVVRRLSCPMNSFNEGCPIGGSCESEIVERALMRYCSDQFNLSRLLEGDDGTARRTAQLAVARQRASDIEAQIQRVTDALLSDDGKAPAAFTRRARELETQLEEQRREIEALEHQIAASSAHGIPAAAEAWAQLVDGVLALDYDARMKARQLVADTFRKIVVYQRGFAPIDDAAADRWKRSGTIGLMLVTKRGGMRLLNVDRRTGCWQAEDDLDPSLIPSDGLPMLPLDA

SEQ ID NO: 7096 - protein, 644 aa, synthetic construct
MFNFDKSKYKGICVPYARFSTDVQDEIGRKSLERQIEEAKRFSNEYGLFFDEDIAFVDRGVSGFALSGDTAKTFQKGQMQLMLELLEEIDVAEREFIYITFHNFDRFSRMSPDVASRYFEQILDKGFNIVTTIDNEVYKRNSGNLEQMIISIIHMSTAYYESEVKSIYISDSRQRKRDVIEYLYNDETQKGKHRHVGIKACCPRWIKTKDIIYEYVGKDGSVKKEALKRFEIDEERAQIINYIFDLKIQGLGNGKICQVLNEQNIPVFHSGKYTKAKYWNLSTISNYLKNENVIGHSYLYHKAKEEVFNEKTQTFSTKRVRKIATDKLYNYYPPIMSEEKFNQAKEAVKANSVKVDRSKVSEKPHMFSNLMRCSCGTRLHYKLTKKNNVKKVDDYFEYLKCERSALNDGCEGENINYKNFEAQFINFIRYIDVNEILDHANGVEGETQGLTELEEREAAINLKITGLTKTYQGLINAGVDGSDVLVELEKAKGELQEVEFEKSKLLNSMKSQTSSSSESIKQKKSALKSKVFAEKVEARKVVNERLKQKIRWMEVYATAYAKFVIVCFVDNVIRTYAYQDEFATDLMFNTIKINTDGLKGYEADELMVLMIKTVRESLAGMNEVITNTDLKIKLAAVKSEYMSK

SEQ ID NO: 7097 - protein, 664 aa, synthetic construct
MFSFDKSKFKGICVPYARFSTKGQSKIGKKSLERQIEEARRYAKSNNLYINEDLIFADKGISGFAQQGNIAKAFKKGQMQVMLALLEEVPYQEREFIYVTFHNFDRFSRMSPKQARTYFDLILQKGFNVVTTIDNQLYTRHDKDLGKMLISTIKMTTAWEESQVKSIYIKDALARKKMVVEYLYNHPSQKGKYKHIGVVQPNMPRWIDHEKIELTYTDESGSKRTDSFKKFTLNKEKTKIVNYIFDLKIQGLGYARICRRLNEEGIPTFDQGKHRIAKKWHIFAVQNLICNEMVLGHITLHTHNEEEYMCEIDKVFKKRKIKQTATDKLYNYYPAAVSEAKYLEAHKNTIQQDKPKKLGRIGERTNIFAQILLCECGGTLQYRRTKKNKKKSESVSVNEYLQCNNAFVNHKCNSQTINYTLLETAFFRYVNNIDFKKICSTTNSKHALKIIDLDTDIKELTDEVESLKLREAGLAKTYMSLASAGLDGSTALIDREKTKKEIAEKVLELESLELKKKGLEIEADKDNREFVDINDYMMNKDNYSSDEKIIIRKKINDFLHSKIEWMEVVSTERQKFVIIAFHDTVIRTFAFDDRCANDLMFNEIDVDLSGLNRVQASNLMFTLIKAIRNSLKGVEAVITKADLISYLQHIKQDYLNNIGEQASV

SEQ ID NO: 7098 - protein, 470 aa, synthetic construct
MESGYIEAGSVLLVESLDRVSRQDIDTAGEQLRKILRSGVEVVTLVDNEWYTKESLKDSLSMIKAMLVMERAHEESAMKSTRLRSMWAAKRERAANGEIMSKRCAAWLKVSEDRSHFEFIPENVKAVQRVFQLRLEGLSHVKIAKQMNDEGFSTLNQFKSVTGGWSQSSVTELLSNRSVIGFKVPSKSMAVKGVSEIPNYYPSIITDEQFYAVQQLKQGSGRKPSSDLPLLTNLFKGVLRCSECGFIMVVAGVSAKRSGIYKCSMKSEGRCNSVGFSRLQTDRALVQGLLYNTNRLSLNRDNGSAIGSLQSDLEKLHKQRERLIKLAMLADDTESMAKDLKALNSQIKDAEKAVSEVHQREQSSQLETISHLDLTVKKDRIEAQIIIKRIVKEIRLNTARKKCDVFLHNGLRLLNFPLDRVVDGAQWLEVLPLIDGDEFDFEGFITKPRHVALEEAPEWVKEMEEQSNQP

SEQ ID NO: 7099 - protein, 526 aa, synthetic construct
MRQVITYLRFSSKPQERGDSIRRQKGLFERWLKDNPDAKVVDEFSDEGASAYHGHHLKGDFGRMLQNIQDGRYLSGQTVLLVESETRLNRQKARNTESLVDLITGKGVDVICLESGKIYTSTNIDDLDTSIQLKIAAHIAHQQSKEKSIKVSAAWEHRAQLALEGKQQLTKNVPGWIDPDTRKLNEHSSTVVTIFDLLLSGESLHNIARYLQANNIKSFSRREKANGFSVHSVRTILRSESTVGTLAASKRNDRPAIPNYYEPAIDIATFNKAQEILSKNRVGRAPASDNPITINLFKGIIRCQCGASVHPTGVKATYQGVYRCNNVPDGRCNVPTIKRKPFDKWMLDNIVGFLERSDGNNTDKRKAEIEYQISLVTSKLKKAATLLLELDDVTELKEQVKELNIQRSNMQSELDELNQRETLSDKPLHHLSEIDLTTKAGRVEAQLILSKFVQSIELQREMIIITLRNGTVIGKSRDLSPVLSQDLMKQVVSSSSPRDIDMFSVITSDEEFRKSGKALIKRTSYR

SEQ ID NO: 7100 - protein, 452 aa, synthetic construct
MKAAIYIRVSTQEQIENYSIQAQTEKLTALCRSKDWDVYDIFIDGGYSGSNMNRPALNEMLSKLHEIDAVVVYRLDRLSRSQRDTITLIEEYFLKNNVEFVSLSETLDTSSPFGRAMIGILSVFAQLERETIRDRMVMGKIKRVESGLPLTTAKGRTYGYDVVDTKLYINEEEAKHLQLIYDIFEEEKSITFLQKRLKKLGFKVKSYSSYNKWLMNDLYIGYVSYSDKVHAKGIHEPIISEDQFYRVQEIFSRMGKNPNMNKESSSLLNNLIVCEKCGLGYVHRAKDTVSRGKKYHYRYYSCKTYKHTHELEKCGNKIWRADKLEEIIISRVKNYSFATRNLDKEDELDSITEKLKTEHSKKKRLFDLYINGSYEVAELDKMMADIDAQINYYDSQIEANKELKRNKKVQESLAELATVDFDSLEFREKQIYLKSIINKIYIDGEQVTIEWI

SEQ ID NO: 7101 - protein, 508 aa, synthetic construct
MKKAIAYMRFSSPGQMSGDSLNRQRRLIAEWLKVNSDYYLDTITYEDLGLSAFKGKHAQSGAFSEFLDAIEHGYILPGTTLLVESLDRLSREKVGEAIERLKLILNHGIDVITLCDNTVYNIDSLNEPYSLIKAILIAQRANEESEIKSSRVKLSWKKKRQDALESGTIMTASCPRWLSLDDKRTAFVPDPDRVKTIELIFKLRMERRSLNAIAKYLNDHAVKNFSGKESAWGPSVIEKLLANKALIGICVPSYRARGKGISEIAGYYPRVISDDLFYAVQEIRLAPFGISNSSKNPMLINLLRTVMKCEACGNTMIVHAVSGSLHGYYVCPMRRLHRCDRPSIKRDLVDYNIINELLFNCSKIQPVENKKDANETLELKIIELQMKINNLIAALSVAPEVTAIAEKIRVLDKELRRASVSLKTLKSKAVSSLGDFHAIDLNSKNGRELCRTLAYKTFEKIIINTDNKTCDIYFMNGIVFKHYPLMKTISAQQAISTLKYMVDGEVYF

SEQ ID NO: 7102 - protein, 505 aa, synthetic construct
MTLAFSYVRFSTKHQASGTSLERQVNASKLFCSQNGLTLSNQSYHDLGISGFKNVRRPELEQMLEAIQTGDIPSGSYILIEAIDRLSRKGISHTQDILKKILQYDVKVAFVGEDAKTLQGHILNKDSLNDLSSVILVALAADLAHKESLRKSKLVKASKAIAREKAADGEILPGKSVFYLDYDKKNKKYVFNKRVDLARKIIQMRLEGKGPRKIARLLNEENIPGPTGKQWYQMSVKRLLKSPVLYGAYQTHQIIEEKYIPVSLIENYYPALIDYQTFSQIQFDDKRVSKGRPSRHKFSGVLYCECGAVLCRKVNTSVTKKGIKEYQYFNCFGSFEGRCKNNKAIRDLHIPLEKAIDKLQIKTRSVKNIKNEQIIAKREKIDQLNKMLLELEMPPVSVLKTISTLEKELQELLEQPDVQPPKSADVKTLVAIKDAEQYNLYLKRLVKRITIFQLNGPKNIRIKIEKTDGHYQSFIVNNGKIMFNADTKALQEHLRKLKEGTSDED

SEQ ID NO: 7103 - protein, 488 aa, synthetic construct
MKLVIKLNYAVYVRVSTDKDEQVSSVENQIDICRYWLEKNGYEWDDSAVYFDDGISGTAWLERHAMQLILEKARKKELDTVVFKSIHRLARDLKDALAIKEILIGHGIRMVTIEENYDSLYEGKNDMKFEMYAMFASQLPKTLSVSVSAALTAKIRRGEHTGIIPFGYDRVDKKLVINEEEAKIVREIFELQEKQIGYKTISKYLNEKGIRTKAGNNWSGTTIKHILTNSLYKGEYIMNQYGYVKVDGRKKRIINPKEKWTIFEDHHPAIIPKEQWDHVNNLGDEKRTRTKVDKKNEFRGIVYCAHCDSAIRAVYSGRYSRGEKKEWVYMKCARYKRYGTCVNHVPIQYHELREVILSMLKDKEKELNIQFSPQNEKKHKEKMQKVKKEIQQLKMKKDKLIELYIEGLIGKEAFVQRDKKFEGEIKEKELQLIKLSDVKAQSNEQKEVKKAFALLQEEQDLHETLKILVKKISLYKDKRMQIKYTFDI

SEQ ID NO: 7104 - protein, 531 aa, synthetic construct
MSIAYSYIRFSSAQQAQGDSLRRQTQLAQRYCEENNLTLSDTNFQDLGVSAFHSDNVKEDSGLGQFLEALEQGAIPEGSYLLVESLDRLSRAKVQTALIQMLRITQLGVKIVTLMDNRLYDKDLDTTDLIISLTIMERAHNESKTKSERIKAAWTNKRQNPNTTNRHSSAPFWLTLNSDKRTYTINEEYAELVRKIYQLSIDGWGVIKIVRYLNQNGITAPKGASWATTTVNRILNSKAALGHYEPTQNRKSLNTLIEDYYPPIIDEKTYYLSQQRKFERSKPEAAGRKTEYPNPLNQIAKCKKCGSSMYYENKSQSLKYLTCREFKKKNCTNKPIRMELIYRFIYEVFNSPMYHQQHAKLVDKSKQKDVNKLTELEGRYEVERKAYEGLLEAFSSFSDPIALKELQRRSALITGLYKQIEEAKAKKTVEQARTAHINFTEALKLTTKALYSPLVEERGEELSPDELFTTRVRLNRILKQAFNHLSIFHCNESKRITIETEITEDYPIDLRYETNQKAIKEPMKNRIWSVY

SEQ ID NO: 7105 - protein, 507 aa, synthetic construct
MKRVISYIRFSSEKQSRGDSLRRQSKMVNDWLKAHPEYHLDQDLSFRDLGVSGFTGKHLKGGLGDFLTAIEKGLVKAGDTLLIESLDRLSRQAVDRASELLRNILRSGVDVVTLSDGEHYTRESLRDPLALIKSILIMQRAHEESLRKAERIQAAWDAKKEAAKAGIKVSKRCPAWLKLNDDRKSFSVIPEKVETVKRCFQLRLEGKSIWEIVRTLNDEGHQTLNQYKAGKFGQTSVQDLLKNRSVIGYFTPKGCEEISGYYPAIIDETTFYKVQQLSYARYGRKPASDKPLSVNLFKGVIRCSECGHALIITGFSDTRSGIYRCPLRNENRCSAKGLSRKQTDGTLLALLSRLDRFDSDTTNTVDTLKLHREHISSNIEKLVQLSLEIEDLSAITSKLKQLKGELSQVDADIEKETQRLKSIDVGCLSDCDLTTKAGRIEAQLIIKSAVKEVVLNTAKRRCKVTFHNGKVIDLPITENPSEDVTEAIQSLSEVTERGLIDVDEVII

SEQ ID NO: 7106 - protein, 507 aa, synthetic construct
MKRVISYIRFSSEKQSRGDSLRRQSKMVTDWLKAHPEYYLDQDLSFRDLGVSGFTGKHLKGGLGDFLTAIEKGLVKAGDTLLIESLDRLSRQDVDQASELLRNILRSGVDVVTLSDGEHYTKESLRDPLSLIKSILIMQRAHEESLRKAERIQAAWDAKKEAAKAGIKISRRCPAWLKLNDDRKSFSVIPEKVETVRRCFQLRLEGKSIWEIVRTLNDEGHQTLNQYKAGKFGQTSVQDLLKNRSVIGYFTPKGCEEIAGYFPPIIPETDFYKVQQLSYSRYGRKPASDKPLSVNLFKGVIRCSECGHALIITGFSDTRNGIYRCPLRNENRCSAKGLSRKQTDGTLLTLLSRLDRFDSDMTNTIDTLKLHREHISSNIEKLVQLSLEIEDLSAITSKLKQLKGELSQVDADIEKETQRLKSIDVGCLSDCDLSTKAGRIEAQLIIKSAVKEVVLNTAKRRCKVTFHNGKVIDLSITENPSEDVTEAIQSLSEVTEKGLIDVDVVEI

SEQ ID NO: 7107 - protein, 540 aa, synthetic construct
MKQPYNTTIYNTALYLRLSRDDELQGESGSIQTQRMMLRQYAAEHGLTVVDEYIDDGWSGTNFERPSFQRMIDDIEDGKINCVVTKDLSRLGRNYILTGQYTEIYFPSKGVRYIAINDNVDTINGESELAPFLNILNEMHARQTSKKVKAAMHTRFANGAHYGAYAPLGYVKDPDKKGHLLIDPETRWIVEKIFDLAVHGRGAASITRILVEEKVPTPGWLNYERYGTFANIYTGAPPEKAYAWTIAQVKSILKEETYIGHSVHNKQSNISFKNKKKVRKPQEEWYRVENTHEAIISEEVFQKVQELIASRRRRQKNGTTQIFSGLVKCADCGWSLAYGVNSQNKNPYAHYHCSKYGQGLRQCSMHYIRYDVLYAYVLARLQYWSMLAQKDEDKLLKRLLNASDRERNSAKKKQAAELKKAEKRKAEVDGLFAKMYEDWSAGRITEYNFNMLSEKYQNEQRELETKIRQLHETMEAAVQTAADAEKWIALMKQYVNPVELTAELLNTLIEKITVHEAVKGEDGSREQEVEIYYRFIGKID

SEQ ID NO: 7108 - protein, 507 aa, synthetic construct
MKRAISYIRFSSEKQAKGDSLRRQSKMVTDWLKAHPEYYLDESLTFRDLGVSGFTGKHLKGGLGDFLTAIEKGLVKAGDTLLIESLDRLSRQDVDQASELLRNILRSGVDVVTLSDGEHYTSESLKDPLALIKSILIMQRAHEESLRKSERIQAAWDAKKEAAKAGIKVSKRCPAWLRLNDDRKSFSVIPEKVETVKRCFQLRLEGKSIWEIVRTLNDEGHQSMSQYKPGKFGQTSVQDLLKNRSVIGYFTPKGCEEIAGYYPAIIDETTFYKVQQLSHYRYGRKPVSDKPLSVNLFKGVIRCSECGHALIITGFSDTRNGIYRCPLRNENRCSAKGLSRKQTDGTLLTLLSRLDRFDSDTTNIIDMLRLHREHVSSNIEKLVQLSLEIEDLNAITSKLKQLKGELSQVDADIEKETQRLKSIDVGCLSDCDLTTKAGRIEAQLIIKSAVKEVVLNTAKRRCKVTFHNGRAITLPITENPSEDVTEAIQSLSEVTERGLIDVDEVII

SEQ ID NO: 7109 - protein, 488 aa, synthetic construct
MRIAIYTRKSVYVENSESIKTQINLCKTYFKGDNEYEIFEDEGYSGKNINRPAFKRLILECKMNKFDALICYRLDRISRNVADFSSTLELLQKYNVTFISIKEQFDTSTPMGRAMIYIASVFAQLERETIAERVKDNMLQLARKGYYTGGTVPKGCKIIKENKKSCLQIIDSDLIHSYFNSYLDNGSLFLGYKFLKEKGITISREGYRKVLRNPIYVKSSKEVTNYLKSKGYEVIGQVDNKSGYMTYGKINNTPIAIVGKHIGVLDSNIWLKVQMQLDERKEQFKNTSEVNFLSSVLKCPYCGGYYQLSQSNKVRYYVCQNRINRTKTGIDKSKEKCKNKKYIKADLLEEKISQFLKQLENKDIFKKLFSDPKEGRESNISNLEKQLNKNNNAINGLVEKVALLSTEASKIFIEKIEELTQRNNEIKNKIEIEKLLEMQKKANDTSSEFIYNKIIEFNKLKSTKEKNRILKLIFTNLQYDPYKNKITI

SEQ ID NO: 7110 - protein, 529 aa, synthetic construct
MRKVYSYMRFSRPEQAKGTSIERQSNFAEQYALEHGLELDKSLTMMDKGLSAFHGVHKTKGAFGQFLAAVTAGKVPSGSVLVVESLDRLSREDPLIAQAALTDLILSGITVVTAADNQVYSREEIQQNPFKLIMSLVVMIRANEESETKQRRSNAFLKSALNQYQANGKIRRLGSDPSWLDFNKDNDTYSFNERVEVIRRILNLYNKGIGSLKIARQLTEESIPTLSGKRSAWGQTTVANIVKSHALYGMKRINVQSVEYDLEDFYPALITKSKWLALQQHRTKRSKSMHGRGEVVHLITGHGKGFTTCGYCGGGLGAQTQKQYKRSGEYSRTVTRLHCLTHKETSSCCSSVFLEPIESAVLFAACIGVEPQSLVPTVNNVNYSALIDEVENKVKHIVEQVTAGAPWDLFKDAHDKLKLEKQKLIKERDSQKPDVNQSDVQKWVNKLVELADKARANDKEARLKCRTLINSICKSIVIKLRGHDLKSEPVVTITFVTDEQFEFKVGKNGAVQFVDNGMAVNRRLKPLLA

SEQ ID NO: 7111 - protein, 573 aa, synthetic construct
MKVAAYVRVSSYNQKQTGDSISGQKEYIKNWAYLTGNEIIKWYIDESASAFRDLRRYNFNLMLQDIENPNSEIEAIVVYSLSRFSRNLENQLTAQNLLETYNVRLISASEGIPDDHNTARLHTSFLGILNEHYSRQNSAVVTDRLQDTARKGYFCGGPIPLGYRSVEIEGDTSKKRKVLAVNDDEAPIVKEIFSLAEKGIDGKPMGVKAISIYMNNKGVLNRGKRWNRNSIDRVLTRRDYFGEHIHGKNRDPRKGLEPIIVNVPAIINKDQFFNVQDGLKSRELKNNENKCYRSDSLLVGMLKCSICNSNMVVVSGKGGKYKYYECSKKIRQDVKSCSSKMLPKPLIDNAVRRLLSERVITEENINYIYKDLKSRIRNLVEKSARNVASINRRINNNNFKVNNIIEQIASRQLEPNAQINKYITDKRNELESLNRELVTALKGTKLPIKQFGQTQVAQLVKNLKEIVLTGDEARVKQILLILLKEVEITPQKKISILGFNMALVFLASHAKTGTDFSVPVIDTIWRRDRDLNPRYAINVCRFSRPVLSTTQPSLRCGTYNREWSSRCKALNYN

SEQ ID NO: 7112 - protein, 576 aa, synthetic construct
MPIAYSYVRFSTPEQMLGDSQRRQLDMALDYCARNGLELSNRSFRDLGISGFKGKSRPSLQELLDCIKMGIIKPGDYILIETFDRLSRQGVDATHQLIRTILLSKVVVVSLQDNLVLTESSLNNTADIIRIAIAADLANQESQRKSIRVKAARDNARRLAAEGKPSLISTNLPFWLSLDGKKIVINEDKAALVNRIFDMSKDGHGFTRIVTTLNRENIPAPKATLWAKSTISRLLSNRAVLGELQPYIMEGDRRVKDTKTGVITNYYPQVVSDEKFLAVQVAKKDRRTYQSGNRSKKLVFSNVLQQFAKCGKCGSTMEFVDKGKPPKGGQYLTCSLAKRGGACKQNKHFKYQTIERSLYNLFFDGTISFEKSDSGQKANLLNQLEYQLDNLKKGYSSFLESGVDFTMKEVIAAAKKQEASIKELEIKVQDLRWEVTSSDLDDVQFTVENLKKLMDNVKENFQLRSKFNLALIKKFGTCSIQEIQGYIRINLGDDGATFISPDSKWLIPFYTGYLPMPMIASGSKLATSIDGEEMKKQIYKFFDFMNEVFPDTKDSFQANKIKCLNAVNQYVSNGML

SEQ ID NO: 7113 - protein, 506 aa, synthetic construct
MRSVITYLRFSSAIQGAEGADSTRRQNDLFKQWLKKNSDAQVVASFSDEGLSGYKGKHLTGQFGDMLARIEAGEFSEGTVLLVEAIDRIGRLEHLETEALMNRIIAHGIEIHTLQDGLIYTRDALSDDLGISIIQRVKSYVAHQESKQKSFRVSQKWKQRAKLALAGEQRLTKMVPGWIDPDTFKCNEHAETVRLIFKLLLDGESLHNIARHLQSNDIKSFSRRKDANGFSVHSVRTVLRSESVIGTLPASQRNDRPAIPNYYEAAIDAATFNKAQEILDKNRKGRTPASDNPLTINIFKGLFRCQCGASVHPTGTKNKYAGVYRCNNNPDGRCDVPPLKRKPFDKWMLENFLGMIDVGNDGEAEGKIASLQHEVEIVTTRIKKATALLLEMDDITELKAQVKELNQKRTELQTTIDSMRRKTSLTDKELPQLKDIDLTTKAGRVECQLILSKHLKGLTLGKDSVIVTLQNDTEITIPTNPLPLNDGTSIFEIAEKELLEIDAYQL

SEQ ID NO: 7114 - protein, 515 aa, synthetic construct
MTKAYSYIRFSTKGQIEGRSLQRQLETARKYAEENGLELQSLSFQDLGVSGFKGRNSEQGALSQFIEAVKEGTIPEGSWLLLESFDRMSRQPVEKSMRLLMELVELGIIVVTLMDKQVYRRGQLDMTKLIISLVIMSRAHEESAAKSKRLADVWHAKQAVAHLKPLGTHLPAWLEYNEDKTKIQINYEKAVVVHYIFELSANGYGRSALIRKLNSQGIAPIGSRAKRWHLSYVTKLLNNTAVLGEYIPHVTDKLGQRVPTGEVIENYYPPIIEKDLWLRAKAAAQSRKIRGTGAIRRGHTRNILSGMVSCECGSSMQFVNKGSSDKGGYYLVCSTARHGAGCQYIGHRYYSVQWVVLIALQKLLHTFANKADNHEKEMQLEGELVELDRKLNNLINDLEENGSSKYISAAIRKTEQRMDIVKNELLMLQSSKAVENDEVDLQEITLSLNENFERLRLHQYLKRHITNIVVYKNKERLEINLKTGEDIILTFIPSENLWQTNTGVSFSVTFDTRWG

SEQ ID NO: 7115 - protein, 579 aa, synthetic construct
MTKKKAVLYARVSTEKEEQEQSLEIQEEIIEQFCNDRGFNLIKPHYLEHGKSGTNMKNRPRFIEMMGDAGLKRVPSATKDTFFEDSGLSPIFDIIIVKEASRFSRNQTEALAVLKELKSKGVEVYFISTNTSTTDNNWEFDLGLYFNISQTESKNLSVRVKMSKRHNAEKGKYAPAIVPYGYKRIFDENGKKKIVKDDNEAQVVEYIFKQYIELGGHTIARLLNEQNILTKSGKIWSNDKITRLIQNPIYIGSPVVMKTKKINVTDTKRVPTTENERVTVKDAVEPIISIEDFNRVQSIRADRTTTATVKKRGQHKSKTDIFSGKLYCANCGAKYVRHIGEGKKINYMCQTRRKHGLEKCQSKGIAFNLIMQGLDDCKLFFNGLGNHVQLIAINEGIQKLNVKNIEIKERIMADIDKIKEDERNTFLFMRGLDKFSRTYELANEELETLNLKRIDLEEQISLLKVETIQRFIAKVKQKENAIYEARKMEMNEQDLKLLQLHKVVIDDDSVKYYYTVQAFDEEIEEFNRTFGDLVEPISFQSEEHYEERFQRDFRKLISRAEEQEMMQEQYEAMEDLGLI

SEQ ID NO: 7116 - protein, 545 aa, synthetic construct
MNKYHLYQRVSKQIQAEEGQGIQRQEQACEHWISDYNKRLLSEGKSVYSKGLIYEDRGKSAYTAANFKRGELGALINDIENGKIEKGDLIVIELIDRFSRANVDFVRSQFQRVLDAGVKIAITKWNLVFEENMESVSSVTGRILLEIGMYLAYQESSQKSSRIKASRKLLEDSGRKSIAKPPFWLARNLDLKSYTIIEENAEIIRKIFDLKLNFNYGPQKIIKSLGDLDIYRYSFDENGNLIKTTKNSPLSESSINAYIRNTNVIGKLDGKDYYPRIIDDRTFYAVQKRTRENTGGVGEIFRNVFVGVGKCGCLIRKENENGCGSLAKCGYIMAFSSRKVKNPTKGMYLKCNRKRKSTKCDSENINYYLAQNKIYNVLKSLKFDIDQSVDISHLEEKINAIDKSMSKIREYMTQYSDDEEWENQYNIKRMEREKIENEIKASKSRITGKLSNLDIDFSKEKDRVLFNQFLKDNRITVYFTKERMEIIIGSLNNFSIKCGYDDSNRDIDHIIESYSKNGLVGIEEKAGKSEGKGLLRFNLPTVPGS

SEQ ID NO: 7117 - protein, 559 aa, synthetic construct
MKTKLYSYIRFSSMRQNDGSSYERQIRMAREIAVKYDLELVNDYQDLGVSAFKGANSKTGALSRFLDAIGRSVPVGSWLFIENLDRLSRADIVSAQELFLSIIRRGITIVTGMDNKIYSLDTVTANPMDLMFSILLFIRGNEESQTKRNRTNSSALIKIKAHQEHPQNPAVAIEEIGKNMWWTDTTSGYVLPHPVFFPIVQEVVELRRNGRSTAEILDHLNATYTPPPAASHKRHSNWSRAMIERLFHTRALIGIKEISVDGVKYELKDYYPRVLDDAEFYHLKKSIGVRACNFGDKEEAKPIPLLSGVGLLKCEHCGSAMVKVKGTNRRPNQYRYSCDAMRSSRIECVHTNWSFRGDQLEKAVLQLLADKIWIAEDKANPVPALKVQIDEISRKIDNLITLSAMTGATKELADQITTLNSERETLYNQLKMAEEEMYSVDSQGWEKLAEFDLEDVYNEDRIKVRFKIKQALKRIGCSRIDKYKNLFVLEYIDGKTQRVVIENSRGPRKGRIFVDLKTINDRQILESNGLVLHPCLDMLTDKNWKPEEEIPGPLQEFGI

SEQ ID NO: 7118 - protein, 547 aa, synthetic construct
MKLLVTYIRWSTKEQDSGDSLRRQTNLIDAFYSKHKNDYYLLPAHRYVDKGKSGFHQQHKNQGSDFRRMFENVMSGVIPEGSLIVVENFDRFSRADIDTAIDDVRQILRKGVSILTLGDGELYDKSALTDPVKLIKHIIIAERAHQESLVKQKRIAQVWNHKTQLARELKKPMGKQAPGWLELSEDGSHYIVDEDKASLVNIIYDKRLSGMSMFAICKWLNEQGYPTINQRKVRISKTKKPDSNWSALSVKHILTSRSVLGYLPAKISSEDRKTVLREEIEGFYPQIVTDSKFYAVQQLLEETGKGKTSSGDHWLYVNILKGIIRCKCGLVMTPTGIRKPVYQGTYRCNGNKESRCSYGTVSRKLLDTQLCSRLFSKLSQLHDEATDTAKLDELQRRLNTVDSELEKLTETLIQLPNITQIQEALRVKQEEKDEMIVQLSREKARVKSVSSLDLSGLDMESVEGRTEAQIIIKRLVKEIVVSGNEKLVDIYLHNGNMIRGFPLDGKDDHTLTLEEATDEMQPLDDMLIFGEPVTRIYPAGDMEEVDA

SEQ ID NO: 7119 - protein, 502 aa, synthetic construct
MNKICIYLRKSRADEELEKTLGEGETLSKHRKALLKFAKEKKLNIVEIKEEIVSGESLFFRPKMLELLKEVENKQYTGVLVMDMQRLGRGNMQDQGIILETFKKSNTKIITPMKTYDLSDDFDEEYTEFEAFMSRKELKMINRRMQGGRVRSVEDGNYIATNPPLGYDIHWIKKSRTLKINPHECEIIKLIFKLYTEGNGAGSIAEHLNNLGYKTKFNNNFSRSSVLFILKNPIYIGKVTWKKKEIKKSKNPNKVKDTRTRDKSEWIVVDGKHEPMISMKMWNKAQEILNNKYHIPYQLVNGPANPLAGIVICSKCKFKMVMRKLKGVDRLLCRNNKCDNISNRYDSTEKAIVQALERYLKEYRINISNRNKTSDIKPYERQINILEKELAALNEQKLKLFDFLERGIYDENTFLERSKNIEERITKTSLGIEKINDIINKEKKVVKEEDVIKFQKLLDGYKNTDDIKLKNELMKKLVNKVEYTKNKRGETFGIDIFPKLKP

SEQ ID NO: 7120 - protein, 494 aa, synthetic construct
MRAVAYARFSSDNQREESIEAQIMDIKKYALKNNITVLREYVDEAISGRTFERKSFKRMIEDAKKNMFDLILVHKVDRFARNRYDAAIYKSILKKHNIKIKYVMQPIDDSPEGNLMEGILESFAEYYSENLANEVMKGLKINAKKAQFNGGYPPLGYDIAEDKTYIINEREARIVREIFDLYLDGIGYKKIADILNNKGYKNKRGKPFVFNSIPTILKNDKYCGIYTYNKTSRKYKNGRRNLKKYNKDEDIIRVEDGIPKIISKEKFNTAQQEIKKRTKSRGKKIAVREYILSGLIKCECERKMSGYAQKRSKESNRYFYYRCTGCNNSIRAEKIETIATNFIKEQVFRDIDNLIIKIHKYIADQEAESPSELKYLKNELSNSNNQINNIVKMISNGVTSMHLAKKLEELETYIDGIQQRIGEINRMSVIPEDEIKNWLLELKNSFDNGKNIKKIISVFIKNIEITKEDINIDFFVKAPYKGANSLSVAPSAPY

SEQ ID NO: 7121 - protein, 502 aa, synthetic construct
MNKICIYLRKSRADEELEKTLGEGETLSKHRKALLKFAKEKKLNIVEIKEEIVSGESLFFRPKMLELLKEVENKQYTGVLVMDMQRLGRGNMQDQGIILETFKKSNTKIITPMKTYDLSDDFDEEYTEFEAFMSRKELKMINRRMQGGRVRSVEDGNYIATNPPLGYDIHWIKKSRTLKINTHECEIIKLIFKLYTEGNGAGSIAEHLNNLGYKTKFNNNFSRSSVLFILKNPIYIGKVTWKKKEIKKSKNPNKVKDTRTRDKSEWIVVDGKHEPIISMKIWNKAQEILNNKYHIPYQLVNGPANPLAGIVICSKCKFKMVMRKLKGIDRLLCRNNKCNNISNRYDSTEKAIVQALERYLNEYRINISNKNKTSNIKPYERQINILEKELAALNEQKLKLFDFLERGIYDENTFLERSKNIEKRITKTSSGIEKINDIINKEKKVVKEEDVIKFQKLLDGYKNTDDIKLKNELMKKLVNKVEYTKDKRGETFGIDIFPKLKP

SEQ ID NO: 7122 - protein, 429 aa, synthetic construct
MRVRIIEPTLKTQKIKKKVCAYARVSTDSEKQEESLENQIQYYENLISTNPEYEFIGVFADGGITGTTEERSEFQSMMNFCRQGKIDLIVTKSISRFARNTAIVLETVRQLKLLNIEVRFEKENVNTLSGDGELMLTVLSSFAQEESKNVSDNIKWRMRKKFQQGEMIINTKRFLGYDKDEYGDLVINPKEAEVVKRIFNEYLNGKGCFTIAKGLREEGVPTVAGGTWRDSTILRILKNEKYKGDALLQKYYTSDHLRKKKVKNNGEVESYYIEDDHVPIVSREAWETVQEEIKKRAKKKGIISEDTKKYKRRYPLTGMLYCSKCGSSLRRRTWNTKHSCKKIVWQCSNYVKNGKNACRGTSIDDEVISKLNIKEETVVKEEFRNGKKYYSYTSKIQQNQHSTIGKVTEKENGCILQGINRPSRTVIKL

SEQ ID NO: 7123 - protein, 443 aa, synthetic construct
MAAYCRVSTDQAEQLSSYEAQVNYYTNFINNSSEYEMVKVYADEGISGTNTKKREQFNEMIKDCKAGKIDVIITKSISRFARNTLDCLNYVRTLKELGIGVVFEKENINTLDGKGEVLISILASLAQDESRSISENSTWGIRRRFEQGKLHINHKKFLGYTKDEEGNLIIDEKQAKIVRRIYKDYLDGKGTNRIAKELEEEGVKGWNGKAKWYESTIRGILTNEKYKGDALLQKTYTVDFLTKKRAENNGEVPQYYVEESHPAIIDKEMWEAVQLEMERRRIFAKEHDIVKVDYATITNPFAGKIICGHCGSVFGRKVWNSTNELRRRIVWRCNRRYIKKGKKGCNNKHIDDKVLYQAFIDTFNAMIENKDYFMEKWKEHLKSDNVLVRYKAKQFMAILKNAKPIKEFDEDLFFKIVEKMTVFDGEKIIVSLLDGTEIEVVIE

SEQ ID NO: 7124 - protein, 507 aa, synthetic construct
MKRVISYIRFSSERQAKGDSLRRQSKMVNDWLKAHPEYYLDQDLSFRDLGVSGFTGKHLKGGLGDFLTAIEKGLVKAGDTLLIESLDRLSRQDIDIASELLRRILRAGVDVVTLSDGEHYTSESLKDPLALIKSILIMQRAHEESLRKAERIQAAWNRKKELISEGIKVSKRCPAWLKLNDDRKSFSVIPEKVETVKRCFQLRLEGKSIWEIVRTLNDEGHQTLNQYKAGKFGQTSVQDLLKNRSVIGYFTPKGCEEISGYYPAIIDETTFYKVQQLSHYRYGRKPVSDKPLSVNLFKGVIRCSECGHALIITGFSDTRNGIYRCPLRNENRCSAKGLSRKQTDGTLLTLLSRLDRFDSDTTNTIDTLKLHREHISSNIEKLVQLSLEIEDLSAITIKLRQLKGELSQVDADIEKETQRLKSIDVGCLSDCDLTTKAGRIEAQLIIKSAVKEVVLNTAKRRCKVTFHNGKVIDLPITEDPSEDVTEAIQSLSEVTERGLIDVDEVII

SEQ ID NO: 7125 - protein, 547 aa, synthetic construct
MKLLVTYIRWSTKEQDSGDSLRRQTNLIDAFYAKHKDDYYLLPAHRYVDKGKSGFHQQHKAQGSDFRRMFENVMSGAIPEGSLIVVENFDRFSRADIDTAIDDVRQILRKGVSILTLGDGELYDKSALTDPVKLIKHIIIAERAHQESLVKQKRIAQVWNHKTQLARELKKPMGKQAPGWLELSDDGSHYIVDEDKASLVNIIYDKRLSGMSMFAICKWLNEQGYPTINQRKVRISKTKKPDGNWSALSVKHILTSRSVLGYLPAKISTEDRKTVLREEIESFYPQIVTDSKFYAVQQLLEETGKGKTSSGEHWLYVNILKGLIRCKCGLVMTPTGIRKPVYQGTYRCNGNKESRCSYGTVSRKLLDTQLCSRLFSKLSQLHDEATDTAKLDELQRRLNTVDSELEKLTETLIQLPNITQIQEALRVKQEEKDELIVQLSREKARVKSVSSLDLSGLDMESVEGRTEAQIIIKRLVKEIVVSGNEKLVDIYLHNGNMIRGFPLDGKDDHTLTLEEATDEMQSLDDMLIFGEPVTRIYPAGDMEEVDA

SEQ ID NO: 7126 - protein, 466 aa, synthetic construct
MVREGKADALLVWKFDRWSRQGLSAVSALIEALDARPDALFIALQDGLNSDQPAWRIIASVLAEVARMEAENTSARVSSFVRHAKEVGRWHGGRAPVGYRSVPHPSGTGRALEPDPLAVELFTDAAKRIVAGEALYAVTQRLNSTELKPPSAAAWSIQTVRRALMGQSIVGRVSARVPGSAREERAFDVLRDDEGNPRQIWEPVLPLDLWRACRSTLEARNAASPLASRQRATFKRARLLSGLLVCAYCGGPMYAGITGEGVPRYSCAKRSKAQRCRPEGGGAPSVTAHKLEEYVESLYLKSFGSKPVVSPVMREVPAIALAEAREALATVSARLGNPDIDEDTAQRMIAQIPGLRHRVQELSAAGPPPAEVELVETGETIAELWSRADIEERRAFLSAAFVYITVANGKRGGKKFDPERFEIVPRPSPEQLGLVSDGNSNPRAVAWVRKRQEARRAASGAAGMSE

SEQ ID NO: 7127 - protein, 507 aa, synthetic construct
MKRVISYIRFSSEKQAKGDSLRRQSKMVTDWLKAHPEYYLDQDLSFRDLGVSGFTGKHLKGGLGDFLTAIEKGLVKAGDTLLIESLDRLSRQAVDRASELLRNILRSGVDVVTLSDGEHYTSESLKDPLALIKSILIMQRAHEESLRKSERIQAAWDAKKEAAKAGIKVSKRCPAWLKLNDDRKSFSVIPEKVATVKRCFQLRLEGKSIWEIVRTLNDEGHQTLNQYKPGKFGQTSVQDLLKNRSVIGYFTPKGREEIAGYFPPIIPETDFYKVQQLSYSRYGRKPASDKPLSVNLFKGVIRCSECGHALIITGFSDTRSGIYRCPLRNENRCSAKGLSRKQTDGTLLTLLSRLDRFDSDTTNTIDMLRLHREHISSNIEKLVQLSLEIEDLSAITSKLKQLKGELSQVDADIEKETQRLKSIDVGCLSDCDLTTKAGRIEAQLIIKSAVKEVVLNTAKRRCKVTFHNGRAITLPITEDPSENVTEAIQSLSEVTERGLIDVDEVII

SEQ ID NO: 7128 - protein, 638 aa, synthetic construct
MKPKLYSYVRFSSVKQREGNSLERQQDTALKIAARYNLELDTTAFHDLGMSAFKGRNAHEGKLSEFIKQIGVKVPVGSWLVVENLDRISRDDAWTALDIFKSILSKGIVVVTGMDEKVYKYADVKNNPTDLIISLLMFTRAHDESLTKKNRVEAQARSLIRYNLTRKAGTPAKAIESVGQNVWWVDTKSGYVTPHPMYFSAAQKIIELKQNGETLLGIQRYLNEHYPAPKKRIYKDQTGQALKPKTEQWGKHLIRTFLNPTVYGQKVFTLDKRDESGVVIYDPDSEQPLKETFVIPDYYPALISEIDYLTLSKLDRHRAVTRSSSKYPEGNPEPEIPLLSGIGILFCGKCGSFMFKSGSNENKYRYICGSKIVQGKPCGKKGFTSYQLEHTILQLIADHVWNNHQEDKTAWYESEIEKTSESIDKLLKLAALTDSLEELAEQIRSYKHKKATLEREFQQYKISRSEIQTTGWDQFRNFDVHDTKNPDRKRIRLKIKQAIKRINCYDIDGRHGHFEVTFADETKQRIVIKFNRNRSPGVSYVEAQTVNDHDLLKMQGFVMHSFIDELISPDKFAQQIKDKHEVSILNPTFITKLEDGVNRDEGNGLAIKVDGTTSKSYATVNGIKYEINSLEDLEKLSQ

SEQ ID NO: 7129 - protein, 630 aa, synthetic construct
MPQLYSYIRWSTDRQDKGTTRNRQLAAAKVYAAEAGLEMVEIEDPGVSAFRGKNTNTGKLGDFIDAVKQGAIASDSWLYVENLDRITRQNVTTAQKLFIELLELGLTLVTGMDKRVYTLDSVNKNPTELMISLLLFSRANEESETKSNRTIGNVVALVERHQAGLPVNIKSVGRHPFWIDDSGSQYEAVKEHPVYWSIAREAIDMFLDGNGIYTVKRYLDEKYPNGLKGKEWDYQVLKKMRDNRALIGERTINVGGATYKLDNYYPWLCKDEAEFLTLAERKQQNNYKAKKDKTEEIKLLSGLQVLRCSKCGGTMHSFMNHGSARYICTNGVHLQKNCSGWSISAQLVEQCTIISLLIGYMDKSRKDGIDTTAIEEEISRKEILITDLESRIANMAQAIAIAPDVSALAVQLNTFDLERKKTVLEVDKLKERLHSLKGKGSLEVDITDFLMLIQWSVFTNMEDADRNKIRKIISSIIESIIVEKADGCITIKIKCHHKDEWLVFGGVNRKPFWAFTIEYSTNDAKEIEGGDSSNFVSNTLFQKAVEQLDSIKQSYLKLFETANTMLGVVGYSDIRGASFWPNTGQYERANVEYEGITYSIAMNGRVSKAITAALEATGLSRKDFIERYKV

SEQ ID NO: 7130 - protein, 678 aa, synthetic construct
MRNIPKIYNYARVSTTKQLKGVGLETQQQRSVLERLSQEYSLPIHDEDFVDEGLSAYHGSHKDGEFGVILSRIESGEIAHGSILVIFSLDRISREATNVAMAQLLDFINNGVRVYTHIDDKMYDSSSKHLFIDLMYSFLTMERANEESRTKSKRIIAAQKIALKHWKDTGKPQGALGRSPFWIDQPTNTLNINAEGVKKAVEMKLAGYGDLKIKQYLDANFEYKQTRTKGTVKQSNTWDYTAISQLWANRSLIGEKTFHIEGVSHVLENYYPPIIDEATFRKLKMCKSKKRGRNTSSGKIPLLKRLARCGICGGAMVFVDKGGDRVNYVCNLAMKGEHDQEVYNANMLDLLTLEICKDAYLVESDKTNNNAIENEKLKIEVELAIEHERRDELVTRYKAQKAMSFLDLLEDCESNISDLEAKLDAINNNNVVLSADELESLPEIFSGDVRTDYSHPERYAIRNNFYRFISSITLNRVVEPCSDAKTKYANCVDITWHFKNGQKRRLAMLPYQYLKADDGNKGLYLPFVYMYGSKSNIKVDDGDQFLSSIFKKLHAFDLTKCLFPSKGRYQWSQLSLECGKTYWASLDKAMFMEKGMEVIADTIRDNGGKNKVDGVTTNYLSLMFNYPSSEEFSYDYPDSTFVELACKFGFVADRDFSLFLQDNNFNRELYSSLDFLVS

SEQ ID NO: 7131 - protein, 540 aa, synthetic construct
MLRQTTQQLITALYPRLSHEDELQGESNSISNQKRILETYAKQNGFTNLRWYTDDGYSGANFQRPGFQAMLADIEAGKVGTVIVKDMSRLGRNYLQVGMYTEMIFPQKNVRFIAINDGVDSAQGENDFAPLRNIFNEWLVRDTSKKIKAVKRSKGMSGKPITSKPVYGYLMDEDENFIIDEEAAPVVRQIYSLCLAGNGPTKIARMLTEQQIPTPGTLEYRRTGSTRRYHPGYECKWATNTVAHILENREYTGCLVNFKTDKVSYKLKHSVENPPEKQAIFENHHEPIIDRETWERVQELRKQRKRPNRYDEVGLFSGILFCADCGSVMYQQRYQTDKRKQDCYICGSYKKRTRDCTAHFIRTDLLTAGVTENLRKITNYAAKHEARFMKLLVEQNEDGGRRRNAAKKKELETAQKRISELSAIFKRLYEDSVTGRISDERFSELSADYEAEQKELKERAAGLQEELSKVQEATENAEKFMKVVRKHTSFEELTPTLLREFVEKIVIHESVALDGKRRGKLRRQEIEIYYSFVGKVELPD

SEQ ID NO: 7132 - protein, 540 aa, synthetic construct
MSTSEQLRGFSLERQRKLIADFAAKNDLSLENSHVLEDIGHSAFSDDTQQKELTKFFEDLEKGKFQAGDVFALENIDRLTRRGPIDALMKVNAIISKGLKLAIISDKEQKILEEIDVYTIITLSIDATRANVESKNKSDKGLENWALKRELAASQGVAMTAQAPAWLDTQTFEVFDEEKRKDIKRRRYVLNPEKAETVKLIFELFQNGNGSLKIKNILNERKIPTFKNVEYWEPSIISKILRNPATFGLYQPKKQNTGKRDLIAACEPIEDYFPAIISRETFEQCQRIAATNTTRKGRKGKVFTNLFTGLLKCADCGGPVHLLNPGIDKRAKVPKSVNYIVCKKGKFTRECILKRLRYDDFEITLLKAIQEINLADILDENNPLDILTKKLRTIEIKIDKNKKLLENFQKSFIENDGALPSFMIDGAKQAELEIKNLLVEKSQTEVEVSQLNIYNSNIDNAVEELKANGTYETRSKINLLFHEIIKSIVIDFELNDYAIMFKNGAKRFINDGIIQNVFRTTDNKQRESELEEILKWKRIQ

SEQ ID NO: 7133 - protein, 559 aa, synthetic construct
MQRAAIYARYSSDLQNDASIEDQIRLCSERATAEDWTIQNCYTDAGISGASLMRPGIQSLMQAAMNGEFDVLLCEALDRLSRDQEDIAGIYKRMEFAGVKIITLSEGEISTLHIGLKGTMNAMFLKDLADKTRRGLRGKVENGKSGGGLAYGYKVVKKFDASGEAIKGYREIDEDQAKVICRIFSEYANDNKSPKAIASDLNDEGIPCPSGKAWGQSTIYGNRRRGTGIINNELYIGQLVWNRQRFLKDPRTGKRVARPNPESEWIRQDVPELRIVPQELWDAVKARQKALDALTGHLGAKKRPKYLLSGLLKCGVCGGGFAKINSERYGCASARNKGESVCNNKITVKRDYLEGKVLDALQTHLMRPALVELFCREYTKHMNEMIAAQHAEVKQHKSNMAKLAKEKQNIIEAIKRGIDPDLVKDELEALKAREADLEAKLEVSGHEPKPFIHPAMASRYHAEVKALTHALKESQAGQAAEHIRTLIEKVVLSPKADEDALQIDLYGDLAGILTIATEGNTMSGNEKRPVDGTANGSAIYRPSVQMVAGAGFEPTTLVM

SEQ ID NO: 7134 - protein, 552 aa, synthetic construct
MLGYTFHAPVDQKMTKKCFPYVRFSSTRQEDGSTRARQNELIDAFVTKHGLDVDRHLEDAGTSAHRGKNAGAEGVLGQFLRQVRMGEIDKGSYLLIENFDRLSRDKIVRSNKIFTDLLYAGIKIVILDKNKIYDAENLDFGDWISALVEFERANAESERKSDFSSKAWRFNREKMRNGEIVTKKVPTWLKVENNAFVIDHVKVERINTLFKLSLSKGLQEATREYNDLYSEKLAIHQTQYLLSNRKLIGEHSPQKIHYDESGQLKRKDEGEAIPNYYPAVVDEKLFYQVQEVIKSRRPFAGRYSGQRYNVFRDLILCSVCGGTMRYMNKGERDYFLCTNSMTGKCHIPAKLGQLSIRGKKLFGLFFAFTEGLNVSALLEENTQASTLKAETMKMEAKRNQITSRLEDFKAEVKTMILDGKIIPSTYNELISDLESNRIHIDQELEKKTKELDQIYMSEKSFSGLKDNDIASIIYDRSEESVEKRVRYNNELRKIIKNIKVNCMMVSMQVEFFNGVTRFIMENKNNEPPLMMEHNFEESTRIMYEAAKKYIPK

SEQ ID NO: 7135 - protein, 506 aa, synthetic construct
MRTVITYLRFSSATQGAEGADSTRRQNELFKQWLRKNSDAQVVASFSDEGLSGYKGKHLTGQFGDMLARIEAGEFPAGAILLVESIDRIGRLEHLETEALMNRIIAHGIEIHTLQDGLIYTRDALSDDLGISIIQRVKSYLAHQESKQKSFRVSEKWKQRAKLALAGEQRLTKMVPGWIDPETFKLNEHAETVRLIFKLLLDGESLHNIARHLQSNDIKSFSRRKDANGFSVHSVRTVLRSESVIGTLPASQRNDRPAIPNYYEAAIDASTFNKAQEILDKNRKGRTPASDNPLTINIFKGLFRCQCGASVHPTGTKNKYQGVYRCNSHLDGRCDVPPLKRKPFDRWMIDNFLGMIDVGNDGEAEKEIASLQHEVETVTARIKKATALLLEMDDITELKTQVKELNQKRTELQTTINTMKRKTSLSDKGLPQLKDIDLMTKAGRVECQLILSKHLKGLTLGKDSVTVTLQNDTEITIPTNPLPLNDGTSIFEIAEKNLLNIDTFQL

SEQ ID NO: 7136 - protein, 507 aa, synthetic construct
MKRVISYIRFSSERQAKGDSLRRQSKMVNDWLKAHPEYYLDQDLSFRDLGVSGFTGKHLKGGLGDFLTAIEKGLVKAGDTLLIESLDRLSRQAVDRASELLRNILRSGVDIVTLSDGEHYTRESLRDPLALIKSILIMQRAHEESLRKSERIQAAWNRKKELISEGIKISKRCPAWLKLNDDRKSFSVIPEKVETVKRCFQLRLEGKSIWEIVRTMNAEGHQTLNQYKAGKFGQTSVQDLLKNRSVIGYFTPKGCEEISGYFPPIIPETDFYKVQQLSYSRYGRKPASDKPLSVNLFKGVIRCSECGHALIITGFSDTRNGIYRCPLRNENRCSAKGLSRKQTDGTLLTLLSRLDRFDSDTTNTIDMLRLHREHISSNIEKLVQLSLEIEDLSAITIKLKQLKGELSQVDADIEKETQRLKSIDVGCLSDCDLTTKAGRIEAQLIIKSAVKEVVLNTAKRRCKVTFHNGKSITLPITETPSEDVTEAIQSLSEVTERGLIDVDVVAI

SEQ ID NO: 7137 - protein, 507 aa, synthetic construct
MKRVISYIRFSSERQAKGDSLRRQSKMVNDWLKAHPEYYLDQDLSFRDLGVSGFTGKHLKGGLGDFLTAIEKGLVKAGDTLLIESLDRLSRQAVDRASELLRNILRSGVDVVTLSDGEHYTSESLKDPLALIKSILIMQRAHEESLRKSERIQAAWNRKKELISEGIKISKRCPAWLKLNDDRKSFSVIPEKVETVKRCFQLRLEGKSIWEIVRTLNAEGHQTLNQYKAGKFGQTSVQDLLKNRSVIGYFTPKGCEEISGYYPAIIDETTFYKVQQLSHYRYGRKPVSDKPLSVNLFKGVIRCSECGHALIITGFSDTRNGIYRCPLRNENRCSAKGLSRKQTDGTLLTLLSRLDRFDSDTTNTIDMLRLHREHISSNIEKLVQLSLEIEDLSAIIIKLKQLKGELSQVDADIEKETQRLKSIDVGCLSDCDLTTKAGRIEAQLIIKSAVKEVVLNTAKRRCKVTFHNSRSINLPITENPSDNVTEAIQSLSEVTERGLIDVDEVII

SEQ ID NO: 7138 - protein, 559 aa, synthetic construct
MKTKLYSYIRFSSMRQNDGSSYERQIRMAREVAAKYDLELVNDYQDLGVSAFKGANSKTGALSRFLDAIGRSVPVGSWLFIENLDRLSRADIVSAQELFLSIIRRGITIVTGMDNKIYSLDTVTANPMDLMFSILLFIRGNEESQTKRNRTNSSALIKIKSHQENPQNPAVAIEEVGKNMWWTDTTSGYVLPHPVYFPVVQEIVELRKNGRSTAEILDHLNETYTPPPAVSNKKHSKWSRAMVERLFHTRALIGIKEVSVDGVNYELKDYYPRVIDDATFYHLKKNIGARAWNFGDKEEVKPIPLLSGIGLLKCDHCGCAMVKVKGTNKRSDQYRYTCDATRSRRLDCEHPNWSFRGDQLEKAVLQLLADKIWIAEDKANPVPALKVQVDEISRKIDNLIALSAMTGATKELADQITTLNSERETLYNQIKMAEEEMYSVDSQGWEKLAEFDLEDVYNEERLKVRFKIKQALKRIGCSRIDRNKNLFVLEYIDGKTQRVVIENSRGTRKGQIFVDLKTINDRQILESNGLVLHPCLDMLTDKNWKPEEEIPGPLQEFGI

SEQ ID NO: 7139 - protein, 508 aa, synthetic construct
MKKAIAYMRFSSPGQMSGDSLNRQRRLITEWLKVNSDYYLDTVTYEDLGLSAFNGKHAQSGAFSEFLDAIEHGYILPGTTLLVESLDRLSREKVGEAIERLKLILNHGIDVITLCDNTVYNIDSLNEPYSLIKAILIAQRANEESEIKSSRVKLSWKKKRQDALESGTIMTASCPRWLSLDDKRTAFVPDPDRVKTIELIFKLRMERRSLNAIAKYLNDHAVKNFSGKESAWGPSVIEKLLANKALIGICVPSYRARGKGISEIAGYYPRVISDDLFYAVQEIRLAPFGISNSSKNPMLINLLRTVMKCEACGNTMIVHAVSGSLHGYYVCPMRRLHRCDRPSIKRDLVDYNIINELLFNCSKIQPVENKKDANETLELKIIELQMKINNLIVALSVAPEVTAIAEKIRLLDKELRRASVSLKTLKSKGMSSLGDFHAIDLTSKNGRELCRTLAYKIFEKIIINTDNKTCDIYFMNGIVFKHYPLMKVISAQQAISTLKYMVDGEIYF

SEQ ID NO: 7140 - protein, 604 aa, synthetic construct
MTKIIGYARVSTTKQDLSRQKLKIKEFCENNNYELIEIIEDFGISGVVSDRRGYLELQSRTYKDADMIVISELSRLSRQEDVTETVHNIQQIINKGLSVILLDSPSKIYEANKLLDITEILILTIKAWAAAQERLDIKKKNQDGKQALFQAYPYAVVDQKIPYGYKAVPNPNGKRPKYILEEVPEEVENIKRLFALVNSGKTLGAVARYFNERNITFRGYYSTVAILSNYIHSDIYRGIRRRTQKLGREEPYTIEVRIKPIINEEDFMKAQELIKNNYKNTPTGKVNHNPLKGIIKCRCGRAMTVKDKKPAAGISKLTYRCSCVDRKSHPDFCKYNIDEVSYDLTNEILYSLFKSMHTAEYINFFRNQTDNRVTELQEEIAGIEKRLSTLYLDKENLSNESKENANKFLLTTNPTLLNIIQEKQNQLDDKIKSIDKEIVKYKKSQSKKAADIERIKDNNGKEKLQNLSIEEQGELYHKYLERVNYIPVTTMQGYYIVQFLNGIKFYIAITKVRSIAMASLLLDNWTIDEKGIITANYDTLKSSDMKNFSIEMIRKTKTMTLQEYLKSDLAKERALHLDLSYRERYLKELHKAGLDGRLRPLKQE

SEQ ID NO: 7141 - protein, 589 aa, synthetic construct
MCSDFIIFAPTNQRRSIMRKRIVGYARVSTEKQDLERQKILIREYCSNNNYDLVKIISEKVSGAKKDRESINELLAVTKDTADMVVVSELSRISREKECLTVLNTINDILENGLDVLFLDDTSKVYSAYTELNVIDIITLTVKAHSAAEERDKITARMRTGKITKLNINPYMYTGSLVPYGFKVIDNPDYKGQKCNIPARKLMVIDESKTKDVQFIYQLVLNGTTLRDAAEEVNKLGLRTQLNKPFCETSISKMIKNPIYNGRRRFKGLNLPLMDKIISDNDWNRAQICVSQNQLFKGKTTKNFNPLKGLVFCPCGYALMLHKMIRKDGSGYFVMTCCKKNDKEYRKKCRNSGIVSHVLLPTVWKCVKDTLLLSEYTTKTTSEVHRINGIIEGLEDRISGLIDEIDSHKKEMARLSKAITLVTVKGLITQYENEYVTEEAKVTEIEAKINNIRDEISNYKANITKINSITYNSQLTNLTDQEKANVYQKVLSKVVYYSIDYFRGFIVISYKNGLENIIAINKTTTGYISPLPSSFSFNAETRKIRVTIAKKQTSIKEFNLSDIENIEYSFKELEANFTPQQWDIQSQIL

SEQ ID NO: 7142 - protein, 559 aa, synthetic construct
MKTKLYSYIRFSSMRQSDGSSYERQIRMAREIAAKYDLELVNDYQDLGVSAFKGANSKTGALSRFLDAIGRSVPVGSWLFIENLDRLSRADIVSAQELFLSIIRRGITIVTGMDNKIYSLDTVTANPMDLMFSILLFIRGNEESQTKRNRTNSSALIKIKAHQENPQNPAVAIEEVGKNMWWTDTTSGYVLPHPTYFPVVQEIVELRKNGRSTAEILDHLNETYTPPPAVSNKKHSKWSRAMVERLFHTRALIGIKEISVDGVNYELKDYYPRVIDDPTFYHLKKNIGARAWNFGDKEEVKPIPLLSGIGLLKCDHCGCAMVKVKGTNKRSDQYRYTCDATRSRRLDCEHPNWSFRGDQLEKAVLQLLADKIWIAEDKANPVPALKVQVDEISRKIDNLIALSAMTGATKELADQITTLNSERETLYNQIKMAEEEMYSVDSQGWEKLAEFDLEDVYNEERLKVRFKIKQALKRIGCSRIDRNKNLFVLEYIDGKTQRVVIENSRGTRKGQIFVDLKTINDRQILESNGLVLHPCLDMLTDKNWKPEEEIPGPLQEFGI

SEQ ID NO: 7143 - protein, 568 aa, synthetic construct
MKKKVVGYARVSTEKQDLERQKILIREYCADSGYELIKIISEKVSGAKKDRQSINELLDIDGSVADMVVVSELSRISRQKELMAVLNTINEILENGLDVLFLDDTTKIYSAYAELDMVDIITLTVKAHSAAEERDKITTRMKTGKLTKVSTNPYMYTGGVVPYGFKVIDNPKYEGQKNNIPAKRLMVLDESKSKDIHLIYQLVLNGTTLRDAAKEANRLGLITQQNKPFCETSISKMIKNPIYNGRRRFKNLDLEIEKIIPDEDWNRAQICVSKNQLFKGKATKNFNPLKGIIFCPCGYALMLHKMVKKNGSSYFVLACCKKNDKEYRSKCRNSGTTADSLLPTVWKCVKSTLLLSEYLTKTKSEVNRINSIIDSLEDKIIVLVEEISTHKKEMTRLAKAITLVTVTGLIEQYQNEYIINEAKVNELEGKIQTVKNEITAYKDEINRVNTIKKDSELVNLTEQEKADIYKKVLSRVVYYSEDYFRGFIVISYKNGLENIVAINKTVFGYISPLPSSFGFNVDKRTITVQVSKKQPSLKSFSSGDIETREYNFKEMESNFDLKQWNITK

SEQ ID NO: 7144 - protein, 575 aa, synthetic construct
MRGVIYSRVSTIDQDYSKQTNELKDFAKKNNIDIVHIFEEKESGFNNDRPEFKKVQQLTKDDVDILLVWELSRLSRRSIYIQQQVKDFADKGICIYTKKENLYTLNEDGTENKSAMLLIGFTSIIAEQEVATLKERTISSKRNRIIKEGYSYTYNAPYGYIYDKETKKLSINPIEAEVVKRIFELSANGYSAYRIPVLLNADGIPTKTGKKWTLPTIATILTNTVYKGEAHYKLKGEKPKEGKRYSRTTEYAVVETPAIVTSELFDLSRKMMKERLSRSKSSGVKYNPLLRGLIVCPYCNVKYIFNRRDNLYSCHERYEKATNKTIQCFSKSISINKIDEIIWNLVKILFSKELAAGKTDEQIEPINKELEGYRLQVVNLEHKQNELTQKANIIANAAIDIKIQFPNLPDLYLNKLKEVESINKEAGKNLNEIKHLEKLMESCRNKIQAINTLSDESIVVESIVDETEKYDLVHKVIDNIIIYGEGHYTLVAVTFQTGQVAYIGYYSFKKYKYYTIFYPSQSVWFDTEKRLGYITTMKDPNSLELSLETVTKEYSITDFINMFDTPKNRRYYKNQ

SEQ ID NO: 7145 - protein, 604 aa, synthetic construct
MIKIIGYARVSTTKQDLSRQKLKIKEFCENNNYELIEIIEDFGISGVVADRKGYIELQSKTYKDADMIVISELSRLSRQEDVTETVYNIQQIINKGLSVILLDSPSKIYEANKLLDITEILILTIKAWAAAQERLDIKKKNQDGKQALFQAYPYAVVDQKIPYGYKAVPNPNGKRPKYILEEVPEEVENIKRLFALVNSGKTLGAVARYFNERNITFRGYYSTVAILSNYIHSDIYRGIRRRTQRLGREEPYTIEVRIKPIISEEDFMKAQELIKNNYKNTPTGKVNHNPLKGIIRCRCGRAMTVKDKKPAAGISKLTYRCSCVDRKSHPDFCKYNIDEVSYDLTNEILYSLFKSMHTAEYINFFRNQTDNRVTELQEEIAGIEKRLSALYLDKENLSNESQDNANKFLLTTNPTLLNIIQEKQNQLDEKIKSIDKEIIRYKKSQSKKMADIERIKDNNGKEKLQNLSIEEQGELYHKYLERVNYIPVTTMQGYYIVQFLNGIKFYIAITKVRSIAMASLLLDNWTIDEKGLITANYDTLKSSDMKNFSIEMIRKAKTMTLQEYLKSDLAKERALHLDLSYRERYLEQLHKAGLDGRHRPLKKE

SEQ ID NO: 7146 - protein, 559 aa, synthetic construct
MKTKLYSYIRFSSMRQSDGSSYERQIRMAREIAAKYDLELVNDYQDLGVSAFKGANSKTGALSRFLDAIGRSVPVGSWLFIENLDRLSRADIVSAQELFLSIIRRGITIVTGMDNKIYSLDTVTANPMDLMFSILLFIRGNEESQTKRNRTNSSALIKIKAHQENPQNPAVAIEEVGRNMWWTDTTSGYVLPHPTYFPVVQEIVELRKNGRSTAEILDHLNETYTPPPAVSNKKHSKWSRAMVERLFHTRALIGIKEVSVDGVNYELKDYYPRVIDDATFYHLKKNIGARAWNFGDKEEVKPIPLLSGIGLLKCDHCGCAMVKVKGTNKRSDQYRYTCDATRSRRLDCEHPNWSFRGDQLEKAVLQLLADKIWIAEDKANPVPALKVQVDEISRKIDNLIALSAMTGATKELADQITTLNSERETLYNQIKMAEEEMYSVDSQGWEKLAEFDLEDVYNEERLKVRFKIKQALKRIGCSRIDRNKNLFVLEYIDGKTQRVVIENSRGTRKGRIFIDLKTINDRQILESNGLVLHPCLDMLTDKDWKPEEEQAGPLQEFGI

SEQ ID NO: 7147 - protein, 463 aa, synthetic construct
MEKKKRVALYSRYSTHTQDGNYSIDIQLERMEAMCKSKGWEVTEYFSDAAYSGANMDRPELQNLLSRLSEFDVVMVYRLDRLSRSQRDTMTLIQDHFLLNNVAFVSVSETLDTTTAFGMAMIGILAVFAELERATITERMQSGIKKRIEAGYRLVSGNHMPTGYKKGIDGNGNNILVIDEIQSEKVRRIFDLYEQYHSITKIQHALKEEGYSGRRFTTIRQILSNRLYLGEVKYRDEYFEGIHDSIISSEQFDRVQALLARHPKGANAGKAKESLFSGFVYCGCCGENFKTYSYRLENKIKGKYYVRSYLCRARRYPSEYEQKCMNQIVKNDTLEDLFLKNLDILIENRQTKTVSSKRKTNYELALKKIDEKIVRLLDLYEDGELDKETLNTRLEKRKKEKEDILLKKNSEAQNEAINIEIKDIKKYLTKFQTMDFIEKRALVEKVLDRIVIEPNDIIFEWII

SEQ ID NO: 7148 - protein, 531 aa, synthetic construct
MAIAYSYIRFSSSQQSQGDSLRRQTQLAEKYCIENNLTLSDTTFRDLGVSAFHSTNSQEDSGLGQFLSALNQGRISEGSYLLVESLDRLSRAKVQTALRQMLNIIELGVKIVTLMDNRIYDQESDTTDLIISLTIMERAHNESKTKSERIKAAWVHKRQNPTTTNRHSSTPFWLSLNADKKTYKLKEKYVEIVRKIYQLSIDGWGVIKIVRHLNESNIKAPKGGSWATTTVSRVLTSKAVLGHYEPMQNRKSLNLTIEDYYPSIIDEATYYLSRQRQNERSKPEAAGRKTNYPNPLSQIAKCKLCGSSMYYENKSKSLKYLTCREFKKGSCTNKPIRIELIYRFIYEVFNSPMYYQYQAKLVEKSNKKDNNKLEELEAKKTEQENALRGLLSMSNDFSNTIIQEEIKVRSERIESFKNHIENVKAEQAVEHTRSTHINFTEALQLAVNAFRFPLEKVQVEELSCEELFNTRVRLNRILKHAFNSLSIYHCGESERITIETEVMEGFSEGLKYETTRQSIKEPLSSRVWSVR

SEQ ID NO: 7149 - protein, 507 aa, synthetic construct
MKRVISYIRFSSEKQAKGDSLRRQSKMVTDWLKAHPEYYLDQDLSFRDLGVSGFTGKHLKGGLGDFLTAIEKGLVKAGDTLLIESLDRLSRQDVDQASELLRNILRSGVDVVTLSDGEHYTRESLRDPLALIKSILIMQRSHEESLRKSERIQAAWNRKKELISEGIKISKRCPAWLKLNDDRKSFSVIPDKVETVKRCFQLRLEGKSIWEIVRTMNAEGHQTLHQHKPGSFGQSSVQDLLKNRSVIGYFTPKGCEEISSYYPSVIDETTFYKVQQLSHSRYGRKPVSDKPLSVNLFKGVIRCSECGHALIITGFSDTRNGIYRCPLRNENRCSAKGLSRKQTDGTLLTLLSRLDRFDSDTTNVIDMLRLHREHISSNIEKLVQLSLEIEDLSAITIKLKQLKGELSQVDADIEKETQRLKSIDVGCLSDCDLTTKAGRIEAQLIIKSAVKEVVLNTAKRRCKVTFHNGKVIDLPITENPSEDVTEAIQSLSEVTERGLIDVDEVII

SEQ ID NO: 7150 - protein, 449 aa, synthetic construct
MKQAIGYLRQSTTKQQSLTAQKQTIETLAKKYNIQHITFYSDKQSGRTDNRTGYQQVIERIQQRQCDVLCCYRLNRLHRNLKNALKLMKLCQKYHVHILSIHDGYFDMDKAFDRLKLNIFISLAELESDNIGEQVKNGLREKAKQGKLITTHAPFGYTYRNGTFTINQDEAPTVKAIFHYYLQDYGYKKIAQYLEKDDKCINRKPYQVRAIITNPNYCGRVINQYGQYDNMFPSIISTNIYEQAQAIRSQKHTKRTPSDNQLQKKIKCPYCGSTLTNMTIRKKHHMLRYYACPQNMNASRFVCAFKGINAQVLETSVLATCQDFFQNQQLYSKINHTIQQRLKKQRDIEGKHTLTQEQLIDKLAKGMIDAETFRNQSQSVLQKRKNISSISDTQLQTSLQKVIQKSFTLNMLYPFIDVIHITKNKELSGIYLKNEPLNIVNQAVQSSTA

SEQ ID NO: 7151 - protein, 559 aa, synthetic construct
MKTKLYSYIRFSSMRQSDGSSYERQIRMAREIAAKYDLELVNDYQDLGVSAFKGANSKTGALSRFLDAIGRSVPVGSWLFIENLDRLSRADIVSAQELFLSIIRRGITIVTGMDNKIYSLDTVTANPMDLMFSILLFIRGNEESQTKRNRTNSSALIKIKAHQENPQNPAVAIEEVGKNMWWTDTTSGYVLPHPVYFPVVQEIVELRKNGRSTAEILDHLNETYAPPPAVSNKKHSKWSRAMVERLFHTRALIGIKEISVDGVNYELKDYYPRVIDDPTFYHLKKNIGARAWNFGDKEEVKPIPLLSGIGLLKCDHCGCAMVKVKGTNKRSDQYRYTCDATRSRRLDCEHPNWSFRGDQLEKAVLQLLADKIWIAEDKANPVPALKVQVDEISRKIDNLIALSAMTGATKELADQITTLNSERETLYNQIKMAEEEMYSVDSQGWEKLAEFDLEDVYNEERIKVRFKIKQALKRIGCSRIDRNKNLFVLEYIDGKTQRVVIENSRGTRKGQIFVDLKTINDRQILESNGLVLHPCLDMLTDKNWKPEEEIPGPLQEFGI

SEQ ID NO: 7152 - protein, 547 aa, synthetic construct
MKLLVTYIRWSTKEQDSGDSLRRQTNLIDAFYAKHKEEYYLLPAHRYVDKGKSGFHQQHKAQGSDFRRMFENVMSGVIPEGSLIVVENFDRFSRADIDTAIDDVRQILRKGVSILTLGDGELYDKSALTDPVKLIKHIIIAERAHQESLVKQKRIAQVWNHKTQLARELKKPMGKQAPGWLELSEDGSHYIVDEDKASLVNIIYDKRLSGMSMFAICKWLNEQGYPTINQRKVRISKTKKPDGNWSALSVKHILTSRSVLGYLPAKISTEDRKTVLREEIESFYPQIVTDSKFYAVQQLLEETGKGKTSSGDHWLYVNILKGLIRCKCGLVMTPTGIRKPVYQGTYRCNGNKESRCSYGTVSRKLLDTQLCSRLFSKLSQLHDEATDTAKLDELQRRLNTVDSELEKLTETLIQLPNITQIQEALRVKQEEKDELIVQLSREKARVKSVSSLDLSGLDMESVEGRTEAQIIIKRLVKEIVVSGNEKLVDIYLHNGNMIRGFPLDGKDDHTLTLEEATDEMQSLDDMLIFGEPVTRIYPAGDMEEVDA

SEQ ID NO: 7153 - protein, 522 aa, synthetic construct
MVKKVTKIKETNNRLQKKLKLRVAAYARVSTDNTEQLISLEAQKVHYEAYIKANPDWEFVGIYFDEGISGTKKENRTELLRLISDCENKKIDFVITKSISRFARNTIDCLEIVRKLTDLGVFIYFEKENINTQSMESELMLTILSSLAENESISISENNKWSIQKRFRNGTYKLSYPPYGYDYIDGQIVVNKKQAEVVKRIFTDALAGKGTQKIAQELNDEGVRTKKGGQWRGSTIRGILRNEKYTGDVILQKTYTDDNFTRRTNKGEKDQFLIENNHEAIISHEEFKAVNLAIEQRGKEKGIKSGNSKYLNRYPLSGKIQCSECGSTFKRRIHGTKNNKYIAWCCSKHITNIEECSMIYIREDSIHQGFVTMINKLIFSHKVVLRPLLQKLKLMNYSDNLIRVQEIESKMEKNAEQLQVLINLMTKGYLEPALFNKQNNELRSEAEKLKVQKEALYRFINGGMAKITELERLIKYVSKSKNIESFNKEVFEQFVEKIVAFSPTEIGFSLKCGLLLKERMER

SEQ ID NO: 7154 - protein, 523 aa, synthetic construct
MTMSRNVTVIPARARVGNNQETESKTKLRVAAYCRVSTDSEEQASSYEVQIEHYTSYIKGNPEWELAGIYADDGISGTNTKKREEFNRMIEACMEGKIDMIITKSISRFARNTLDCLKYIRQLKDKNIPVFFEKENINTMDSKGEIMLTIMASLAQQESQSLSQNVKLGIQYRFQQGEIQVNHNRFLGYTKDENKRLVIVPEEAEVVKRIYREYLEGASLLQIARGLEADGILTAAKKPKWRPETLKKILQNEKYIGDALLQKTYTVDFLSKKRVVNNGIVPQYYVENSHEPIIPRGIFMQVQEELVRRANLYTGKNGKKRVYSSKYALSSIVYCSECGEIYRRVHWNNRGCRSIVWRCVSRLEEKGSDCTSPTVNEEVLQAAVVKAINELLASKDTFLSTLQANIETVLNEEHDKITNDIDVKLEELQNELLRLANSKTDYEEVAEEIYRLREQKQNALVENADREGKRQRIAEMTDFLNEQSCELEEYDEQLVRRIIEKVTIYEDKLTVEFKSGIEIDEEI

SEQ ID NO: 7155 - protein, 426 aa, synthetic construct
MRVRIIQPVKEVNKKKRVCAYARVSTGSEKQGESLENQITYYKKLISDNPNYEYAGIFADRGITGTVDKRPEFQKMMELCREGKIDLIITKSISRFARNTVITLQIARELKNMDVEIRFEKENINTLSGDGELKLAILSSFAQEESKNVSDNLKWRVRKKFQQGELIINTARFLGYNRNEYGELIINLKEAETVKRIFSEYLSGKGSFTIAKRLNRDSIPTVGNKKWHDSTVSEILKNEKYKGDAILQKYCILDHLKKKKIRNNGEVDSYYIEDNHSPIISRDVWERVQKEIRIRAEAKGNFKGDKYKRRYALTGKLYCSKCGAVLRRRTWNSKFSCRKIVWQCSNYIENGKNACRGTVIDDETAGRLNIKEEIIVREEFVDGKKHYSYSCKNKQKQPVTECKAKEKENGSLLQSINRPIRTVIKL

SEQ ID NO: 7156 - protein, 443 aa, synthetic construct
MAAYCRVSTDQLEQLSSYEAQVNYYTAFINGHPDYELAGIYADEGITGTNTKKREQFNKMIEDCRAGKIDMIITKSISRFARNTLDTLNYVRQLKDLGIGVIFEKENINTLDSKGEVLLTILSSLAQDESRNISENSTWGIRRRFEQGKLHINDKKFLGYDKDKDGNLIINEKQAETVRRIYREFLDGKGINSIARDLEKDKVPKWNGTFKWYESTIRKMLGNEKYKGDALLQKTYTVDFLTKKRAENKGQVPKYYVEENHPAIIDKEMWEAVQLEIERRRAFAEKYNLKKSNYATTDNPFAAKIICGKCGSYFGRKTWRSTKETPRVKVWICSSRYRIKGKKGCDNKHIYEKVLYQAFINTFNAMIENRDYFMQKWKEHLKSGNALVRYKAGQFIKILEDAEPIKEFDMNLFCKITQRMTVFEGKGIIVSLLDGTEIEVVIE

SEQ ID NO: 7157 - protein, 636 aa, synthetic construct
MSIEQITPTAEAPATTSLKRAVLYTRVSTSRQASKNGEAEGYSIPAQRTACQRKAQELGAEIIEEFIDAGASARSADREGLQEMLAYVKQGNVDYVLVHKLDRLARDRADDVAILAAIQAAGAVLVSATEQIDETPPGMLMHGIMATMAEFYSRNLANEAKKGIAQKAKNGGTHGVAPIGYVNTNTRIEGRDIKGVAIDPERAEPIRWAFRTYATGDLSISMLRDELEERGLRSRKTAKYVGTPLSISQVHRMLSNPYYIGKVKHREAIYDGIHEPLIDDDLWYTVQEVLAGRRIAGDRSWRHTHYLKGSLSCHRCGGRVGFGYSQGRGGTYSYFFCIGRHTGRTECDLPYVGTDFVEEEMERIWHSQVQFTAETIAQVGQASRAQLEAQQAHDEALLASQRQRLITLERQKQKLIDAYLDDIIPVEDLKQRQTAVMAEVNDAKRLIEACQQNINTVLKHLDLILLLLANAGRLYKEATPEQRKWLNQAVFKTIEIDVAEENPRLADGTIVVDVAGVLAEPVAAVTGLAQVGTGGRKTPDVASRGATQALPGDEEGQSETPGSLSHSGGSNVNNLAVTVGFEPTVGSTPTQLFESCTFGRSDTSPRESLVQASGWVEPASGASAHPAAVSALARIL

SEQ ID NO: 7158 - protein, 506 aa, synthetic construct
MRSVITYLRFSSAIQGAEGADSTRRQNDLFKQWLKKNSDAQVVASFSDEGLSGYKGKHLTGQFGDMLARIESGEFSEGTVLLVEAIDRIGRLEHLETEALMNRIIAHGIEIHTLQDGLIYTRDALSDDLGISIIQRVKSYVAHQESKQKSFRVSQKWKQRAKLALAGEQRLTRNVPGWIDPDTFKCNEHAETVRLIFKLLLDGESLHNIARHLQSNDIKSFSRRKDANGFSVHSVRTVLRSESVIGTLPASQRNDRPAIPNYYEAAIDAATFNKAQEILDKNRKGRTPASDNPLTINIFKGLFRCQCGASVHPTGTKNKYAGVYRCNNNPDGRCDVPPLKRKPFDKWMIDNFLGMIDVGYDGEAEGKIASLQHEVEIVTARIKKATALLLEMDDIDELKIQLKELNQKRTELQTTIDSMRRKTSLSDKGLPQLKDIDLMTKAGRVECQLILSKHLKGLTLGKDSVIVTLQNDTEITIPTNPLPLNDGTSIFEIAEKELLEIDAYQL

SEQ ID NO: 7159 - protein, 416 aa, synthetic construct
MEICKLPPKPAQLRLTRVAAYVRVSRESERLTHSFSAQVSYYNKLITNTPGWEYAGVYSDYATTGTSTTGRGEFNQMIEQALAGSIDIILTKSISRFARNTVDLLSTVRALKAAGVSVRFERENIDTANAEGEVLLTLLASFAQAESESISANAKWGIRKKYKDGLLHSRHPYGYRYHHGQLDIIEEEAVIVRRVFAEFLDGISPEKTCKQMNQEGLRSRGGGKFSASVTRDWLENPTYIGTAILQQYFSAHAGDNTPTLNRGELDKYIVEDSHPPIIERSVFDAVQAELARRRATGGRGLTPTGGSSALTHRITCTICGRNYHRRTRRLAHSTYKYWWCETATKGKGNPCHAHQLREENLHTLIKRLLGLHAWDDQQVVDRIERIEASPNWLLTIHLSSGNTTMIDYRNGKEVTA

SEQ ID NO: 7160 - protein, 525 aa, synthetic construct
MPSAIPYLRFSSGKQAAGSSVHRQRAMLGQWLERNPDYTLSDLCFEDLGRSGFSGEHLEHGLGQLLAAIDSGAIKSGDVVLVEAVDRIGRLEPLEMLPLFSRIVKAGVSVVTLEDGHTYSRESANDSSLFLLVAKIQQAHEYSNRLSRRISASYTARREKAKAGLGVKRETPVWLTTDGQLVPHVAPHIAQAFQDYADGLGERRICRKLRESGLEEFSKTNATTVRRWLKNRTAIGYWNDIPDVYPHVVDPALFYQVQQRLDAPKVDRAKPSAHYLTGLVKCAVCGRNYNFKQRKHTDPAMLCTSRARLAGEGCSNSKTYPVIVLDQVRKLTSLPFLQHAMESASSQADPSSQRLAVIDGEIGELSRKISEATKALLVLGFTPEIQESLEQLKTAREALEEERATLLLPQAEKLTTAQLEAFSNGLLDDEPMKLNHVLQTAGYSMVVHPDGSIDVDGKRFVYEGANRKKKVYKLHLLGEDRQWELPILSPEQAASLARSVAGGYLPPNSSEEIARYYEKVKHLVR

SEQ ID NO: 7161 - protein, 570 aa, synthetic construct
MARLISYLRMSTSEQLRGFSLERQRKLIADFAAKNGLSVEEENTLEDIGRSSFSDDAQQKELTRFFENLNAGKYEPGDVFALENIDRLTRRGPVDAILKVNQIISKGLKLAIISGNEQRIIEDVNDVFTIINLSIDASRANKESKNKSDKGLSNWQEKRNLAASQKIAMTAQAPAWLDTEIFYIFDEEKKKNIKRRKYVLNEEKAEAVRLIFDLYSSGNGALKIKNILNERNIPTFKGAEYWEPSIITKILKNPATFGLYQPKKQGTGKRDLIAAGEPINDYFPAVITREIFEQCERIREGNGTRKGRKGKLFTNLFTGLLKCVDCGGPVHLLNPGIDKRNKVQKSIYYLVCKRAKFTKECTTKRVRYDDFETALLKAIQEINLADILNENNPLETLIKKQRSKETEISKKKKLIENFQRQFLENDGDLPAFMISQAKDAEISIKELEDQQREIASEIAQLNVYNSNVDNAIEELKEKPDYETRSKINLLFHEIIKNISLDVENQFYTVRFKNGVLRLISAAGFVLTTDEQTPADINEILQSIEGPSIPREIATDPEKLIEYLKAREVIE

SEQ ID NO: 7162 - protein, 541 aa, synthetic construct
MSMAKVYSYMRFSDPRQATGSSADRQLAYASAWASKHGMELDATLTLRDEGLSAYHETHVKQGALGAFLRAIDAGRIPVGSVLIVEGLDRLSRAEPLLAQAQLGQIVSAGITVVTASDGREYNRDGLKAEPMNLVYSLLVMIRAHEESDTKSKRVKAAVRRQCEAWVAGSYRGRIVSGKDPQWLTWGGDSWQFIPERVEAVRFALDAYRSGIGAARLVRLMHEKGMVLSDWGIAAQQVYRLVRLPALRGAKRISIDGEDFMLEDYYPRLLSDEEFSELETLVGQRYRRRGKDEIVGIVTGIGITRCGYCGTALVAQNLMQRVKADGSLVDGHRRLHCVSYSKNGGCNAGSCSSVPIEHAVLAYCSDQMNLQRLLEPSSADEELRTRLAEAQQGVAEVERQLQRVTDALVADDSGAAPLSFVRKARELEEELERRRSAVRVLERELVAMASSVPVAEASKWAELAEQAKSVSNVEAREQARQLVMDTFERIVVYMRGVVPEGRRSKYIDVLLVSRAGQSRWLRVGRRTGAWSAGGDWNGSAP

SEQ ID NO: 7163 - protein, 586 aa, synthetic construct
MSNVQVIKANRDENRIRGRKVEILRVAAYCRVSTDSEDQLNSYKSQVMYYTELINKKPEWSLAGIYADEAITGTQVTKREDFQRMINDCMNGEIDMIITKSISRFARNTLDTLKYVRMLKEKGIAVFFEDENINTLTMDGELLLVVLSSVAQQEVENISSNVKKGLKMKMQRGELVGFQGCLGYDYHKETKSISVNEKEAEIVRYIFNRYIEGAGCTVIANELENLGYKTKYGSTRWVQSTVIGIIKNEKYKGDVLLGKTFTVDPISKRRLENFGEEDRFYIQNHHEPIVSEEIFEEAQRILAKRNVHRGVHQKGQKRNKFSRKYAFSCMIKCGFCGGTLTRRNWHSSSIYTKTIWQCVTATKQGKKYCPHCKGIPEEVIEKAFVKSYQLLCSDQQQVVEEFLQKVEGVLNEDTSSKRLPKIEKEMSDLRRRKEKLLDLRLDNNIDRDIYESKNQELSEQLQKLQEEQEQLLELNKNQESTKTRLQDFRKKLSSGEILESFDRAVFESVVEKIIIGGYNEEGVEEPLKITFMYKTGIHSNFNGKDFKPRRRNAAALHSDTELCSYTSGEAEKLYSYYSSDTCGNCS

SEQ ID NO: 7164 - protein, 588 aa, synthetic construct
MKEVEVIKARNDLQTRTRGKTIELMRVGAYCRVSTDSADQLNSYKSQVAYYTDMIKKNKEWVLADIYADEAITGTQVAKREDFQRMINDCMNGEIDMVITKSISRFARNTLDTLKYVRMLKERNIAVYFEDEKINTLTMDGELLLVVLSSVAQQEVENISANVKKGLKMKMKRGELVGFQGCLGYDYHKDTKTITVNEEEAEIVRYIFNRYIEGAGGSVIAHELENLGYKTKYGSSTWVQSTVIGIIKNEKYKGDLLLGKTFTVDPISKRRLENFGEEDKFYIRNHHEPIISEEVFEKAQEILARRNVNRGKIGEGNTKREKYSRKYAFSCMLECGFCGGTLTRRNWHSSSQYSKVIWQCVTATKKGKKFCKHSKGIPETAIEEAFVESYRLLCDDNKDVLEEFLQRMDDTLSSSAVSKQLAKAEKEIDALEKKKSRLVDMRLEEIIDKETYESKYDDLVSKQEQLIEERHKLQETSDNEKDIKKRLKEFKKTLEQNEVLDKFDRYVFESIVEKVIVGGLDENGNVDPAQLTFVYKTGLKNSVDGAKFKPQRKNARGRHRTDELCSHDSNEVDKMCSDSSNDTCGNCS

SEQ ID NO: 7165 - protein, 502 aa, synthetic construct
MMYDALYGRQSIEKKDSISVESQLEYCRYETHGDPYIEYADRGFSGKNTNRPDFEKMMNDIRAGKIKRVIVYKLDRISRSILDFANMMEVFQEYHVEFVSSTEKFDTSTPIGRAMLNICIVFAQLERETIQKRVTDAYYARNKRGFYMGGRIPYGYRLKETIIDNIRTSMYEEVPEESEQLKLIYSLYADPANSLGDIIRYLNKHGIKQLRGGNWTSARISEMLRNPVYVEADIDVYNFFKSQGADVYNPASDFTGYNACYLYKGTVSTTRKQCDLTDKEIVLAPHKGFISSATWLACRIRCLNNRQSTQTCKPKNSWLTGKVKCGNCGYALVIRKAKTKWGRYFVCSQSGHSGNCKGTGSTVYADVLEEYMLKAIREKLSEFKKLSDEEENKSVPKVSKKKIRLTQIDEEINDLLSKVGSANAILMKYINDKVSELDTERQTLQEEIISLTCTHTENKMGQITDHVKKWDNISFEDKQAVVDALIKVIKVANGNIEITWKI

SEQ ID NO: 7166 - protein, 371 aa, synthetic construct
MKSKKAVVYARFSLDNQRDESIDAQLRAINEYEDKNNIKIVNQFIDRAKSATSDKTPEFQNMIKFCEADTTGISMVIVHKLDRFSRDKYDSAMYKQKLKVKGIRVVSVLENLDNSPESLILESVIEGMAQYYSANLAREVAKGQKENALKALHNGGDAPLGYDVAHDKTYTVNEEEAQAVKIIFDRYIKGYSYSKIIDELNDLGYKTKRGNKFGKNSLHGILNNEKYTGVYVFNKTQRKGVDGKRNGHEQKSEDEIIKVEGGIPVIIDKEVFEQAQEMIQKRKKTPGAHKATTTYLLTGLIKCGECGHAFQGHKRKDSYGNEYVSYRCGCRKQKRDYLEEFILQELEKNILNDEAIPALSKALNEKLNYKN

SEQ ID NO: 7167 - protein, 545 aa, synthetic construct
METTPTKRVALYIRVSTQEQALEGHSIQAQEQNGRQFAERMGYEVVEVYADEGISGKSTKNRFAYQRMMKDARNHRFDLLVIWKLTRLGRNMLDVLQTVEELLRYDVGLHSISEQFDVTTSTGKLMLQLLGSFGEFERNQIAENVQMSMQSLVKDKKRYAGGRRLGYVSGIDTNGQKQLVIEPEEAKIVRLIYAKYLGGAGYRAIANFLNRQGYQTVKKNAFSTTAVKDILCNKIYAGYLEYARYINWETKRRKGKNPKPILVKGTHEPIISEEDYQKVQERLALEGKQPKWNHTGENVLTGLLRCPECGAPMAASNVTNTLKDGTKKRIRYYSCSVFRNKGASVCHANSIRAEQAETFVADRLKEIIQLPEVLPRLVAALNEEIARQSQPLEQELVVLLERKEELKTKIEKWEAALEDSPELFPMLKDRLDELTEKRRQLHIRENEILGIFQQQGEPIQVKDVQRILTSLDRFLAQNEKKQIKALYRTFIEKITFDPNHKEMLEITMKFTHAVVQQLNEQYQIAVSKTKDTAIFVLKTPFTLTI

SEQ ID NO: 7168 - protein, 586 aa, synthetic construct
MNDVQVIKANRNENRIRGRKVEILRVAAYCRVSTDSEDQLNSYKSQVMYYTDLIKKKPEWSLADIYADEAITGTQVTKREDFQRMINDCMNGDIDMVITKSISRFARNTLDTLKYVRMLKEKGIAVFFEDENINTLTMDGELLLVVLSSVAQQEVENISSNVKKGLKMKMQRGELVGFQGCLGYDYHKDTKSISVNEKEAEIVRYIFNRYIEGAGCTVIANELENLGYKTKYGSSRWVQSTVIGIIKNEKYKGDLLLGKTFTVDPISKRRLENFGEEDKFYIRDHHEAIISEEIFEEAQKILAKRNVNRGVHQEGQKRNKFSRKYAFSCMIKCGFCGGTLSRRNWHSSSAYTKTIWHCVTATKHGKKNCPHCKGIPEEVIENAFVKSYQLLCSDQHEVVSEFLQKVEDILKDDASLKRLPKIEKEMTDLQRRKEKLLDLRLDNNIDRDIYDKKNQELSEQLKKLQAEQLQLVELSKNQESTKTRIREFRKNLNSGELLESFDRVVFESVVERIIIGGYNDEGVEDPLKITFVYKTGIHSNLNAKDFKPKRKNAAAVHTDAELCSYASVEDNKLCLHSSSDTCGNCS

SEQ ID NO: 7169 - protein, 547 aa, synthetic construct
MKLLVPYIRWSTKEQDSGDSLRRQTNLIDAFYAKHKDDYYLLPAHRYVDKGKSGFHQQHKAQGSDFRRMFENVMSGVIPEGSLIVVENFDRFSRADIDTAIDDVRQILRKGVSILTLGDGELYDKSALTDPVKLIKHIIIAERAHQESLVKQKRIAQVWNHKTQLARELKKPMGKQAPGWLELSEDGSHYIVDEDKASLVNIIYDKRLSGMSMFAICKWLNEQGYPTINQRKVRISKTKKPDGNWSALSVKHILTSRSVLGYLPAKISTEDRKTVLREEIEGFYPQIVTDSKFYAVQQLLEETGKGKTSSGDHWLYVNILKGIIRCKCGLVMTPTGIRKPVYQGTYRCNGNKESRCSYGTVSRKLLDTQLCSRLFSKLSQLHDEATDTAKLDELQRRLNTVDSELEKLTETLIQLPNITQIQEALRVKQGEKDELIVQLSREKARVKSVSSLDLSGLDMESVEGRTEAQIIIKRLVKEIVVSGNEKLVDIYLHNGNMIRGFPLDGKDDHTLTLEEATDEMQSLDDMLIFGEPVTRIYPAGDMEEVDA

SEQ ID NO: 7170 - protein, 547 aa, synthetic construct
MKLLVTYIRWSTKEQDSGDSLRRQTNLIDAFYSKHKEEYYLLPAHRYVDKGKSGFHQQHKAQGSDFRRMFENVMSGVIPEGSLIVVENFDRFSRADIDTAIDDVRQILRKGVSILTLGDGELYDKSALTDPVKLIKHIIIAERAHQESLVKQKRIAQVWNHKTQLARELKKPMGKQAPGWLELSEDGSHYIVDEDKASLVNIIYDKRLSGMSMFAICKWLNEQGYPTINQRKVRISKTKKPDGNWSALSVKHILTSRSVLGYLPAKISTEDRKTVLREEIESFYPQIVTDSKFYAVQQLLEETGKGKTSSGDHWLYVNILKGLIRCKCGLVMTPTGIRKPVYQGTYRCNGNKESRCSYGTVSRKLLDTQLCSRLFSKLSQLHDEATDTAKLDELQRRLNTVDSELEKLTETLIQLPNITQIQEALRVKQEEKDELIVQLSREKARVKSVSSLDLSGLDMESVEGRTEAQIIIKRLVKEIVVSGNEKLVDIYLHNGNMIRGFPLDGKDDHTLTLEEATDEMQSLDDILIFGEPVTRIYPAGDMEEVDA

SEQ ID NO: 7171 - protein, 547 aa, synthetic construct
MKLLVTYIRWSTKEQDSGDSLRRQTNLIDAFYSKHKNDYYLLPAHRYVDKGKSGFHQQHKAQGSDFRRMFENVMSGAIPEGSLIVVENFDRFSRADIDTAIDDVRQILRKGVSILTLGDGELYDKSALTDPVKLIKHIIIAERAHQESLVKQKRIAQVWNHKTQLARELKKPMGKQAPGWLELSEDGSHYIVDEDKASLVNIIYDKRLSGMSMFAICKWLNEQGYPTINQRKVRISKTKKPDGNWSALSVKHILTSRSVLGYLPAKISTEDRKTVLREEIESFYPQIVTDSKFYAVQQLLEETGKGKTSSGDHWLYVNILKGLIRCKCGLVMTPTGIRKPVYQGTYRCNGNKESRCSYGTVSRKLLDTQLCSRLFSKLSQLHDEATDTAKLDELQRRLNTVDSELEKLTETLIQLPNITQIQEALRIKQEEKDELIVQLSREKARVKSVSSLDLSGLDMESVEGRTEAQIIIKRLVKEIVVSGNEKLVDIYLHNGNMIRGFPLDGKDDHTLTLEEATDEMQSLDDMLIFGEPVTRIYPAGDMEEVDA

SEQ ID NO: 7172 - protein, 503 aa, synthetic construct
MPQRNNGIAYSYVRFSSKRQELGDSLRRQTEMAEEYAIKNGLNLSSKNFQDLGISAFREGKRASLVDMLAAIEEGQITAGSTIIIEALDRLSRRGIDATLETVKEILRKDVQVVSLSDGLLLTKNSLNDLQSVIRIAVAADLAHKESERKALRLRETKGQQREAALSGKPINKILPFWLQRTEAGYAFSDKAGVARQIVQLKQEGKGSNMIAKTLNKLGIAGVRTAQWNHASITKMLKNPALYGAYQTGETTKDRELIKLELVEAYYPALINKEEWLLLQSDQSKSKRGRRSANNPYSGLLRCECGGALVKRQHTVKGKLYVYHGCLNAKDGRCTQNISIKGLDGALTTILGRLEFKKKQTLSQSIHQERQQLEARINDLNSKLQVLDDIPLSVIKSIGTMESRLKEITDQIAKDEREQRGIEAVKSEKLSSITDGLELNLLLKRVLKSITVIRSGRGWAVKVLHLSGHKQNFLMVDGEIKFLSDTIALQKLLAGFRETTENS

SEQ ID NO: 7173 - protein, 547 aa, synthetic construct
MKLLVTYIRWSTKEQDSGDSLRRQTNLIDAFYSKHKNDYYLLPAHRYVDKGKSGFHQQHKNQGSDFRRMFENVMSGAIPEGSLIVVENFDRFSRADIDTAIDDVRQILRKGVSILTLGDGELYDKSALTDPVKLIKHIIIAERAHQESLVKQKRIAQVWNHKTQLARELKKPMGKQAPGWLELSEDGSHYIVDEDKASLVNIIYDKRLSGMSMFAICKWLNEQGYPTINQRKVRISKTKKPDGNWSALSVKHILTSRSVLGYLPAKISSEDRKTVLREEIEGFYPQIVTDSKFYAVQQLLEETGKGKTSSGEHWLYVNILKGLIRCKCGLVMTPTGIRKPVYQGTYRCNGNKESRCSYGTVSRKLLDTQLCSRLFSKLSQLHDEATDTAKLDELQRRLNTVDSELEKLTETLIQLPNITQIQEALRVKQGEKDELIVQLSREKARVKSVSSLNLSGLDMESVEGRTEAQIIIKRLVKEIVVSGNEKLMDIYLHNGNMIRGFPLDGKDDHTLTLEEATDEMQSLDDMLIFGEPVTRIYPAGDMEEVDA

SEQ ID NO: 7174 - protein, 559 aa, synthetic construct
MKTKLYSYIRFSSMRQNDGSSYERQIRMAREIAAKYDLELVNDYQDLGVSAFKGANSKTGALSRFLDAIGRSVPVGSWLFIENLDRLSRADIVSAQELFLSIIRRGITIVTGMDNKIYSLDTVTANPMDLMFSILLFIRGNEESQTKRNRTNSSALIKIKSHQENPQNPAVAIEEVGKNMWWTDTTSGYVLPHPVYFPVVQEIVELRKNGRSTAEILDHLNETYAPPPAVSNKKHSKWSRAMVERLFHTRALIGIKEVSVDGVNYELKDYYPRVIDDATFYHLKKNIGARAWNFGDKEEAKPIPLLSGIGLLKCDHCGCAMVKVKGTNKRSDQYRYTCDAIRSRRLDCEHPNWSFRGDQLEKAVLQLLADKIWIAEDKANPVPALKVQIDEISRKIDNLIALSAMTGATKELADQITTLNSERESLYNQIKMAEEEMYSVDSQGWEKLAEFDLEDVYNEERLKVRFKIKQALRRIGCSRIDRNKNLFVLEYIDGKTQRVVIENSRGTRKGRIFIDLKTINDRQILESNGLVLHPCLDMLTDKNWKPEEEIPGPLQEFGI

SEQ ID NO: 7175 - protein, 466 aa, synthetic construct
MKKAGLYIRVSTPQQEKEGYSIEAQTKKLNAYALAKDYKVFKTYTDAAFSGAKLERPALNEMIEDIESNKIDVVIVYKLDRLSRSQKNTMYLIEDVFLKNNVDFISMQESFDTTTSFGRAMIGILSVFAQLERDNITERMSMGKLERVKRGYYMGGGNVPFGYEYNQITGELEIQETQALAVKRMFELFLSGQAINKIVSILKKEFPVFEDSFMDSTVRRRLQSHYYCGKQKYQNKIYDAKHEPIVSTKDFNKAQRLISNRPHGNAFNHSYLFSGLIICHKCGKPYNGYESVRTANEKKYKHKYYRCSCRTYKHKQKYGWTCSGKSYRCDFLDAAIMSEIKKRAENSKFALKEDNNEVDNKPIIREIARLNAQQTKLLDLYLSDKISTKILDDKTDDLKDKIEKLELQLNQTVSKKDKEEFEKSLEELVDKFEELDFSTRRSLIENIIEKIEVVENEITIYFYVTI

SEQ ID NO: 7176 - protein, 566 aa, synthetic construct
MQKIIYPYVRFSTEQQSGGSSYRRQLGDILKYAKEHGYTVNDNLELRDLGLSAYKADHIKKGSLGDFFDAIEAGLIETDGSAYLCVEQIDRLSRQSLDDASNVLRTILRANVNVITLMDKKIYTKESLNDLMSVMYSSMLMAQANEESAKKSERILKSFDARLDALNDGKPIQYVGIFPGWIDNKGTKQQTNFVINKKAKIVQRIFEMYINGISFNEIARTLNAEKVPQVAKRRHKNFTNLWSSAKINHLLKNRCVLGDLYIRKTGDTFKNYYPQIISNDDWDVVQSMTKTKKTTKVSGRKSINIFTGKMFCSGCGQKYYFETDDKKLKSGIKYYHMLKCAGRRGLKCSSKSIKYDDFLESTPNMFGMLTSSKKDNSSKIDEIKSKIKEIAEQTKELESKVLIIEDLNSKDELDFTTYLKESSKLQKKIRENDARIASFKLNISRLSSDNKLENFDKNDPISVSKARKFINDNFAGFIISSDSRFCIALYNDGQVLQFKIKNSKIEKKESQVKNIDNFESFNEFYKLKEQVLETYKNGTMDGRFMEILRATNYWGVETPEKDYTLD

SEQ ID NO: 7177 - protein, 653 aa, synthetic construct
MFDYDKSIFDGICIPYARFSTTEQDKVGRKSLERQLEEAKRYASQNNLYVSDDLIFTDKGVSGFAKQGQLSKTFEKGQMALLLDVLEDVPFKERENIYLCFHAFDRFSRQHPEVAYEQFSRILKRGFNIVTTIDDCLYSSKEADLESMLISIIKMSSAHYESEVKSVYVSDAHRRRRETLEYLYNHPTQKGKHKHIGLKQSTTPRWIIESEIIYDFVDDNGVARKESFSKFSLDEAKAEIINQIFDWKIQGLGHTKICQLLNQKQIPTFEDGNCRKAEKWHTFAISNLFKNKSTIGTFTLKTVEDEEYFCESERIFKTRSKKVDATSEMENYFPAVVTVEKYEAALKIIAMNNKGEKRSEPEDKTHVFSKVLRCTCGGRLVFKGTRKTGKSEKADWFEYLRCEKAILKDGCDAENIIYKDFEMAFLRFATSSNYTVFSTTQSKLKTKLKRLSIKQSYLNSEKEQLLLEEKGLNKTFESIVTQNLDATLLLDSISKNKSSLNTVQNELVKIDNQVKGVEREYKKSGKPIDKRTIKKELRSEDYSKRLLMRKAVNQQLRQNVVHMEVCSTKLLKFVIVCFDDYVIRTYAYQDEFSSDLMFNFIKINVENLDESEVYDLIIHLFKEVRISLSGENAVITNFDLKVHLSGIKEKYLK

SEQ ID NO: 7178 - protein, 558 aa, synthetic construct
MKQPLAYSYVRFSSPEQAKGDSFRRQTEAARKYCNKHGLELADLRFHDLGVSGYKGNHFTQGALGDFVEAIEQGKVQGGSYLIVESLDRLSREEVDIAFSRFASILRADVNIVTLQDGKVFTKTSLKNTTDILTSILVMLRAFEESETKANRIREARDEKHRQARENKTPTGYRPPDWIRTVKDADSGKPKYELIPERAEVIKRIYHLNNSGMGAIVIARLLNEEQIPPWGRSKTGWQTSYIKKILKARTVLGEYQPHVVINKVREAVGEPVFGFYPAVIDPNTFKLAQMTMTARDKRSGGVRKDKVNNLFTGLAKCKHCGNTMHFVDKGKPPKGNQYLLCSLAKTGAVHNGVSCKRASIRYQETEDAVLTVAATLNLKIESPTNKGEVERLQSQLSQVYADLGTAEEAIVRITNAIAELPDSSGLISKLADLEQQKREKKSEYQAIEKRIDELDLIPRASNVWNDLQQTLKALREDAADRTKVELRTKINNQLLNSIDRIEFDNHAKIATIHIDEERSVDIRFHDKMRGYMVKSSWDKCVYQPYTFLVNSALRAKKH

SEQ ID NO: 7179 - protein, 598 aa, synthetic construct
MDEKPRIAHIYSRVSKGTQVKGDGLRRQIEIASKFIEDVNISNSRDGLPVYTLADSPIYDRGLSAYFGLNTDENAGLGAFLKAAENGQVEKGTLLIVEAIDRISRLPVDDARALFARFKKYGIDVAICRFNLIIYHDKSSDLGQDLLITTAIHLAHLESEQKSKRIRARFTHKRLLEKEGGERRTSMSPSWIELSKDKTHFVLIPERARIVRKMVDLKLQGWGAHRITVYLNEQGYPCWNRSNTWYTKIVEKYLKMIQLVGDFQPVEHVHGEKGVRKEPVGDVIKGYYPALITEEEWIRLKASFKRSGGRQTGAFSNLFSCMLYCPTCGSCMSYFKPNRGRIKVRCRKQIDKQGCDQRALNYEEIEPRLIKALAGLDYAKINNNSFASLQKELNTLEAQVAELEASADDIKTQMLEESDPRIISVYVNKLKAIYTEQDKAKARFEKLSTQTSDYDVNTLEQLQLERNEDRERYNGFVRSFVKYVIASDSKLGKPLRIVFKSEAVGEVPVFFNDDKNNKAISDIFTAQKDVNEAAPIRLINMSRVHGNLGKLAAIDTVPVPDDLGDALERIKYLFAVRQAVLQNPEKWQAIADDARLFE

SEQ ID NO: 7180 - protein, 604 aa, synthetic construct
MKKAYSYIRYSSPQQASGDSYRRQLAATQVYCEANGYELDAELSIYKELGVSGFKGDQENLKQFINDCETGKVKKGSLLVVENLDRLSRKALNVAMRQFLTLLEYVDIYTLQDKKLYSNADNHNDSDNQLIDIMTSLIIMSRAHEESITKQKRLREAWEEQRINAHKVKMSGCYPHWLIRSDDKTEFYIKEDRAQIIKDMFDMCINGLGATQIVRSLNKNIEKYPPPSPKKEFWVRSTVKRLLSDRRLLGEHQLYKGHHAKREPVGDPIKDYFPQVIDEKTFTNAQISLKSRKIGAGKTKEDVFSNVFRGFLRCGHCDSPVEYVNKASKQASTLYLTCSNAKRGGDCSHSKHYRYLPLEHMLIHLSTANGFLPKPEKPSDLEQELEIIKEKKEQANKKLSVLLEKNFTAPIILEKIEELTNDVEQYSSQIAEIEDKLLSIKPDYTYEDLYHDAVLESDLLKKFSNRAMFNSYLRKKIDSAYLYSIGLFPCIAFKMNNKSVHVLVLDERYNFGGCSLPNEKDKLIRLNGEGIEAIDEMIWKMFGNAIDFINGIDEENEELNKIIRKISLLMSKFIMDNQNQELISEFNSLLNASIEKVIKIDNFN

SEQ ID NO: 7181 - protein, 524 aa, synthetic construct
MKTAYSYIRFSSKAQELGDSLRRQLDDTRRYCTEHNLKLSETSYQDLGISAFKDRDRASLEDMLSAIKNGSIQHGSVIILESVDRLSRAGIDKTQEIVKSILRHDVEIVSLHDGLHLTKDSLNDLIAVIRLAASADLAHQESVKKAERVKAAKKRQKDDARQGKAIKKRLVWWLSRESDTYKLNENAQYVRKMIKLRQQGAGYHKIAMKLNELGIQTRYGKTWSDTAVREMLSHDALYGGYQVGTVKDGKFIKEELIHNYYPPLISYSEFKELQSEYVNRTGGHKKHNHLSGLVRCGHCGSAMQKKLSKRTTKKRTIEYKQWICVASVSGGCEFKNGIRDLDEHIFKVAKNLVIENSATISEAEDTAIARVDELQSRLIMQKDKLANADGVTFDLILEATERTKAELDSASSHLAQLQANSRDITTEDVDRLAEYSDDAVRFNLHLKKLIQRIVVSKKGDNLWHVKLFQRNQHTVNLTVFRETQRSAFKYYLSGSEDRASLIEDAKRGFAEMHEWEKDYCDEVT

SEQ ID NO: 7182 - protein, 523 aa, synthetic construct
MERQEAISYQRFSSDRQRNNSSLDRQSEAIKTWLRMNPNVVLVDEYIDEAMSGWSGKHLEKGSLGRLLQAIEDGIVKSGSIILVEHFSRLSRQNIDKTEELLRKIWQHDITIATIRDNGLYPPSTINNMALRIRLIVEIEQAFKESEWRSAKVKGSYEKREKDAKLGITPRMRRPFWLDSEGRLNEYSVAVKDMFEMYLAGKGQQRIIVALREKYKDANPIKKLNPSTVMRWLQSDVVRGYWRGNKVYEAAIDDETFYNVQAVHKGRLYKNVKPDRNWPLSGLMQCGVCGGGMSIQKTKNTLPILRCSTKQRDRSCDRVKTMPYFIAHTYMFSYVKKYALRKYTKNTSSQEFKNRIIQIEHELSKLIPQLEDEKKHYNEAKRQGKNTRLLREIMLETDDKIFELEQELKQLKHSFDNQNDYMISKNAVELVLTPRNFNLEMHKLNFRIVIDEDELSVVGLEEKPPKIKYLGYSRKAKTYDYEVMGMKHSWPTSNITEEILMLEGLENFVEQSPYLKKLMAKNH

SEQ ID NO: 7183 - protein, 498 aa, synthetic construct
MTQQTNPKAYLYIRFSSKRQELGDSIKRQQDAAEYWCGRNSVTLSEQTFEDLGISAFKEGGKRPALVDLIEAVHLGKIPRNSYILFEDTDRLTRRGFKHALDLVHELVSAGVYMVTLGNGQVYDSKNIQSLSSSLPLLLDADRAHLESQRKSALIRAARKTERENREIKGKMPFWLKAVDGKAIFTEHKKAAELIVDYKLKGYSILRIARELNEAGIPSPNGTTWSSPSIRISIKNRSLYGAKEYFEFRDGKYKSIEIVPDMFPAICDELTWLAIQPQKKQNNGARTDVNPLSKLIKCGKCGGGMQMRTSTVKGKLRKYRKCTGVIEGRCDMKGNAREADQIILDQLRHLTFEPITTKSTSKKELELATQKLSELNEAVHLISSPVATARLYEDIALQEEKVNLLKAKVEDEMTVPEKTSFKKILDLPTVAEQSQYLRRLLEHVSLTKIDDKSWRFEIFMRNKHRVVFSVLYKWQTHEILFKSDTEQMKDWLNDFVEQ

SEQ ID NO: 7184 - protein, 531 aa, synthetic construct
MAIAYSYIRFSSSQQSQGDSLRRQTQLAEKYCIENNLTLSDTTFRDLGVSAFHSTNSQEDSGLGQFLSALNQGRISEGSYLLVESLDRLSRAKVQTALRQMLNIIELGVKIVTLMDNRIYDQESDTTDLIISLTIMERAHNESKTKSERIKAAWVHKRQNPTTTNRHSSTPFWLSLNADKKTYKLKEKYVEVVRKIYQLSIDGWGVIKIVRHLNESNIKAPKGGSWATTTVSRVLTSKAVLGHYEPMQNRKSLNLTIEDYYPSIIDEATYYLSRQRQNERSKPEAAGRKTNYPNPLSQIAKCKLCGSSMYYENKSKSLKYLTCREFKKGSCTNKPIRIELIYRFIYEVFNSPMYYQYQAKLVEKSNKKDNNKLEELEAKKTEQENALRGLLSMSNDFSNTIIQEEIKVRSERIESFKNHIENVKAEQAVEHTRSTHINFTEALQLAVNAFRFPLEKVQVEELSCEELFNTRVRLNRILKHAFNSLSIYHCGESERITIETEVMEGFSEGLKYETTRQSIKEPLSSRVWSVR

SEQ ID NO: 7185 - protein, 525 aa, synthetic construct
MKTIRDVLEKGKKGAFYARVSSDRQTIDAQRHHVYEFIKNYECEIVKEYVDHGESAFKKKLIKRPQIMTLLRDVEQGKYDFVITYADDRLARSEIEHVQIRVIMKEAKTDVILTSTGELYTERDIITQLIREGGTRYEVERISARTKDAYGQRTDYGQWMGGPVPFGYVQDENTKNFFIIEDEKEIVLKIYRLYQNGEGFADIAKKLNEQKMKTNLIHWKKERVKHILTNPIYAGYVTFGRLKPGSGNSIEDLSKWKMAKCEEIPAIMTKEEWLATFQMFEKKRNKELPPKQLKTEYVLRDLIYCKSCDAPLLPKNQETRGKNGKKYGMKKYICSNKLCNVWFSTDELHALVFDSVIKEITDKVISKSQTELMYEMEKILEKDIKQIKKEIQRLKKQVDNCLVWTKDAEREIDELYNKKKKLVEVDPKIDPLLDVMLDYRLHLSHEIRETEELIAKKESEMKHIEDVDSNQSMLQKNVLQAFRIEFTNLQKDMKRVRQFLVYLIDKIIIDQNGKTEYILKINLEQ

SEQ ID NO: 7186 - protein, 547 aa, synthetic construct
MKLLVTYIRWSTKEQDSGDSLRRQTNLIDAFYAKHKDEYYLLPAHRYVDKGKSGFHQQHKTQGSDFRRMFDNVMSGAIPAGSLIVVENFDRFSRADIDTAIDDVRQMLRKGVSILTLVDGELYDKSALTDPVKLIKHIIIAERAHQESLVKQKRIAQVWNHKTQLARELKKPMGKQAPGWLELSEDGSHYIVDEDKAALVNLIYDKRLSGMSMFAITKWLNEQGYPTINQRKVRISKTKRPDGNWSSLSVKHILTSRSVLGYLPAKISTEDRKTVLREEIEGFYPQIVTDSKFYAVQQLLKDTGKGKTSSGEHWLYVNILRGLVRCRCGLVMIPSGIRKPVYQGVYRCNARHEGRCNYGTVSRKLLDTQLCSRLFSKLSQLHDDATDTARMDELQRKLNTVDSELEKLTETLIQLPNITQIQEALRIKQVEKDELVVQLSREKARVKSVSNLDLSGLDMASVEGRTEAQIIIKRLVKEIVVSGNEKLVDIYLHNGNMIRGFPLDGKDDHTLTLEEATDEMQSLDDMLIFGEPVTRIYPAGDMEEVDA

SEQ ID NO: 7187 - protein, 520 aa, synthetic construct
MKKAVYCYARVSSRGQAKDGYGMSRQQTMLRDYVAAYDDSQHNRGYEFGDISWLYAEGVSAYSGKNIEDGSVLKNFIDDVLQKKITNSVLVIENLDRFSRAAPNRAAGLFLSLINAGCDIHEVETEMIHHQYSDLNIISGGLQRAHNESKRKARLSIKNWDERIKNTIEGTSVLTHRVPSWIEVKNNKYVIKEGEAEKFNLIFKMYADGFGPAAIRDELKKKKMQINESEPTINHLVKIIKDQRLIGKFNSTGRKILDGMIIYPVVIEQSLFETVNDLRKQRNPLGKVNVKANNLFAGLCICMNCGRYVQVNSVDKKGDTYFRCGGSLLKIDKCKERGFKYKIIENALLEHIRNFDFSMLRSNDDDIQIKINYLSIELATKENYSSEILADMEKEYIPDPNDRRILKNLQRRISEIRTEITRLKQSNVGYEKFSDLKESCTDDLLDSKNTNLRLNFNVKIKRVIKNIKMKRLGNAIMLVVNYIGVNEKQAMVIDSKTGDVKFMAVQNDDLKSVEYLINKS

SEQ ID NO: 7188 - protein, 506 aa, synthetic construct
MRHVITYLRYSSAIQGAEGADSTRRQNDLFKQWLKKNSDAQVVASFNDEGLSGYKGKHLSGQFGDMLSRIESGEFSEGTILLVEAIDRIGRLEHLETEALMNRILGNGIEIHTLQDGLIYTKDALADDLGISIIQRVKAYIAHQESKQKSFRVSQKWEQRAKLALAGEQRLTKMVPGWIDPDTFKLNEHAETVRLIFKLLLDGESLHNIARHLQSNGIKSFSRRKDANGFSVHSVRTILRSVTTIGTLPASQRNDRPAIPNYYEAAIDAATFNKAQEILDKNRKGRTPASDNPLTINIFKGLFRCQCGASVHPTGTKNKYQGVYRCNNHLDGRCDVPPLKRKPFDKWMIDNFLGMIDVGNDGEAEGKIAALQHEVEIVTARIKKATALLLEMDDIDELKIQLKELNQKRTELQTTIDSMRRKTSLSDKGLPQLKDIDLMTKAGRVECQLILSKHLKGLTLGKDSVTVTLQNDTEITIPTNPLPLNDGSPIFEIADKELLEIDAYQL

SEQ ID NO: 7189 - protein, 506 aa, synthetic construct
MRTVITYLRFSSATQGAEGADSTRRQNELFKQWLRKNSDAQVVASFSDEGLSGYKGKHLTGQFGDMLARIEAGEFPASTILLVESIDRIGRLEHLETEALMNRILGNGIEIHTLQDGLIYTKDALADDLGISIIQRVKAYIAHQESKQKSFRVSQKWKQRAKLALAGEQHLTRNVPGWIDPDTFKCNEHAETVRLIFKLLLDGESLHNIARHLQSNDIKSFSRRKDANGFSVHSVRTVLRSESVIGTLPASQRNDRPAIPNYYEAAIDAATFNKAQEILDKNRKGRTPASDNPLTINIFKGLFRCQCGASVHPTGTKNKYAGVYRCNNNPDGRCDVPPLKRKPFDKWMIDNFLGMIDVGNDGEAEGKIASLQHEVEIVTTRIKKATALLLEMDDIDELKIQLKELNQKRTELQTTIDNMRRKASLTDKELPQLKDIDLTTKAGRVECQLILSKHLKGLTLGKDSVTVTLQNDTEITIPTNPLPLNDGSPIFEIADKELLDIDAYQL

SEQ ID NO: 7190 - protein, 448 aa, synthetic construct
MEYGYIEAGSVLLVESLDRVSRQDIDTAGEQLRKILRSGVEVVTLVDNEWYTKESLKDSLSMIKAMLVMERAHEESAMKSTRLRSMWAAKRERAANGEIMSKRCAAWLKVSQDRSHFEFIPENVKAVQRVFQLRLEGLSHVKIAKQMNDEGFSTLNQFKSVTGGWSQSSVTELLSNRSVIGFKVPSKSMAVKGVSEIPNYYPSIITDEQFYAVQQLKQGSGRKPSSDLPLLTNLFKGVLRCSECGFIMVVAGVSAKRSGIYKCSMKSEGRCNSVGFSRLQTDRALVQGLLYNTNRLSLNRDNGSAIGSLQSDLEKLHKQRERLIKLAMLADDTESMAKDLKALNSQIKDAEKAVSEVHQREQSSQLETISHLDLTVKKDRIEAQIIIKRIVKEIRLNTARKKCDVFLHNGLRLLNFPLDRVVDGEIFLEVLPVLEADEFDFDTYRMIE

SEQ ID NO: 7191 - protein, 507 aa, synthetic construct
MKRVISYIRFSSERQAKGDSLRRQSKMVTDWLKAHPEYYLDQDLSFRDLGVSGFTGKHLKGGLGDFLTAIEKGLVKAGDTLLIESLDRLSRQDVDQASELLRNILRSGVDVVTLSDGEHYTKESLRDPLSLIKSILIMQRAHEESLRKAERIQAAWDAKKEAAKAGIKISRRCPAWLKLNDDRKSFSVIPEKVETVKRCFQLRLEGKSIWEIVRTLNAEGHQTLNQYKAGKFGQTSVQDLLKNRSVIGYFTPKGCEEISGYYPAIIDETTFYKVQQLSYARYGRKPASDKPMAVNLFKGVIRCSECGHALIITGFSDTRNGIYRCPLRNENRCSAKGLSRKQTDGTLLALLSRLDRFDSDMTNTIDTLKLHREHISSNIEKLVQLSLEIEDLSAITSKLRQLKNELSQVDADIEKETQRLKSIDVGCLSDCDLTTKAGRIEAQLIIKSAVKEVVLNTAKRRCKVTFHNGKVIDLPITENPSEDVTEAIQSLSEVTERGLIDVDVVEI

SEQ ID NO: 7192 - protein, 506 aa, synthetic construct
MRSVITYLRFSSATQGAEGADSTRRQNELFKQWLRKNSDAQVVASFNDEGLSGYKGKHLSGQFGDMLSRIESGEFPEGTILLVEAIDRIGRLEHLETEALMNRIIAHGIEIHTLQDGLIYTRDALSDDLGISIIQRVKSYIAHQESKQKSFRVSQKWEQRAKLALAGEQRLTRNVPGWIDPETFKLNEHAETVRLIFKLLLDGESLHNIARHLQSNGIKSFSRRKDANGFSVHSVRTILRSETTIGTLPASQRNDRPAIPNYYEAAIDASTFNKAQEILGKNRKGRTPASDNPLTINIFKGLFRCQCGASVHPTGTKNKYAGVYRCNNHLDGRCDVPPLKRKPFDRWMIDNFLGMIDVGNDGESERKIAALQHEVEIVTARIKKATALLLEMDDIDELKIQLKELNQKRTELQTTIDSMRRKTSLSDKGLPQLKDIDLMTKAGRVECQLILSKHLKGLTLGKDSVTVTLQNDTEITIPTNPLPLNDGSPIFEIADKELLDIDAYQL

SEQ ID NO: 7193 - protein, 507 aa, synthetic construct
MKRVISYIRFSSEKQAKGDSLRRQSKMVTDWLKAHPEYYLDQDLSFRDLGVSGFTGKHLKGGLGDFLTAIEKGLVKAGDTLLIESLDRLSRQDVDQASELLRNILRSGVDVVTLSDGEHYTSESLKDPLALIKSILIMQRAHEESLRKSERIQAAWNRKKELISEGIKISKRCPAWLKLNDDRKSFSVIPEKVETVKRCFQLRLEGKSIWEIVRTLNDEGHQSMSQYKPGKFGQTSVQDLLKNRSVIGYFTPKGCEEIAGYYPAIIDETTFYKVQQLAYARYGRKPVSDKPLSVNLFKGVIRCSECGHALIITGFSDTRSGIYRCPLRNENRCSAKGLSRKQTDGTLLTLLSRLDRFDSDMTNTIDMLRLHREHISSNIEKLVQLSLEIEDLSAITSKLKQLKGELSQVDADIEKETQRLKSIDVGCLSDCDLTTKAGRIEAQLIIKSAVKEVVLNTAKRRCKVTFHNSKSITLPITENPSDNVTEAIQSLSEVTERGLIDVDVVEI

SEQ ID NO: 7194 - protein, 507 aa, synthetic construct
MKRVISYIRFSSEKQAKGDSLRRQSKMVTDWLKAHPEYYLDQDLSFRDLGVSGFTGKHLKGGLGDFLTAIEKGLVKAGDTLLIESLDRLSRQDVDQASELLRNILRSGVDVVTLSDGEHYTRESLKDPLALIKSILIMQRSHEESLRKSERIQAAWNRKKELISEGIKISKRCPAWLRLNDDRKSFSVIPEKVETVKRCFQLRLEGKSIWEIVRTMNAEGHQSMSQYKPGKFGQTSVQDLLKNRSVIGYFTPKGCEEIAGYYPAIIDETTFYKVQQLSHSRYGRKPVSAKPLSVNLFKGVIRCSECGHALIITGFSDTRSGIYRCPLRNENRCSAKGLSRKQTDGTLLALLSRLDRFDSDTTNIIDTLKLHREHISNNIEKLVQLSLEIEDLSAITIKLKQLKNELSQVDADIEKETQRLKSIDVGCLSDCDLTTKAGRIEAQLIIKSAVKEVVLNTAKRRCKVTFHNGKVIGLSITETPSEDVTEAIQSLSEVTERGLIDVDEVII

SEQ ID NO: 7195 - protein, 507 aa, synthetic construct
MKRAISYIRFSSEKQSRGDSLRRQSKMVNDWLKAHPEYYLDQDLSFRDLGVSGFTGKHLKGGLGDFLTAIEKGLVKAGDTLLIESLDRLSRQNVDRASELLRNILRSGVDVVTLSDGEHYTRESLKDPLALIKSILIMQRSHEESLRKSERIQAAWNRKKELISEGIKISKRCPAWLRLNDDRKSFSVIPEKVETVKRCFQLRLEGKSIWEIVRTLNDEGHQTLNQYKAGKFGQTSVQDLLKNRSVIGYFTPKGCEEITGYFPSIIPETDFYKVQQLSYSRYGRKPVSDKPLSVNLFKGVIRCSECGHALIITGFSDTRSGIYRCPLRNENRCSAKGLSRKQTDGTLLTLLSRLDRFDSDTTNTIDTLKLHREHISSNIEKLVQLSLEIEDLNAITNKLKQLKNELSQVDADIEKETQRLKSIDVGCLSDCDLTTKAGRIEAQLIIKSAVKEVVLNTAKRRCKVTFHNGRAITLPITENPSEDVTEAIQSLSEVTERGLIDVDVVEI

SEQ ID NO: 7196 - protein, 506 aa, synthetic construct
MRSVITYLRFSSAIQGAEGADSTRRQNDLFKQWLKKNSDAQVVASFSDEGLSGYKGKHLTGQFGDMLARIESGEFSEGTVLLVEAIDRIGRLEHLETEALMNRIIAHGIEIHTLQDGLIYTRDALSDDLGISIIQRVKSYVAHQESKQKSFRVSQKWKQRAKLALAGEQRLTRNVPGWIDPDTFKCNEHAETVRLIFKLLLDGESLHNIARHLQSNDIKSFSRRKDANGFSVHSVRTVLRSESVIGTLPASQRNDRPAIPNYYEAAIDAATFNKAQEILDKNRKGRTPASDNPLTINIFKGLFRCQCGASVHPTGTKNKYAGVYRCNNNPDGRCDVPPLKRKPFDKWMIDNFLGMIDVGNDGESERKIAALQHEVEIVTARIKKATALLLEMDDIDELKIQLKELNQKRTELQTTIDSMRRKTSLSDKGLPQLKDIDLMTKAGRVECQLILSKHLKGLTLGKDSVIVTLQNDTEITIPTNPLPLNDGTSIFEIAEKELLEIDAYQL

SEQ ID NO: 7197 - protein, 552 aa, synthetic construct
MSTITKIQSYQRDVKQLRVAAYCRVSTDNIEQLESLENQRIHYQEYISNHSDWQLAKVYYDEGISGTQLTKRDALKELLADCHNHRIDLVVTKSVSRLSRNTTDCLQIVRELQQLNIPIIFEKEHINTGAMASELFLSILSSIAQDESHSTAGNLRWAIRQRFASGKFRVSSAPYGYSIEDGNLVINRAEARIVREIFQQFSKGMSASQIAKGLSHKHIPTKRGGQWRSNTVINILRNINYTGDMLCQKTYRDDQYHRHFNQGELTQYLIEDHHPSLVNHETFNRIQALLKDAAQKRHIETDSHKYQHHYLFSGKIICGNCGTTFKRQTRPNKICWACQRHLKSAKQCPIKAVPEASLEVAFCNMMNKLVYSRKFLLQPLLENLQVQVNSDTHGRLNSLTERIKANNHKAETLTELMQSGLIDKSIYVNQTAQLEQDTYQCREKAKELHSRNTDSANSFEDVRSLLHWCQQDQELSGFDKTPFQDFVQQIVVHSSIVVFKLKCGLKLTEKLTKAVTINNHFYRNIIRQRFNEPIKQAEYLYSIIESEGDLIG

SEQ ID NO: 7198 - protein, 525 aa, synthetic construct
MGKVRIIPAHQQKGNSVHHQRSPQPFEKLRVAAYCRVSTDYDEQASSYETQVAHYKELIQKEPTWEFAGIYADDGISGTNTKKREQFNKMIAACKAGKIDLIVTKSISRFARNTIDCLKYIRDLKAINVAIFFEKENINTMDAKGEVLITIMASLAQQESESLSQNVKMGIQYRYQQGKVFVNHNHFLGYTKDAQGNLVIEPEEAKVIKRIFYSYLNGMTMKQIADSLKADGILTGGKTKNWRSSSVAKILKNEKYMGDALLQKTYTVDFLNKKRVKNEGIMPQYYVENDHPAIIPKSVFMQVQQIIKQRRNGITTKNGKHRRLNGKYCFSQKLFCGKCGDILQRNMWYRPEKVAVWRCASRIRRSKIGRRCMIRNVKEPLLKEATVEAFNQLIEGHELASKQIKANIMKVIKSSKGPTLDQLDKQLEEVQMKLIQAANQHQDCDALTQQIMDLRKQKEKVQSRETDQQAKLHNLDEINKLVELHKYGLVDFDEQLVRRLVEKITIFQRYMEFTFKDGEVIRVNM

SEQ ID NO: 7199 - protein, 506 aa, synthetic construct
MRHVITYLRYSSAIQGAEGADSTRRQNDLFKQWLKKNSDAQVVASFNDEGLSGYKGKHLSGQFGDMLSRIESGEFSEGTILLVEAIDRIGRLEHLETEALMNRIIAHGIEIHTLQDGLIYTRDALSDDLGISIIQRVKSYVAHQESKQKSFRVSQKWKQRAKLALAGEQRLTKMVPGWIDPDTFKCNEHAETVRLIFKLLLDGESLHNIARHLQANNISSFSRRKDANGFSVHSVRTILRSETTRGTLPASQRNDRPAIPNYYEAAIDAATFNKAQEILDKNRKGRTPASDNPLTINIFKGLFRCQCGASVHPTGTKNKYAGVYRCNNNPDGRCDVPPLKRKPFDKWMIDNFLGMIDVGNDGEAEGKIASLQHEVEIVTARIKKATALLLEMDDIDELKIQLKELNQKRTELQTMIDNMRRKASLTDKELPQLKDIDLMTKAGRVECQLILSKHLKGLTLGKDSVTVTLQNDTEIIVPTDPLPLNDGTSIFEIAEKELLEIDAYQL

SEQ ID NO: 7200 - protein, 407 aa, synthetic construct
MKPGKIRVCAYARVSTMTEKQQESLTNQQAYYNHFYHNKKDVDFIGVYYDQGISGKLAKRPGFQQMLEDCRAGKIDVIHTKSISRFARNTELLLAVSRELKTIQVDIFFEEQNLHTLSNEGEVMLTVLASYAEEELRNMSENQRWAFQKKFQRGELVINTKRFLGYDKDENGELIINPEEAKIVKRIYNLYLSGMGVHVIAKLFNEEKLSTVDGGKWYSSTITNILKNEKYKGDAILQKYYFAEIKAKQRLNQGQVQQYLLTDNHEAIVSREDWEAVQKRLKQKRKAKLSIDYNRRYPLSGLLKCEHCGSTLKRQKYYKGKVVWVCSKYIREGKASCIGMRVPDSAVQDWSIDEPTVVKEENISGKKHYSYSCQENYTSRAESTHSENPDGGLLPSVHRPRRTAIKL

SEQ ID NO: 7201 - protein, 435 aa, synthetic construct
MAAYCRVSTDQDEQLSSYENQVRYYQDYIRQNPLYELVDIYADEGISGTNTKKRTEFNRLIGDCRKGKVDRIIVKSISHFSRNTLDCLKYVRELKELGIGVTFEKENIDSLDAKGEVLLTILSSLAQDESRSISENATWGIRKKFERGEVRVNTTKFVGYDKGENGNLIINEEQAKIVRRIFRDFLQGETPESIARTLKEEGVPGWNGKVNWYPTTIQRMLQNEKYMGDALLQKTYTVDFLTKKRSENQGQVNQYYIEGNHEAIINKEEWELVQLEVDRRNQFRQDNHINFYIIQCEQNPFTCKVFCKECGGLFGRKNWTTSRGKRPVWQCNNRYKVKGVQGCTNRHIDEETLQQAFLRAIEILHENKGQLLGKWAIFDEEQKLEKYHAAQLKELLDSEQEAFDGRKMCQVLEKITLGEDGSITIKFLEGTEVNL

SEQ ID NO: 7202 - protein, 470 aa, synthetic construct
MKGESELDKKAAIYIRVSTQEQATEGYSIQAQTDRLTKYVEAKDFILYKKYIDAGYSASKLERPAMQELIQDVQSKKVDVIIVYKLDRLSRSQKDTMYLIEDIFRPNDVELISMQESFDTSTAFGSATVGMLSVFAQLERKSISERMITGRVERAKKGFYHTGGQDRPPAGYQFNSDNQLIINEYEAAAIKDLFRLYNDGLGKSSISEYLKKNYPGKNKWLPSSIDRMLKNSLYIGKVKFSGAEYDGIHEPIIDEVTFYKTQKEIARRKQSNTKRYNYVALLGGLCECGICGAKMANRRAVGRKGKVYRYYRCYSKKGSPKHMMKTDGCSSKAQQQFIIDEAVINNLKNIDVEAELKRRSAPQTNTSLISSQIESIDKQINKLIDLFQVDSMPLDVISEKIDKLNKEKQSMEKLLERKNKLDKTELQHRFDVLKSFDWDNSSIESKRVVIEMLVQKVIIHDNSIEIILVE

SEQ ID NO: 7203 - protein, 526 aa, synthetic construct
MYRKFIMRTAYAYIRFSSEKQSAGDSVRRQQSLIDSWVKNNPDYILSQKTYKDEGLSAFTGKHAAGDLGRLMNDISNGSITAGDVILIESLDRLSRENISTATDRLKAILIHGVNVVTLTDQKQYTPESLNSPMDLIMSILTAQRAHEESQSKSKRMREVWAKKRTEAEESGKVITKSCPRWLTVNSDRTGFEPIPEHVESIRLMFEMRLSGKGFAGIAQALNESGRLTLTGRSKGWNQSSVQQLLSNKALIGYKIPSRKAVVNYIEIPDYFPSVIPLEQFQQVQLIGADKQGQRAANDRPMNVNLFRGVMKCAECGATVIVSGVDDKRAGYYSCSFRRLGRCNTSKPMNRGMVDEALIKGLLYSLDRLTTQGQGENPLMKLEAKRADLTERSQKLLAALEIADDVSAIATRLKAVTDEIRAIETQIKTCKDLEQVHTVQSVQGMDLTVKSQREEVQLLVKKTFREINLDGIRKTVNVYLHNGLTLLNVPVNQIVDAGEWIELLPVIGGDTVDFKDISFKAPRYLD

SEQ ID NO: 7204 - protein, 558 aa, synthetic construct
MTKLYSYIRFSSMRQSEGSSYERQIRMAKEIADRHGLELVNDYQDLGVSAFKGANSKTGALSRFLDEIGRSIPVGSWLFIENLDRLSRQDIISAQELFLSIIRRGITIVTGMDNKIYSIETVTANPMDLMFSILLFIRGNEESQTKRNRTNSSALLKIKAHQQNPQSPAVAIEEIGKNMWWTDTTSGRVLPHPVYFPVLQKIVQMRQDGHSAGSILDYLNEHHEPPAPTSNKKHGKWSRAMVSRLFTTKALIGIKTVNVDGVEYELRDYYPRVLSDSEFYFLRKNIIKKAWDYGHIKEKVIPLLSGIGVLRCVHCGATMVKQSAVNGKREQYRYCCDGRKSGRTDCPYPNWGFRAATLERAVLQLLADKIWIAEDKTNPIPEIQVKIDDISRKIDNLINLSAMMGATKELANQITDLNMQREALHEEIRLFEREMYSVDSQGWEKLAQFDLSDVQNEERLKVRMKIKGALHEIECSRLDSKKNLFVLVYLDGLRQRLVIENNRGLKKGQIIVDLKTINDRQIIESAGMVLHPCIEMIVDKNWKAPEEIPGLLSEEFGI

SEQ ID NO: 7205 - protein, 471 aa, synthetic construct
MESGYIEAGSVLLVESLDRVSRQDIDTAGEQLRKILRSGVEVVTLVDNEWYTKESLKDSLSMIKAMLVMERAHEESAMKSTRLRSMWAAKRERAANGEIMSKRCAAWLKVSDDRSHFEFIPENVKAVQRVFQLRLEGLSHVKIAKQMNDEGFSTLNQFKSVTGGWSQSSVTELLSNRSVIGFKVPSKSMAVKGVSEIPNYYPSIITDEQFYAVQQLKQGSGRKPSSDLPLLTNLFKGVLRCSECGFIVVVAGVSAKRSGIYKCSMKSEGRCNSVGFSRLQTDRALVQGLLYNTNRLALNRDNGSAIGSLQSELEQLQKQRERLIKLAMLADDTESMAKDLKALNRQIKDAEKAVSEVHQREQSSQLETISHLDLTVKKDRIEAQIIIKRIVKEIRLNTAGKKCDVFLHNGLKLLNFPLDRVVDGAQWLEVLPLIDGDEFDFEGFTTKPRHLVLEEAPEWVKEIEAQPNQPL

SEQ ID NO: 7206 - protein, 506 aa, synthetic construct
MRSVITYLRFSSATQGAEGADSTRRQNELFKQWLRKNSDAQVVASFNDEGLSGYKGKHLSGQFGDMLSRIESGEFPEGTILLVEAIDRIGRLEHLETEALMNRIIAHGIEIHTLQDGLIYTRDALSDDLGISIIQRVKSYIAHQESKQKSFRVSQKWEQRAKLALAGEQRLTRNVPGWIDPETFKLNEHAETVRLIFKLLLDGESLHNIARHLQSNGIRSFSRRKDANGFSVHSVRTILRSETAIGTLPASQRNDRPAIPNYYEAAIDASTFNKAQEILGKNRIGRTPASDNPLTINIFKGLFRCQCGASVHPTGTKNKYQGVYRCNNHLDGRCDVPPLKRKPFDRWMIDNFLGMIDVVSDGETERRIAALQHEVETVTARIKKATALLLEMDDITELKAQVKELNQKRTELQTTIDTLKRKTSLTDKELPQLKDIDLMTKAGRVECQLILSKHLKGLTLGKDSVTVTLQNDTEITIPTNPLPLNDGTSIFEIADKELPEIDAYQL

SEQ ID NO: 7207 - protein, 559 aa, synthetic construct
MKTKLYSYIRFSSMRQNDGSSYERQIRMAREVATKYDLELVNDYQDLGVSAFKGANSKTGALSRFLDAIGRSVPVGSWLFIENLDRLSRADIVSAQELFLSIIRRGITIVTGMDNKIYSLDTVTANPMDLMFSILLFIRGNEESQTKRNRTNSSALIKIKSHQENPQNPAVAIEEVGKNMWWTDTTSGYVLPHPVYFPVVQEIVELRKNGRSTAEILDHLNETYTPPPAVSNKKHSKWSRAMVERLFHTRALIGIKEVSVDGVNYELKDYYPRVIDDATFYHLKKNIGARAWNFGDKEEVKPIPLLSGIGLLKCDHCGCAMVKVKGTNKRSDQYRYTCDATRSRRLDCEHPNWSFRGDQLEKAVLQLLADKIWIAEDKANPVPALKVQVDEISRKIDNLIALSAMTGATKELADQITTLNSERETLYNQIKMAEEEMYSVDSQGWEKLAEFDLEDVYNEERLKVRFKIKQALKRIGCSRIDRNKNLFVLEYIDGKTQRVVIENSRGTRKGRIFIDLKTINDRQILESNGLVLHPCLDMLTDKNWKPEEEIPGPLQEFGI

SEQ ID NO: 7208 - protein, 506 aa, synthetic construct
MRTVITYLRFSSATQGAEGADSTRRQNELFKQWLRKNSDAQVVASFSDEGLSGYKGKHLTGQFGDMLARIESGEFSEGTVLLVEAIDRIGRLEHLETEALMNRIIAHGIEIHTLQDGLIYTRDALSDDLGISIIQRVKSYVAHQESKQKSFRVSQKWKQRAKLALAGEQRLTRNVPGWIDPDTFKCNEHAETVRLIFKLLLDGESLHNIARHLQSNDIKSFSRRKDANGFSVHSVRTVLRSESVIGTLPASQRNDRPAIPNYYEAAIDAATFNKAQEILDKNRKGRTPASDNPLTINIFKGLFRCQCGASVHPTGTKNKYAGVYRCNNHLDGRCDVPPLKRKPFDRWMIDNFLGMIDVGNDGESERKIAALQHEVEIVTARIKKATALLLEIDDITELKAQVKGLNQKRTEIQTTIDTLKRKTSLTDKELPQLKDIDLTTKAGRVECQLILSKHLKGLTLGKDSVTVTLQNDTEITIPTNPLPLNDGSPIFEIADKELLDIDAYQL

SEQ ID NO: 7209 - protein, 506 aa, synthetic construct
MRTVITYLRFSSAIQGAEGADSTRRQNDLFKQWLKKNSDAQVVASFSDEGLSGYKGKHLTGQFGDMLARIESGEFPEGTILLVEAIDRIGRLEHLETEALMNRIIAHGIEIHTLQDGLIYTRDALSDDLGISIIQRVKSYVAHQESKQKSFRVSQKWKQRAKLALAGEQRLTKMVPGWIDPDTFKCNEHAETVRLIFKLLLDGESLHNIARHLQANNISSFSRRKDANGFSVHSVRTILRSETTRGTLPASQRNDRPAIPNYYEAAIDAATFNKAQEILDKNRKGRTPASDNPLTINIFKGLFRCQCGASVHPTGTKNKYQGVYRCNNHLDGRCDVPPLKRKPFDKWMIDNFLGMIDVGNDGEAEGKIASLQHEVEIVTARIKKATALLLEMDDIDELKIQLKELNQRRTELQTTIDSMRRKTSLSDKGLPQLKDIDLMTKAGRVECQLILSKHLKGLTLGKDSVTVTLQNDTEITIPTNPLPLNDGTSIFEIAEKNLLNIDTFQL

SEQ ID NO: 7210 - protein, 532 aa, synthetic construct
MKVPVWSYARISTLKQVDGFGIQRQVNTINQFLQYVVLDHRLPFTLDTENITQMVAEGKSAFRGKNWNEKTKLGQYRKMVMDGVINDSVLIVENIDRLTRLDPFQAVEIISGLINRGTTILEIETGMTYSRYIPESITVLTMQINRANGESKRKSIMMQKSHANRYGKVSKVRPRWFDVVEIDGVKQYRPNETAKAIQRMYNDYINGIGAAQIVRTYGNTDNGKPWTLVTVLRALSDKRVADDARYPPIIDKDLYDRVQALKASTNKKGNTHQKNMLNIFSGMSRCPVCNQSIIVKRNSHGNLFTVCLGKRTNKTCEARSIAYNALERPLLTAIRGLDFSEVYKHEDNNVLTLRDQWIQNERDIAAFRERLNKASRHEKFAILDELEIMNREQEELTIRLKSVDVPKDIQLTFDDDKLDLDTNYRIELNNRIKKLIQHINIVREDVSKSKYTIYCTIKYWSDALSHLVIIDVDIQRTGTGGTNTLTTTLRSVSSLSLDGTLSGDLDDDALEYWKNVVDGAMALATTMIDSRK

SEQ ID NO: 7211 - protein, 505 aa, synthetic construct
MRSVITYLRFSSAIQGVEGADSTRRQNDLFKQWLKKNSDAQVVASFSDEGLSGYKGKHLTGQFGDMLARIETGEFPEGTILLVESIDRIGRLEHLETEALMNRILGNGLEIHTLQDGLIYTKDALADDLGISIIQRVKAYIAHQESKQKSFRVSQKWAQRAKLALAGEQRLTRNVPGWIDPDTFKCNEHAETVRLIFKLLLDGESLHNIARHLQSNGIPSFSRHRANGFSVHSVRTVLRSESVIGTLPASQRNDRPAIPNYYEAAVSISTFNKAQEILDKNRKGRTPASDNPLTINIFKGLFRCQCGASVHPTGTKRTYQGVYRCNNHLDGRCHVPPLKRKPFDKWMLENFLGMIDVGNDGESERKIAALQHEVEIVTSRIKKATALLLEMDDITELKAQARELNQRRTELQTAIDSMKRKTSLSDKGLPQLKDVDLTTKAGRVECQLILSKHLKGLTLGKDSVTVTLQNDTEIIVPTDPLPLNDGSPIFEIAEKDLLEIDGFQL

SEQ ID NO: 7212 - protein, 509 aa, synthetic construct
MRRAISYIRFSSERQLKGDSVRRQSKLVTDWLDKNPEFYLDSSLSFKDLGKSAFSGKHLKGGLGDFLTAIEKGLVKAGDTLLIESLDRLSRQDIDIASELLRRILRAGVDVVTLSDGEHYTKESLKDPLSLIKSILIMQRAHEESLRKSERVQAAWNRKKELISEGIKVSRRCPAWLRLNDDRRTFTIIPDKVEVVKRAFDLRLQGLSFWAITRTLNDEGHLSLNQYTPKQKGWSDTAVKKLLRNRAVIGCFTPAGREEVQGYYPAIISESLFYRVQQLNTGQYGRASVSSNPLSVNLFRGIIKCSECGATIVLGGYALKRFGMYRCPNRSANRCSAKAISRKQTDATILYMLALCDRFETENTDTIDGLKIQREDLQRKISKMAELAIELDDMTIITEKLRDMKNALSKLNHDIEEETKRIKAITTGSLKDIDRTTKEGMIETQLLIKGVLKEIVIDAAKRRCKVTFHNGRAITLPITETPSEDVTEAIQSLSEVTERGLIDVDVVEI

SEQ ID NO: 7213 - protein, 506 aa, synthetic construct
MRHVITYLRYSSAIQGAEGADSTRRQNELFKQWLRKNSDAQVVASFSDEGLSGYKGKHLTGQFGDMLARIEAGEFPAGTILLVESIDRIGRLEHLETEALMNRILGNGIEIHTLQDGLIYTKDALADDLGISIIQRVKAYIAHQESKQKSFRVSQKWEQRAKLALAGEQRLTKMVPGWIDPDTFKCNEHAETVRLIFKLLLDGESLHNIARHLQANNISSFSRRKDANGFSVHSVRTILRSETTRGTLPASQRNDRPAIPNYYEAAIDAATFNKAQEILDKNRKGRTPASDNPLTINIFKGLFRCQCGASVHPTGTKNKYAGVYRCNNHLDGRCDVPPLKRKPFDKWMLENFLGMIDVGNDGEAEGKIASLQHEVEIVTTRIKKATALLLEMDDIDELKIQLKELNQKRTELQTTIDSMRRKTSLTDKELPQLKDIDLMTKAGRVECQLILSKHLKGLTLGKDSVTVTLQNDTEITIPTNPLPLNDGSPIFEIADKELLDIDAYQL

SEQ ID NO: 7214 - protein, 507 aa, synthetic construct
MKRVISYIRFSSEKQAKGDSLRRQSKMVTDWLKAHPEYYLDQDLSFRDLGVSGFTGKHLKGGLGDFLTAIEKGLVKAGDTLLIESLDRLSRQDIDIASELLRRILRAGVDVVTLSDGEHYTSESLKDPLSLIKSILIMQRSHEESLRKSERIQAAWDAKKEAAKAGIKVSKRCPAWLKLNDDRKTFSVIPEKVETVKRCFQLRLEGKSIWEIVRTLNDEGHQSMSQYKPGKFGQTSVQDLLKNRSVIGYFTPKGCEEISGYYPAIIDETTFYKVQQLSYARYGRKPASDKPLSVNLFKGVIRCSECGHALIITGFSDTRSGIYRCPLRNENRCSAKGLSRKQTDGTLLALLSRLDRFDSDTTNIIDTLKLHREHISSNIEKLVQLSLEIEDLSAITSKLKQLKGELSQVDADIEKETQRLKSIDVGCLSDCDLTTKAGRIEAQLIIKSAVKEVVLNTAKRRCKVTFHNGKVIDLSITENPSEDVTEAIQSLSEVTERGLIDVDVVEI

SEQ ID NO: 7215 - protein, 506 aa, synthetic construct
MRSVITYLRFSSATQGAEGADSTRRQNDLFKQWLKKNSDAQVVASFSDEGLSGYKGKHLTGQFGDMLARIEAGEFPAGTILLVESIDRIGRLEHLETEALMNRIIAHGIEIHTLQDGLIYTRDALSDDLGISIIQRVKSYIAHQESKQKSFRVSQKWEQRAKLALAGEQRLTKMVPGWIDPDTFKLNEHAETVRLIFKLLLDGESLHNIARHLQSNDIKSFSRRKDANGFSVHSVRTVLRSVSTIGTLPASQRNDRPAIPNYYEAAIDAATFNKAQEILDKNRKGRTPASDNPLTINIFKGLFRCQCGASVHPTGTKNKYAGVYRCNNHLDGRCDVPPLKRKPFDRWMIDNFLGMIDVGNDGEAEGKIAALQHEVEIVTARIKKATALLLEMDDITELKTQVKGLNQKRTELQTMIDNMRRKASLTDKELPQLKDIDLTTKAGRVECQLILSKHLKGLTLGKDSVIVTLQNDTEITIPTNPLPLNDGSPIFEIADKELLDIDAYQL

SEQ ID NO: 7216 - protein, 541 aa, synthetic construct
MPKAISYIRFSTKIQSVGDSTKRQSKYINDWLKRNPDYYLDESLRFQDLGISGFSGANAKSGAFGEFLAAVESGYIEAGSVLLVESLDRVSRQDIDTAGEQLRKILRSGVEVVTLVDNEWYTKESLKDSLSMIKAMLVMERAHEESAMKSTRLRSMWAAKRERAAKGEIMSKRCAAWLKVSEDRSHFEFIPENVKAVQRVFQLRLEGLSHIKIAKQMNDEGFYTLNQHKSVKGGWSQSSVTELLSNRSVIGFKVPSKSMAVKGVSEIPNYYPSIITDEQFYAVQQLKQGSGRKPSSDLPLLTNLFKGVLRCSECGFIVVVAGVSAKRSGIYKCSMKSEGRCNSVGFSRLQTDRALVQGLLYNTNRLSLNRDNGSAIGSLQSELEQLQKQRERLIKLAMLADDTESMAKDLKALNSQIKDAEKAVSEVHQREQSSQLETISHLDLTVKKDRIEAQIIIKRIVKEIRLNTAGKKCDVFLHNGLKLLNFPLDRVVDGAQWLEVLPLIDGDEFDFVEFTTKPRHIALEEAPDWVKEMDEQSNQPL

SEQ ID NO: 7217 - protein, 561 aa, synthetic construct
MKRKVAIYTRVSTKEQLKQGYSIQQQADLLIKKAKQIFPDDEYEIYSDEGISGKNIEARPGMKRLLEDIENRQIKVVMSWKLNRLSRSNRDIQNIIYEFRRGGAYYISISENIDTSTQNGEMMIGAFGLVAQIERETIVSNVKMGMNAKAKQGEAITGRVLGYVLKPNPLTGKNELVIEEFEANIVRQIFDLYLNQNKGLKAIANYLNKQGYHTINKKPFSVYGVKYILNNPVYKGYVRFNNYQNWAVERRSGKNDKSKVILVQGKHKAIIDEEIFDKTHEKLAAKSFKPGRPIGGDFWLRGLIKCPECGNNMVCRRTYYNTKKSNERTIKRYYICSLFNRSGSTACHSNAIKAEVVESVVHFHLRRILSQPHVVETIATQVIDAMEKKKANQTPMSIDTNSLENQKKKLQKRKERLIDLYLDEEIDKETMQNKQDKLNVQLEKIDEQLKQAETMNKVSQDIAIPNYKKIKGQLYVMLYRFTGYMKKANPEAKNKLMHMLIDSIEITTDKQVKLIKYKIDESLLPQSIKKDCGNFFMPKFNFVINVTNENSIENLSLLPLF

SEQ ID NO: 7218 - protein, 449 aa, synthetic construct
MKQAIGYLRQSTLKQQSLSAQKQTIKTLAEKHNIQHIIFYSDKQSGRTENRTGYQQITELIQQGQCDVLCCYRLNRLHRNLKNALKLMKLCQTYHVHILSVHDGYFDMNKAFDRLKLNIFISLAELESDNIGEQVKNGLREKAKQGKLITTHAPFGYHYHNGTFMINNIEAPTVKAVFSYYLQGYGYKKIAQYLEDDEKFINRKPYQVRNIIMNPNYCGRVINQYGRYDNMCPSIVSTSIYEQAQAIRSQKQLKRTSSANQLKQKIKCPYCGSTLTNITIRKKHRTLRYYVCPQNMNASRFVCEFKGINAQSLEASVLVTCQDFFQNQHLYSKINHTIQKRLKKQKDIEAKSTVTQEQLIEKLAQGKIDAETFREQTQSFRQQSKPITSIHTHQIQKALQNVIQQSFTLNMLYPYIDEIHITKSKTLTGIYFKNEPLNIVNQTAQSSIA

SEQ ID NO: 7219 - protein, 547 aa, synthetic construct
MKLLVTYIRWSTKEQDSGDSLRRQTNLIDAFYSKHKEEYYLLPAHRYVDKGKSGFHQQHKAQGSDFRRMFENVMSGAIPEGSLIVVENFDRFSRADIDTAIDDVRQILRKGVSILTLGDGELYDKSALTDPVKLIKHIIIAERAHQESLVKQKRIAQVWNHKTQLARELKKPMGKQAPGWLELSEDGSHYIVDEDKASLVNIIYDKRLSGMSMFAICKWLNEQGYPTINQRKVRISKTKKPDGNWSALSVKHILTSRSVLGYLPAKISTEDRKTVLREEIESFYPQIVTDSKFYAVQQLLEETGKGKTSSGEHWLYVNILKGLIRCKCGLVMTPTGIRKPVYQGTYRCNGNKESRCSYGTVSRKLLDTQLCSRLFSKLSQLHDEATDTAKLDELQRRLNTVDSELEKLTETLIQLPNITQIQEALRVKQEEKDELIVQLSREKARVKSVSSLDLSGLDMESVEGRTEAQIIIKRLVKEIVVSGNEKLVDIYLHNGNMIRGFPLDGKDDHTLTLEEATDEMQSLDDMLIFGEPVTRIYPAGDMEEVDA

SEQ ID NO: 7220 - protein, 558 aa, synthetic construct
MTKLYSYIRFSSMRQSDGSSYERQIRMAKEIADRYNLELVNDYQDLGVSAFKGANSKTGALSRFLDEIGRSIPVGSWLFIENLDRLSRQDIISAQELFLSIIRRGITIVTGMDNKIYSIETVTANPMDLMFSILLFIRGNEESQTKRNRTNSSALLKIKAHQQNPQNPAVAIEEIGKNMWWTDTTSGRVLPHPVYFPVLQKIVQLRQEGHSAGAILDYLNEHHEPPAPTSNKKHGKWSRAMVSRLFTTKALIGVKTVNVDGVEYELRDYYPRVLSDSEFYFLRKNIIKKAWDYSHDKEKVIPLLSGIGVLRCVHCGATMVKQTAANGKREQYRYCCDGRKSGRTDCPYPNWGFRAVTLEGAVLQLLADKIWIAEDKTNPIPEIQVKIDEISRKIDNLINLSAMMGATKELANQITDLNSQREALHEEIRLFEREMYSVDSQGWDKLAQFDLSDVQNEERLKVRMKIKGALHEIECSRIDSKKNLFVLVYLDGLRQRLVIENNRGLKKGQIFVDLKTINDRQILESAGMVLHPCIEMIIDADWKAPEEIPGLLSEEFGI

SEQ ID NO: 7221 - protein, 507 aa, synthetic construct
MKRVISYIRFSSEKQAKGDSLRRQSKMVNDWLKAHPEYYLDQDLSFRDLGVSGFTGKHLKGGLGDFLTAIEKGLVKAGDTLLIESLDRLSRQAVDQASELLRNILRSGVDVVTLSDGEHYTSESLKDPLALIKSILIMQRAHEESLRKAERIQAAWDAKKEAAKAGIKVSKRCPAWLKLNDDRKSFSVIPEKVETVKRCFQLRLEGKSIWEIVRTLNDEGHQTLNQYKAGKFGQTSVQDLLKNRSVIGYFTPKGCEEISGYYPAIIDETTFYKVQQLSHYRYGRKPVSDKPLSVNLFKGVIRCSECGHALIITGFSDTRNGIYRCPLRNENRCSAKGLSRKQTDGTLLALLSRLDRFDSDTTNTIDTLKLHREHISSNIEKLVQLSLEIEDLSAITIKLRQLKGELSQVDADIEKETQRLKSIDVGCLSDCDLTTKAGRIEAQLIIKSAVKEVVLNTAKRRCKVTFHNGRAITLPITENPSEDVTEAIQSLSEVTERGLIDVDEVII

SEQ ID NO: 7222 - protein, 547 aa, synthetic construct
MKLLVPYIRWSTKEQDSGDSLRRQTNLIDAFYAKHKDDYYLLPAHRYVDKGKSGFHQQHKNQGSDFRRMFENVMSGAIPEGSLIVVENFDRFSRADIDTAIDDVRQILRKGVSILTLGDGELYDKSALTDPVKLIKHIIIAERAHQESLVKQKRIAQVWNHKTQLARELKKPMGKQAPGWLELSEDGSHYIVDEDKASLVNIIYDKRLSGMSMFAICKWLNEQGYPTINQRKVRISKTKKPDGNWSALSVKHILTSRSVLGYLPAKISTEDRKTVLREEIEGFYPQIVTDSKFYAVQQLLEETGKGKTSSGEHWLYVNILKGLIRCKCGLVMTPTGIRKPVYQGTYRCNGNKESRCSYGTVSRKLLDTQLCSRLFSKLSQLHDEATDTAKLDELQRRLNTVDGELGKLTETLIQLPNITQIQEALRVKQEEKDELIVQLSREKARVKSVSSLDLSGLDMESVEGRTEAQIIIKRLVKEIVVSGNEKLVDIYLHNGNMIRGFPLDGKDDHTLTLEEATDEMQSLDDMLIFGEPVTRIYPAGDMEEVDA

SEQ ID NO: 7223 - protein, 558 aa, synthetic construct
MTKLYSYIRFSSMRQSDGSSYERQIRMAKEIADRYNLELVNDYQDLGVSAFKGANSKTGALSRFLDEIGRSIPVGSWLFIENLDRLSRQDIISAQELFLSIIRRGITIVTGMDNKIYSIETVTANPMDLMFSILLFIRGNEESQTKRNRTNSSALLKIKAHQQNPQSPAVAIEEIGKNMWWTDTTSGRVLPHPVYFPVLQKIVQLRQEGHSAGAILDYLNEHHEPPAPTSNKKHGKWSRAMVSRLFATKALIGVKTVNVDGVEYELRDYYPRVLSDSEFYFLRKNIIKKAWDYSHDKEKVIPLLSGIGVLRCVHCGATMVKQTAANGKREQYRYCCDGRKSGRTDCPYPNWGFRAVTLEGAVLQLLADKIWIAEDKTNPIPEIQVKIDEISRKIDNLINLSAMMGATKELANQITDLNSQREALHEEIRLFEREMYSVDSQGWDKLAQFDLSDVQNEERLKVRMKIKGALHEIECSRIDSKKNLFVLVYLDGLRQRLVIENNRGLKKGQIFVDLKTINDRQILESAGMVLHPCIEMIIDSDWKAPEEIPGLLSEEFGI

SEQ ID NO: 7224 - protein, 481 aa, synthetic construct
MITTNKVAIYVRVSTTSQAEEGYSIEEQKAKLSSYCDIKDWSVYKIYTDGGFSGSNTDRPALEGLIKDAKKRKFDTVLVYKLDRLSRSQKDTLYLIEDIFIKNNIAFLSLQENFDTSTPFGKAMIGLLSVFAQLEREQIKERMQLGKLGRAKAGKSMMWAKTSYGYDYHRETGTITINPAQALAVKFIFESYIRGRSITKLRDDLNEKYPKHVPWSYRAVRAILDNPVYCGFNQFKGEIYPGNHEPIITEEVYNKTKEELKIRQRTAAENVNPRPFQAKYILSGIGQCGYCGAPLKIILGVKRKDGSRFKKYECHQRHPRTLRGITTYNDNKKCDSGFYYKDDLEAYVLTEISKLQDDAGYLDKIFSEDSAETIDRKSYKKQIEELSKKLSRLNDLYIDDRITLEELQNKSTEFISMRATLETELENDPALGKDKRKADMRELLNAEKVFSMDYEGQKVLVRGLINKVKVTAEDIIINWKI

SEQ ID NO: 7225 - protein, 689 aa, synthetic construct
MKITAEHLARGAYVYVRQSTADQLVNNPESRRRQYGLAERARSLGWNDAIVIDEDLGRSGSGISRPGFEKLLAAICEGRVGAVLAIEASRLARNGRDWHTLIEFCGLVGTLIVDEDGIYEPRHPNDRLLLGMKGTMSELELSILRARSIEALKQKARRGELFLAVAIGYVKSGRNRIEKDPDLRVREAINLVFRRFDELQSIRQVHLWLRGEGIMLPAVNYAREAERTIVWKLPVYNTVHHILTNPIYAGAYAFGRTGSKVTIEAGRKRILRGIRRDRADWEVLLIDHHESYLSWHDFERNQRLITDNATSKGLVPRGALRRGELLLGGLLRCGHCGRKLHVAYSGSNGNTGRYHCRGAQVNHGTDPCIGFGSLRVDQAVSAEVLQRLQPLGIEAAIKAIETSNVQAGEKRRHVELALEQARYEAAHARRQYDAVDPDNRLVVGELERRWNTALVAVRERQDELDALDRHKPEVLGEEERQSLLRMGADLELAWHHANATAATRKRIIRAVIREIVVAIEDDQIKMLVHWQGGDHTALSVRKNKAGHHRWGAPPDINELIGALARQLPDKAIASLLNRLGKTTGRQNGWTQSRVCTFRNQHDIPVYRKDERSERGEYTLQETADKLGLRPMTVLRMIRAGDLKAEQYCKGTPWIIRHEDIDQLDIQRHSGKGEQGPLSKSEDQQIQLFQ

SEQ ID NO: 7226 - protein, 465 aa, synthetic construct
MKTALYLRVSTQEQATTGYSITGQEEKLRAYAKAKGFGNIKVFTDAGYSGSNTKRPALELLIKEVEQGKISNILIYKLDRLSRSQKDTLYLIEEKFLKNDVPLISLSESFDTSTPFGRAMVGMLSVFAQLERENIKERMIMGREQRLKKGLWHGAGGGSGRVAGYDYKDGKLVINEYEALFVRRMFQLYVEGEGYFNIYKKLSKEMPGVIKEPSNISKLLKNPVYIGMIDYNGEIYKGIHEPIIDEHTFNTVQKLRQTRTVNRDMSITRYLLPKLLKCGYCGENMIGKTGSKKKDGTYYTYYCCYSKEINRRKKHVDSNFSLECESVYHTAQLVEDKVINEVMNLDSTKIIHDYETKNDDHIIYEKQIKDIDTKIEKLMNLYIDSNIDKKTLDVKHKELEDEKRLIEKTMRDSKVDVNKEVVLKHLSNFKDIDWVDDREALKNSLHILIKDIRIYNDSMKVNFNI

SEQ ID NO: 7227 - protein, 575 aa, synthetic construct
MTKIAYSYTRLSTEKQIKGHGFTRQREAIEKVCCQHGWQLSDQTFNDLGVSAWKGANATTGALSQFIDLAKKGAIRPNSVLIVESVDRLSRQQVDKSLRLMLELLEVGVSIFTLSDSKLYTTNSDSVMLDLMMWLMTAQRAHEESEIKSLRVRAAKKKNKELIRKGIIVTRKCPEWLTVSDDKSCFLVNNERAEIVRKIFTWYSQGFSTKPIALKLNELGIPYWGKSSTWSYRHIRSLLKHRGVIGEIQLLKRIDGRDVADGDPVEDYYPAIIDRGLWATCQQIKSSKTTAKGRVVERGMANLFRGLLKCECGSGLAINSSTVKGRTYRFLRCSQLKTTGCQAKNWHYEKTERILLIALRHSLSSFSEEDHAVSLRECQQYLARISEELKEKERQAENAIDYLLDKPSKLLEARLQTLEDDIARLKAIQEQAEHRLEAVHYEKSTALDKVEELQRVLEDIANDDDSRHKANGLLRRLIDTITLGSISNPRSKEFMEVSGNDYHGLIIIKRRDGLELRVEVLKDYGLSISWEGDDFTVIECSPTQQLNSQHVSQRLINLGGQTVDLWDDEGWVASS

SEQ ID NO: 7228 - protein, 507 aa, synthetic construct
MKRVISYIRFSSEKQAKGDSLRRQSKMVTDWLKAHPEYYLDQDLSFRDLGVSGFTGKHLKGGLGDFLTAIEKGLVKAGDTLLIESLDRLSRQAVDRASELLRNILRSGVDVVTLSDGEHYTKESLKDPLALIKSILIMQRAHEESLRKAERIQAAWDAKKEAAKAGIKVSKRCPAWLKLNDDRKSFSVIPEKVETVKRCFQLRLEGKSIWEIVRTLNDEGRQTLNQHKAGSFGQSSVQDLLKNRSVIGYFTPKGCEEIAGYYPAIIDETTFYKVQQLSYARYGRKPASDKPLSVNLFKGVIRCSECGHALIITGFSDTRNGIYRCPLRNENRCSAKGLSRKQTDGTLLTLLSRLDRFDSDTTNIIDMLKLHREHISSNIEKLVQLSLEIEDLSAITIKLKQLKGELSQVDADIEKETQRLKSIDVGCLSDCDLTTKAGRIEAQLIIKSAVKEVVLNTAKRRCKVTFHNGKVIDLPITENPSEDVTEAIQSLSEVTERGLIDVDVVEI

SEQ ID NO: 7229 - protein, 412 aa, synthetic construct
MRIVRRIQPMMTPQKPKLRVAAYARVSDSRLHHSLSTQVSYYSRLIQSHPDWELVGVYYDEGFSGKEQSNRQGLQDLLKACDDGKIDRILTKSIARFGRNTVDLLSTVRVLRQKNIGITFEKEGIDSLSSEGELMLTLLASVAQEESHNISENLRWQIKKKFEQGQPHTPQDIYGYRWNGENYVIEPDEAKVVRQVFQWFLDGDNAPMITKKLNEQGVLTRLGNPFTVSSVREFFKQEAYFGRLVLQKTYREPFSRNPKRNNGQKNKYIVEDAHEAIVSKSYFDVVLQEKERRYKVMYQESHMHKGTFRELIECSHCGKIMITRVDSKKVHRTIRYCCRTRDRFGTSSCPSKTLSEKRILATFEDKIGFKPDKNWVTENIKKVIYDSSVGLITVFPIKGRKYELKVRKEHFL

SEQ ID NO: 7230 - protein, 521 aa, synthetic construct
MKNVITIEANAPRNSELASISLPKKRRVAGYARVSTDHEDQTTSYESQMRYYAEYISTRSDWEFVKMYSDEGISGTNTKLRVGFKSMIEDALAGKIDLIITKSVSRFARNTVDSLTTVRKLKEVGVEIYFEKENIWTLDSKGELLITIMSSLAQEESRSISENVTWGLRKQFAEGKVHFPYTNVMGFEKGENGEIVVNQEEAKTVRYIFQQALLGKTPYSIAKDLTQQGILSPSGKNHWSSVTIKRMLRNEKYKGDALLQKTYTIDFLSKKKNINKGELPQYYVENNHEAIVDKETFDAVQASLDRKEKGKGSTTLFSSKLVCGDCGHYFGSKVWHSTSKYRRVIYQCNEKYKGEKKCTTPHVTEDEIKDWFVTAINKVISNKDEIIQNLEMLLDVGESSDLERRLVELETEVEVVTQMVSNLVKENAIMPQDQDTYQKKYSNLVERHDALVSEIESIEKQLLEAASHQKDLKEFLKTLNQQSELISEFDELLWETMVDEIKIFCDQTVAIKFKNGIEVVE

SEQ ID NO: 7231 - protein, 525 aa, synthetic construct
MGKVRIIPAHQQKGNSVHHPRSPQSFGKLRVAAYYRVSTDYDEQASSYETQVDHYKELIQKEPPWEFAGIYADDGISGTNTKKREQFNKMIAACKVGKIDLIVTKSISRFARNTIDCLKYIRDLKAINVAIFFEKENINTMDAKGEVLITIMASLAQQESESLSQNVKMGIQYRYQQGKVFVNHNHFLGYTKDAQGNLVIEPEEAKVIKRIFYSYLNGMTMKQIADSLKADGILTGGKTKNWRSSSVAKILKNEKYMGDALLQKTYTVDFLNKKRVKNEGIMPQYYVENDHPAIIPKSVFMQVQQIIKQRRNGITTKNGKHRRINGKYCFSQKVFCGKCGDILQRNMWYRQEKVAVWRCASRVRRNKTGRRCMIRNVKEPLLKEATVEAFNQLIEGHELASKQIKANIMKVIKNSKGPTLDQIDQQLEEVQMKLIQAANQHQDCDALTQQIMDLRRQKEKVQSRETDQQAKLHSIDEINELVNLHKYGLVDFDEQLVRRLVEKITIFQRYMEFTFKDGEVIRVNM

SEQ ID NO: 7232 - protein, 559 aa, synthetic construct
MKTKLYSYIRFSSMRQNDGSSYERQIRMAREVAAKYDLELVNDYQDLGVSAFKGANSKTGALSRFLDAIGRSVPVGSWLFIENLDRLSRADIVSAQELFLSIIRRGITIVTGMDNKIYSLDTVTANPMDLMFSILLFIRGNEESQTKRNRTNSSALIKIKAHQENPQNPAVAIEEVGKNMWWTDTTSGYVLPHPVYFPVVQEIVELRKNGRSTAEILDHLNETYAPPPAVSNKKHSKWSRAMVERLFHTRALIGIKEVSVDGVNYELKDYYPRVIDDATFYHLKKNIGARAWNFGDKEEVKPIPLLSGIGLLKCDHCGCAMVKVKGTNKRSDQYRYTCDATRSRRLDCEHPNWSFRGDQLEKAVLQLLADKIWIAEDKANPVPALKVQVDEISRKIDNLIALSAMTGATKELADQITTLNSERETLYNQIKMAEEEMYSVDSQGWEKLAEFDLEDVYNEERIKVRFKIKQALKRIGCRRIDRNKNLFVLEYIDGKTQRVVIENSRGTRKGRIFIDLKTINDRQILESNGLVLHPCLDMLTDKNWKPEEEIPGPLQEFGI

SEQ ID NO: 7233 - protein, 507 aa, synthetic construct
MKRVISYIRFSSEKQAKGDSLRRQSKMVTDWLKAHPEYYLDQDLSFRDLGVSGFTGKHLKGGLGDFLTAIEKGLVKAGDTLLIESLDRLSRQDIDIASELLRRILRAGVDVVTLSDGEHYTKESLRDPLALIKSILIMQRAHEESLRKSERIQAAWDAKKEAAKAGIKVSKRCPAWLKLNDDRKSFSVIPEKVETVKRCFQLRLEGKSIWEIVRTLNDEGHQSMSQYKPGKFGQTSVQDLLKNRSVIGYFTPKGCEEISGYYPAIIDETTFYKVQQLSHSRYGRKPVSAKPLSVNLFKGVIRCSECGHALIITGFSDTRNGIYRCPLRNENRCSAKGLSRKQTDGTLLTLLSRLDRFDSDMTNTVDTLKLHREHISNNIEKLVQLSLEIEDLSAITIKLKQLKGELSQVDADIEKETQRLKSIDVGCLSDCDLTTKAGRIEAQLIIKSAVKEVVLNTAKRRCKVTFHNSKSITLPITENPSEDVTEAIQSLSEVTERGLIDVDEVII

SEQ ID NO: 7234 - protein, 541 aa, synthetic construct
MQASQGLVYSYLRFSDPRQAAGNSADRQAEYAKSWAAARGLTLDQSLSLRDEGLSAFHQRHIKQGALGVFLQAVDEGRIPAGSVLVVEGLDRLSRAEPIQAQAQLAQIINAGITVVTASDGREYNRERLKAQPMDLVYSLLVMIRAHEESDTKSKRVKASIKRLCEDWIAGHYRGLIRNGSDPRWVRFVDGRWELIPERTEVVRFAIEKYREGYGADRAFSMIQERGFDTSYLGISPQQIYRLIKLVALKGAKHICVDGEDYLLEDYYPRLLSDVEFEELQLLRGQRSRRRGKGAIPGIVTGIGITYCGYCGTAMTAQNVMHKVRPDGTLTDGHRRIMCMSYMNKGGCDVGGSCSVAPVERAVMSFCSDQMNLLRLQQPAGPSGDLQQGVMSSRKQVADLEAQLGRLTEALALGEGDGVLPITFLRKARDLEEQLTKAKAKLLQAERELAGIASRQRPADARLWSDLTAGVEAQEVEARDKVRQLMIDTFERIVVYMRGVLPEGRRAWYIDVLLISKAGQRRWLRVERKSGKWAAGIDRPG

SEQ ID NO: 7235 - protein, 599 aa, synthetic construct
MKKAYSYIRYSSPQQASGDSYRRQLAATQAYCDANGYELDTELSIYKELGVSGFKGDQEHLKQFINDCETGKVKKGSLLVVENLDRLSRQAINVAMRQFLSLLEYVDIYTLQDKKHYSNNDGRDSENQLLDIMTSLIIMSRAHEESLTKQKRLKESWANQRKNAHRIKMSGCYPHWLVRSDDKTEFFVKEDRAQIIKDMLDMCINGLGATQIVRSLNQNIERYPPPSPKKEFWVRSTVKRLLSDRRLLGEHQLYKGHHAKREPVGEPIKGYFPQIVDEKTFANVQISLKSRKIGAGKVKADSFSNIFRGFLRCGHCDSPVEYVNKAAKQASTLYLTCSNAKRGGDCNHSKHYRYLPLEHMLIHLSTANGFLPKPEKPSDLEQQLEIIKEKKEQANKKLSVLLEKNFTAPIILEKIEELTNDVEQYNSQIEEIEDKLLSIKPDYTYEDLYHDAILESDLLKKFSNRSMFNNYLRKKIDSAYLYSIGLFPCIAFKMNDKSVHVLVLDERYNFGGCSLPNEKDKLIRLNGEGIEAIDEIIWKMFGNAIDFINGIDEENEELNKIIRKISLLMSKFIIDNQNQDLISEFNSLLNTSIEKSYQN

SEQ ID NO: 7236 - protein, 565 aa, synthetic construct
MKLVAYIRISSHGQKDKGDSLDGQRQYIKSWALTGKHTIKKWYIDEAVSAFKGKRLNFELMLDELDSGLVQADAVIVYSLSRFSRNLVTQLNATKTLEKLGMSLLSAFESLPNSPDDKYLVVTMLGLINEHQSRQNSRVVSDRLRDTARKGFYTGGPIPFGYNAITVSGDTSKKRKKLVVNHQESPVVKLIFELAEKGTNGKGFGVKNIAVHLNKNGYSNRGKEWNKNSVCNILNNRVYMGEFLFGKSKPNKLGDERIVVKVPSIVSSSKFERVRQYVEERALSNTGIKSARSNSLLTGVLTCPVCHGSMRVTHGKSGKYKYYQCSQQVMYSPDSCSFKRIRKEEADKLIIDSLINRIFTEQNLSEIYLQTRNLLKERVAKNRMELTSLSQRIGSEKSRANHLIELISEHKIEATKVVNDTLKKHSDQIAHLEEELARKKISSSLPVKNFGMDKIKQFTHDVHSYIKKADEASLKQLILATIDKVYIIPEKKISFYGRNMAVIYTIAHTKTGTDFSVPAFVSKWRRDRDLNPRYAINVRRFSRPVLSTTQPSLQCGQIYKPVIRL

SEQ ID NO: 7237 - protein, 644 aa, synthetic construct
MFNFDKSKYKGICVPYARFSTDVQDEIGRKSLERQIEEAKRFSNEYGLFFDEDIAFVDRGVSGFALSGDTAKTFQKGQMQLMLELLEEIDVAEREFIYITFHNFDRFSRMSPEVASRYFEQILDKGFNIVTTIDNEVYKRNSGNLEQMIISIIHMSTAYYESEVKSNYISDSRQRKRDVIEYLYNDEKQKGKHRHVGIKACCPRWIKTKDIIYEYVGKDGSVKKEALKRFEIDEERAQIINYIFDLKNQGLGNGKICQVLNEQNIPVFHSGNYTKAKYWNLSTISNYLKNENVIGHSYLYHKAKEEVFNEKTQTFSTKRVRKIATDKLYNYYPPIMSEEKFNQAKEAVKANSNNVDRSKASEKPHMFSNLMRCSCGTRLHYKLTKKNNVKKVDDYFEYLKCERSALNDGCTGENINYKNFEAQFINFIRYIDVNEILDHANGVERETQGLTELEEREAAINLKITGLTKTYQSLINAGVDGSDVLVELEKAKGELQEVEFEKSKLLNRMKSQTSSSSESIKQKKSALKSKVFAEKVEARKAVNELLKQKIRWMEVYATAYAKFVIVCFVDNVIRTYAYQDEFATDLMFNTIKINTDGLKGYEADELMVLMIKTVRESLAGMNEVITNTDLKIKLAAVKSEYMNK

SEQ ID NO: 7238 - protein, 664 aa, synthetic construct
MFSFDKSKFKGICVPYARFSTKGQSKIGKKSLERQIEEARRYAKSNNLYINEDLIFADKGISGFAQQGNIAKAFKKGQMQVMLALLEEVPYQEREFIYVTFHNFDRFSRMSPKQARTYFDLILQKGFNVVTTIDNQLYTRHDKDLGKMLISTIKMTTAWEESQVKSIYIKDALARKKKVVEYLYTHPSQKGKYKHIGVVQPNMPRWIDHEKIELTYTDESDSKRTDSFKKFTLNKEKTKIVNYIFDLKIQGLGYARICRRLNEEGIPTFDQGKHRIAKKWHVFAVQNLICNEMVLGHITLHTHNEEEYMCEIDKVFKKRKIKQTATEKLYNYYPAAVSEAKYLEAHKNTIQQDKPKKLGRIGERTNIFAQILLCECGGTLQYRRTKKNKKKSESVSVNEYLQCNNSFVNHKCNSQTINYTMLETAFFRYVNNIDFKKICSTTNSKHALKIIDLDADIKELSDEIESLKLREAGLAKTYMSLASAGLDGSTALIDREKTKKEIAEKVLELENLELKKKGLEIEADKDNREFVDINDYMMNKDNYSSDEKIIIRKKINDFLHSKIEWMEVVSTERQKFVIIAFHDTVIRTFAFDDRCANDLMFNEIDVDLSGLNRVQASNLMFTLIKAIRNSLKGVEAVITKADLIRYLQHIKQDYLKNIGEQASV

SEQ ID NO: 7239 - protein, 555 aa, synthetic construct
MNKDAEVYSYSRFSSANQKKGGSVERQLDYAKQVAKKYGLNLNSELMMLDEGLSAFHAQHMKKGALGVFIDKVKNGEIARGSVLIIESLDRLSREQLLNAQSLFLELISNDITVITANDSQVYNRATISENSGTMFITLGAMIRAHEESLTKQKRSVAAIKQQVEKFEKDGSGKVYGSVPFWINDTVTGFELNDRADVVRTIIDLYVNKRFGINKIARELTQKAIKTPTGKRNSWGATSIKNILRNSALYGQKEFEVTSLINGVNDTIQYSLSNYYPALISKDDFILIDKINKAKTASIGQRSSYGDNTHIITAWGKGRSICTHCKSNVAAQLQRQRSRKGEYTQSVLRLHCRGHKERQDCYPSFKSKALEDAFLNSSLLLLDRNMIKPTDVDKQKIILEEKLVDVKDKLTNAYEEKFAIKKDDEFARNIIQKYIDQYSEEKEEIEKGLKNINIGKVSVEELEELHKVIIKAKDLNNSEERTLVKQSLMQIIERIEIDFEKQSLKAIFYDKRMLIVNNDNTYKIYDKEMSEKEIRHAELEKAILDVTLSAELLSK

SEQ ID NO: 7240 - protein, 598 aa, synthetic construct
MIFSHFIKRHRKSGMPTAYAYIRYSSKAQGEAGRDSVDRQMASIQAITKQQGIELPPENIYSDTGISAHDGSNKRKGKLKELIDMISDMHIKEGDYIFVESIDRLSRQRLLQAKELVNGILEKGVILITTIDGQRYEKPNETNRIDDLQQDILLSVIAKRAYEESKTKSVRRKSAWNRAKKLAEEENVIFNAHNPPYGIRYNTELNCFEINEEEAQEIRDFFESLKYVGVSLSIKKLNAYSKRKWSSRNIKHLIDTKYVLGAYMAQRRDENKKKVFERYIENYYPQIVSYELFNEAIAAMKNRAQRKNYGNQSVGSLNIFRHSIKCECCQASMLFEKQTNPKGVVYPYFQCYTRKELKNGCDQPRFRFDLAFGLFLELIYQSTTHEDFDVHPWQNEIEDTGIQYEWITRESGMKYRLPTQEDIDEEERTENFKELLIKLLSNRENQTKDNKKTVELTNLLLEQKSYRDNLMKSFAGFTSGVIPKEFLEVVSKTEATINDIEQNLAELQTQINIKKTTINIYSETDIIDLYKTEDGRLKINQFFVANDITFKFNFDKTTRTLFAKIFQNGFEIDRIAKQFSLHNPLKEFGINNLNEYFN

SEQ ID NO: 7241 - protein, 560 aa, synthetic construct
MPKVFSYVRFSSAKQSAGDSKARQIKSAKAFADEHGYELADPTDYLFFDAGRSAYKGRHLDDTGELARFLAFVEDGTVPTGSILVIESLDRLSRERVRDALPRFLDLLAKGINVYTSTDKRLYTSDYNEIDLIVSIITMSRAHEESATKGSRVSSAWRNKHKDARETGKPLGKLRPLWLDVTPDGYVLNPDHAKVVQRIFDLSAQGHGSRVIAANLNQEGIPAFSAGRKNFSGLWGFSTIRHILESRTALGEYQPHIFIDGVRTPSGDPIKSYFPPVITEEQFYLAAAARASRRLHKITKVTKNFNVLAGIFFCQKCGGAMHLQGFKDRKYFKCANKQKGLCDTGVIGSERAELVFQEVLAKVDSLSLVRSSSGSLTKKLHVSDGRIEELRAKQANAEASHQEFPSRITAKLLQQIEVDLEALIADRDAVAQNLATDQVVSKSDFFEKLDLASYGGRVAANNLVKRLDVRISVSKLGRLDEVYRVLISSTLAFLISHHERKLTIRSMDARILDKQVMHGEITQEQREQLEHIRDAGESEGAIKRAAALFKWEQSASTTTE

SEQ ID NO: 7242 - protein, 547 aa, synthetic construct
MKLLVPYIRWSTKEQDSGDSLRRQTNLIDAFYAKHKDDYYLLPAHRYVDKGKSGFHQQHKAQGSDFRRMFENVMSGAIPEGSLIVVENFDRFSRADIDTAIDDVRQILRKGVSILTLGDGELYDKSALTDPVKLIKHIIIAERAHQESLVKQKRIAQVWNHKTQLARELKKPMGKQAPGWLELSDDGSHYIVDEDKASLVNIIYDKRLSGMSMFAICKWLNEQGYPTINQRKVRISKTKKPDGNWSALSVKHILTSRSVLGYLPAKISTEDRKTVLREEIEGFYPQIVTDSKFYAVQQLLEETGKGKTSSGEHWLYVNILKGLIRCKCGLVMTPTGIRKPVYQGTYRCNGNKESRCNYGTVSRKLLDTQLCSRLFSKLSQLHDEATDTAKLDELQRRLNTVDSELEKLTETLIQLPNITQIQEALRVKQEEKDELIVQLSREKARVKSVSSLDLSGLDMESVEGRTEAQIIIKRLVKEIVVSGNEKLVDIYLHNGNMIRGFPLDGKDDHTLTLEEATDEMQSLDDMLIFGEPVTRIYPAGDMEEVDA

SEQ ID NO: 7243 - protein, 509 aa, synthetic construct
MRRAISYIRFSSERQLKGDSVRRQSKLVTDWLDKNPEFYLDSSLSFKDLGKSAFSGKHLKGGLGDFLTAIEKGLVKAGDTLLIESLDRLSRQDIDIASELLRRILRAGVDVVTLSDGEHYTRESLKDPLSLIKSILIMQRAHEESLRKSERVQAAWNRKKELISEGIKVSRRCPAWLRLNDDRRTFTIIPDKVEVVKRAFDLRLQGLSFWAITRTLNDEGHLSLNQYTPKQKGWSDTAVKKLLRNRAVIGCFTPAGREEVQGYYPAIISESLFYRVQQLNTGQYGRASVSSNPLSVNLFRGIIKCSECGATIVLGGYALKRFGMYRCPNRSANRCSAKAISRKQTDATILYMLALCDRFETENTDTIDGLKIQREDLQRKISKMAELAIELDDMTIITEKLRDMKNALSKLNHDIEEETKRIKAITTGSLKDIDRTTKEGMIETQLLIKGVLKEIVIDAAKRRCKVTFHNGRAITLPITETPSEDVTEAIQSLSEVTERGLIDVDEVII

SEQ ID NO: 7244 - protein, 452 aa, synthetic construct
MKAAIYIRVSTQEQIENYSIQAQTEKLTALCRSKDWDVYDIFIDGGYSGSNMNRPALNEMLSKLHEIDAVVVYRLDRLSRSQRDTITLIEEYFLKNNVEFVSLSETLDTSSPFGRAMIGILSVFAQLERETIRDRMVMGKIKRIEAGLPLTTAKGRTFGYNVIDTKLYINEEEAKQLQLIYDIFEEEKSITTLQKRLKKLGFKVKSYSSYNNWLTNDLYCGYVSYADKVHTKGVHEPIISEEQFYRVQEIFSRMGKNPNMNRDSASLLNNLVVCGKCGLGYVHRRKDTVSRGKKYHYRYYSCKTYKHTHELEKCGNKIWRADKLEELIIDRVNNYSFASRNVDKEDELDSLNEKLKIEHAKKKRLFDLYISGSYEVSELDGMMADIDAQINYYEAQIEANEELKKNKKIQENLADLATVDFDSLEFREKQLYLKSLINKIYIDGEQVTIEWL

SEQ ID NO: 7245 - protein, 601 aa, synthetic construct
MKNNNVEIIKADSLVRRRGDNFERDSKRVAAYCRVSSDSEDQKNSYESQVRHYKDYISQRSDWELAGIYADEGISGTQVGKRQDFQRLINDCVNGEIDYIVTKAIARFARNTLDTLKYVRMLKDMQIGVYFEEENIDTLTMDGELLLTILSSVAQQEVENTSAHVKKGLKMKMQRGELVGFQGCLGYDYDVETKQLSINKKEAKIVRYIFERYLEGIGGKVIARELDELGYKSPRGLEHWNDTTVLGIIKNEKYKGDILMGKTFTVDPISKRRLSNFGEEDKYYIKDNHEPIISKEDFEKAQEIRLRRAGNKKTAANVNGKRERYSKMYAFSSMLECGFCGSILSRRSWHCRSDYRKVVWHCVTSIKKGKKFCKHSKGLEELAIEGAFMEAYRQLYHSNENLMTDLLETIESELNDNSLNKELKRITNKLRTLLKKEENLVNLRLEGKISDTIYNEKYNEISSEKVFLAEEKVNIETTLKSEIDVKKRLTEFKHLLSSQKMLTEFDRAVFESIVEKIIVGGVNSDGEIDPAMLTIIFKTGETQNKDGKKFKSKRKNAKLETDKLCPQNSDEDKKLYSQGTDYTRGVCFSARESLEPFVKSQ

SEQ ID NO: 7246 - protein, 413 aa, synthetic construct
MAVRLIKAKQDHKKQRICAYVRVSTTNSSQLDSLENQKTYFETLYANREDVDFLGVYYDKGISGAKEKRPNFQAMLEVCRQGQIDLIHTKSISRFARNTMTVLEVSRELKVLGVGIYFEEQNINTLSNEGEVMLSVLASLAEEELESMSTNQRWAFQKKFQRGEVVINTKRFMGYDVDVDGELVINEAEAQIVRRIFHLYLDGMGLHRIAKLLNEEGVTTVSNAKWHDTTVGHMLRNEKYKGAALLQKTYLDGVNGKRRLNQGEVAQYLIEDNHEPIVSKEVWQAVQHKLDSNTWKQGPNKHYLFTSMLRCQYCGSTLKRQVSYKKQIVWCCSKYIKEGKASCQGMRVPEKAIEEWKLKTPVTVIERTEYGQKHYSYSSQENAADGHPSASHQNQSGRLLSGVHRPRRTAIKL

SEQ ID NO: 7247 - protein, 434 aa, synthetic construct
MAAYCRVSTDQDEQLSSYENQVNYYRDFISKHEDYELVDIYADEGISATNTKKRDAFNRLIQDCRDGKVDRILVKSISRFARNTLDCIKYVRELKDLGIGVTFEKENIDSLDSKGEVLLTILSSLAQDESRSISENATWGIRKRFERGEVRVNTTKFMGYDKDKDGNLIINREQAEVVRYIYERFLKGYTPESIARDLNDRDVPGWSGKANWYPSSILKMLQNEKYKGDALLQKTYTVDFLTKKRTENDGQVNQFYVANNHEGIIDHEMWETVQLEIARRKAFREEHGIPFYHLQNEDNPFMTKVFCAECGDAFGRKNWTTSRGKRKVWQCNNRYRVTGVMGCSNNHIDEEMLEKAFMEAVSILKDYKADVLDKLEKLSKGDNLLNKHYAKFMKQLLDLDHYDCTIMCQVLDNITISESGQITVTFLEGTEVDL

SEQ ID NO: 7248 - protein, 519 aa, synthetic construct
MTKKIITIEPAKILRSSELPSLKKRKVAGYARVSTDRDDQASSYESQMKYYTDYIGSRSDWEFVKMYSDEGISGTNTKKRLGFQEMVEDALNGKIDLILTKSVSRFARNTVDSLTTVRKLKEVGVEIYFEKENIWTLDSKGELLITIMSSLAQEESRSISENIKWSKRKMAAEGAVSFGYAHVLGFKVAENGGFDIDEDEAKIVRYIFGLFLQGENPNSIARILTEKGIPTPAGKKLWSYSTVKSMLQNEKYKGDALLQKSFTVDYLTKQKKKNEGELPQYYVENNHRAIIDKATFDLVQLELQKTHNRNKVSFCGKVICGCCGNPYGRHVWHSNSKHRRHIYRCNKKYKGEQKCDSPSVSEEEIQGWSVEVINQVIGNKNDIINNMKLLIKMLENTDKLTETIKNLEREMADIGEQAEKMVERNAKVIQNQEMYQAEYDRLVTRYEELQSLLLEKQSTLQLKRKQSADVKLFVDLLAKQEHMVTAFDEKLFNTLIEKMVIYKNKKVAVHFKNGQVIEI

SEQ ID NO: 7249 - protein, 477 aa, synthetic construct
MTYATVIYYCRYSSSKQHGGTSIERQIHLCDEYRLHHKLPSPSHIYTDKGASAFHSKQLEQDLGQLLDDLKSDTYRKPVLVLCEALDRISRASIRASQNIMNDLTSHADVVTVSDGKTYTYEDDSLETVLIQLVKAATANEESEKKSKRAKAYWKKCREEGKAQNTVCPRYLTLNPDRKSYTVKPDVAEEIKGIYQLLIAGYGIKRVHQHYQSWSPSSIARLRKDERVVEYGIVNETDFWKVNSHLISAKKSGAKNSKNLFRSLLKCGGCGANLVFIAPRPSRPTWSGQLVCKNRQAKGRAACPTSKNINYNKFEPIFLDFLENFSSELFKSNQAEVEQKKSQLEKLSMEIDKKENTINNLLDEFSESIGKRLKARVETLEAELDKLDATKERLEADIRGYTDLELKHPKTDAEREEFNTTLLHSLKEMTVFYPDETNSWFNLSNVIEISPDYKEWEPILHAKDDDTSTELEFDTEE

SEQ ID NO: 7250 - protein, 521 aa, synthetic construct
MKKVITIEPAKQVTHKVDLPSFTKRRVAGYARVSTDHEDQTTSYEAQMTYYTDYINSRSDWEFVKMYSDEGISGTNTKKRLGFQEMVEDALDGKVDLILTKSVSRFARNTVDSLSTVRKLKEAGVEIYFEKENIWTFDSKGELLITIMSSLAQEESRSISENVTWGRRRQLAEGQVTFSYSQVLGFKKSDTGGFEIDQEEAKIVRYIFHQVLLGNNPNKIARELTAQGIPTPQGKRKWSYGTVKRMLRNEKYKGDALLQKSFTTDFLTKSTKPNEGELPQYYVENNHEAIIKREVFDLVQVELDKLEKKRQTNNIFTGRLFCGDCGSAFGSKVWHSTSKYKRTIYQCNAKYKGEHKCQTPHVTEEEIKGLFLSAMNQLLSNREEIVANTELLIDLAKDTSPLENKIDDLEQQLETIRQDIEDLVDRNARKAQNQDLYQEQYDTLVTAYQERQKELQEATSSLEEQKSKQLSLDGFIQQLKQQEDLITDFNQELWQTSVERLDIKEGKKISLTFKNGVRIDL

SEQ ID NO: 7251 - protein, 506 aa, synthetic construct
MRHVITYLRYSSAIQGAEGADSTRRQNDLFKQWLKKNSDAQVVASFNDEGLSGYKGKHLSGQFGDMLSRIESGEFPGGTILLVEAIDRIGRLEHLETEALMNRILGNGIEIHTLQDGLIYTKDALADDLGISIIQRVKSYIAHQESKQKSFRVSQKWKQRAKLALAGEQRLTKMVPGWIDPETFEVNEHAETVRLIFKLLLDGESLHNIARHLQANNISSFSRRKDANGFSVHSVRTVLRSESVIGTLPASQRNDRPAIPNYYEAAIDAATFNKAQEILDKNRKGRTPASDNPLTINIFKGLFRCQCGASVHPTGTKNKYAGVYRCNNNPDGRCDVPPLKRKPFDKWMIDNFLGMIDVGNDGEAEGKIASLQHEVEIVTTRIKKATALLLEMDDIDELKIQLKELNQKRTELQTTIDNMRRKASLTDKELPQLKDIDLMTKAGRVECQLILSKHLESLTLGRGQVTVKLSNGTEIIVPTDPLPLTDGAAIFEIAEKNLLNIDTFQL

SEQ ID NO: 7252 - protein, 413 aa, synthetic construct
MAVRLIKAKSEQKKQRVCAYVRVSTTNSSQLDSLENQKTYFETLYANSEDVDFLGVYYDKGISGAKEKRPSFQAMLEACRQGQIDLIHTKSISRFSRNTMTVLEVSRELKVLGVGIYFEEQNINTLSNEGEVMLSVLASLSEEELESMSTNQRWAFQKKFQRGEMVSNTKRFMGYDVDDDGELVINEAEAQIVRRIFHLYLDGMGMHRIAKLLNEEGVPTVSNAKWHNTTVGHMLRNEKYKGAALLQKTYLHGVNGKRRLNQGKVAQYLIEDNHEPIVSKEVWQAVQDKLDSNTWKQGPNKHYRFTSMLRCQYCGSTLKRQVSYKKQIVWSCSKYIKEGKASCQGMRVPEKAIEDWRLKTPVTVIERNEYGQKHYSYSSQENAVDSHPSASHQNQSGRLLSSVHRPRRTAIKL

SEQ ID NO: 7253 - protein, 507 aa, synthetic construct
MKRVISYIRFSSEKQAKGDSLRRQSKMVTDWLKAHPEYYLDQDLSFRDLGVSGFTGKHLKGGLGDFLTAIEKGLVKAGDTLLIESLDRLSRQDIDIASELLRNILRSGVDVVTLSDGEHYTRESLRDPLALIKSILIMQRSHEESLRKSERIQAAWDAKKEAAKAGIKVSKRCPAWLKLNDDRKSFSVIPEKVETVKRCFQLRLEGKSIWEIVRTLNDEGHQSMSQYKPGSFGQSSVQDLLKNRSVIGYFTPKGCEEIAGYYPAIIDETTFYKVQQLSYARYGRKPASDKPLSVNLFKGVIRCSECGHALIITGFSDTRSGIYRCPLRNENRCSAKGLSRKQTDGTLLALLSRLDRFDSDMTNTIDTLKLHREHISSNIEKLVQLSLEIEDLNAITNKLKQLKNELSQVDADIEKETQRLKSIDVGCLSDCDLTTKAGRIEAQLIIKSAVKEVVLNTAKRRCKVTFHNGKIIDLPITENPSEDVTEAIQSLSEVTERGLIDVDVVEI

SEQ ID NO: 7254 - protein, 507 aa, synthetic construct
MKRVISYIRFSSEKQAKGDSLRRQSKMVTDWLKAHPEYYLDQDLSFRDLGVSGFTGKHLKGGLGDFLTAIEKGLVKAGDTLLIESLDRLSRQDVDQASELLRNILRSGVDVVTLSDGEHYTSESLKDPLALIKSILIMQRAHEESLRKSERIQAAWNRKKELISEGIKVSKRCPAWLRLNDDRKSFSVIPEKVETVKRCFQLRLEGKSIWEIVRTLNDEGHQSMSQYKPGKFGQTSVQDLLKNRSVIGYFTPKGCEEISGYYPAIIDETTFYKVQQLSYARYGRKPASDKPLSVNLFKGVIRCSECGHALIITGFSDTRSGIYRCPLRNENRCSAKGLSRKQTDSTLLALLSRLDRFDSDMTNTVDTLKLHREHISSNIEKLVQLSLEIEDLSAITSKLKQLKGELSQVDADIEKETQRLKSIDVGCLSDCDLSTKAGRIEAQLIIRSAVKEVVLNTAKRRCKVTFHNSKSITLSITENPSEDVTEAIQSLSEVTERGLIDVDVVEI

SEQ ID NO: 7255 - protein, 550 aa, synthetic construct
MKGLVYSYMRFSDPRQAAGHSRERQEAYAAKWAAEHGLQLDDTLTMLDEGLSAYHQRHVKSGALGAFLAGVEAGRISAGSVLVVEGLDRLSRAEPIQAQAQLAQIVNAGITVVTASDGKVYSRERLKDNPMDLVYSLLVMIRAREESDTKSKRVKASIRRLCEGWRAGTYRGRVRQGHDPDWLHETPEGWEVVPERVNAVRRAIELYVQGHGGKRIVETLDAEGLQLYSTSDANHSSQVYRLVKLPQLAGVKPVSVDGEDYMLEGYYPAILSQAEYDELRRVGTHSGRRRTQGDLPHVITGLGITVCGYCGRPMAGQNLATKKRLPDGRIRDGYRRLLCQSNAAYGGGCAVQASTSVAPVERALMAYCSDIMNLQALFGVDRTEGPRAQVSAAKAKVEDLNAQLERVTDAMLASAAEGTPQVFARRARALETELQDAEKALRQAEHELAGVARKNVQGAEEAWQQLAGGVEAQDVAARLRARQLVADTFERIVVYARGMRPDPAAGERDYCIDLILVGRGGNSRLLRIDRAGNLLQAEDVSQAEDVVVPG

SEQ ID NO: 7256 - protein, 507 aa, synthetic construct
MKRVISYIRFSSERQAKGDSLRRQSKMVNDWLKAHPEYYLDQDLSFRDLGVSGFTGKHLKGGLGDFLTAIEKGLVKAGDTLLIESLDRLSRQAVDRASELLRNILRSGVDVVTLSDGEHYTKESLRDPLSLIKSILIMQRSHEESLRKSERIQAAWDAKKEAAKAGIKVSKRCPAWLKLNDDRKSFSVIPDKVETVKRCFQLRLEGKSIWEIVRTLNAEGHRSMNQYKPGKFGQTSVQDLLKNRSVIGYFTPKGCEEIAGYYPSVIDETTFYKVQQLSHSRHGRKPVSDKPLSVNLFKGVIRCSECGHALIITGFSDTRNGIYRCPLRNENRCSAKGLSRKQTDGTLLTLLSRLDRFDSDTTNTIDMLRLHREHISSNIEKLVQLSLEIEDLNAITNKLKQLKNELSQVDADIEKETQRLKSIDTGSLSDCDLSTKAGRIEAQLIIKSAVKEVVLNTAKRRCKVTFHNGRIINLPITENPSEDVTEAIQSLSEVTERGLIDVDEVIV

SEQ ID NO: 7257 - protein, 506 aa, synthetic construct
MRSVITYLRYSSAIQGAEGADSTRRQNDLFKQWLKKNSDAQVVASFSDEGLSGYKGKHLTGQFGDMLARIESGEFPEGTILLVESIDRIGRLEHLETEALMNRILGNGLEIHTLQDGLIYTKDALADDLGISIIQRVKAYIAHQESKQKSFRVSQKWEQRAKLALAGEQRLTKMVPGWIDPDTFKLNEHAETVRLIFKLLLSGESLHNIARHLQSNGIKSFSRRKDANGFSVHSVRTILRSETTIGTLPASQRNDRPAIPNYYEAAIDASTFNKAQEILGKNRIGRTPASDNPLTINIFKGLFRCQCGASVHPTGTKNKYQGVYRCNNHLDGRCDVPPLKRKPFDKWMIGNFLGMIDVGNDGEAEGKIASLQHEVEIVTTRIKKATALLLEMDDIDELKIQLKELNQKRTELQTTIDNMRRKASLTDKELPQLKDIDLTTKAGRVECQLILSKHLKGLTLGKDSVTVTLQNDTEITIPTNPLPLNDGSPIFEIADKELLDIDAYQL

SEQ ID NO: 7258 - protein, 544 aa, synthetic construct
MELKNIVNSYNITNILGYLRRSRQDMEREKRTGEDTLTEQIELMNKILTAIEIPYELKMEIGSGESIEGRPVFKECLKDLEEGKYQAIAVKEITRLSRGSYSDAGQIVNLLQSKRLIIITPYKVYDPRNPVDMRQIRFELFMAREEFEMTRERMTGAKYTYAAQGKWISGLAPYGYQLNKKTSKLDPVEEEAKVVELIFDLFLNGLNGKDYSYNAIATHLTNLQIPSPAGKKKWNRFTVKAILENEAYIGTVKYKVREKEKDGKRTIRPENEQIIVPDAHTPIIDKDQFQEANKKIENKIPLLPNRSDYKLNELAGVCICADCGGPLSKYEAKRKRQNKSGTESLYHVKVLRCLNNKCMNVRYNDVEEAILDYLKYLQALNDNDLTKHLGSVIQSHENKNNIRSKKQMNEQFEQREKELKNKLNFIFDKYESGIYSDEIFLQRKSVLDKELQELKKAKDEINGLVDFKGGLDINQLKENIKNAIELYESSENREEKNKLLRIMLQKVIVKMTAKRKGPIPAQFEITPILRYNFLIGETVSSYES

SEQ ID NO: 7259 - protein, 493 aa, synthetic construct
MRAAVYIRVSTDDQVKHGYSLAEQREACCSRARILGAQEVTVFSDEGISGSTLERPGLNEMREAAREGRFQLLVVRDPDRLSRKLAHQLLITDELEKCGIKLEFLDFDWKDTPEGRLFYSIRGAIAEYEREKIRDRMGRGKEQKARQGGIPINFDVFGYQYDPETGKVSYLEHEKKVVVDIFNWFTSEDIGANGIAKRLNENGIPTRRRAGRWHRQVVKQILANTVYIGLWRFKGMYIKVPPIIDENTFYRAQEKLKEVRRLYAGKQKHGYLLSGLITCADCGNTMTGAYARWWGKRERRYTCNKTCQGYKNEGCRPVKYILADALEEAVWNQIQTWLMDPDRLAREAMGQIVGQNDPREQIMVINKHLASIEKGQEALIDVIAKGYLDHMDSIEKKLAELKRRKEKLEKRKEELLLAYRQREELFAKIDEIREISESILRRLDDLAFTEKRSLVRALVKQVIVSGRGVPGGNGLRFINVTVLAKIPEQKISS

SEQ ID NO: 7260 - protein, 551 aa, synthetic construct
MTTAYSYIRLSSKQQIAGHGRQRQDTAAQEAADQYGWRLSDKTFHDLGVSGWKGANVETGALSQFLRLVEEGVVLPGSVLIVENVDRLSRAGVNKAVRLLLELLESGISIYTVSERKLYSPQADNPLMDLMQWALSAQRAHEESEVKSARVKQAKRKAQEEAREKGTIVTALGPQWLTLRPDRSGFDLVPERVEAVQLIFDLYLAGYGSTRIARELTQKGYKPLRGKAWYSTSVLRLINSRLVLGEFQPLRDGKPYGDPIPNYYPAIIDEGRWLEAQAIKGEGGAGKGRRAVQFDNVLSGVVRCGCGQGTHIHRTTTKGKEYKSIRCVQYSIDCKNRNWAYQRLLIAVVWGLQNSSVERILVKRDDVDLMGLQSKLMQDKAALAAVVKQVNNVVDAITTIGINADLQERLGDLTAKRQQLEVQVATSEAALAQAEGSQAIADQGPEELRDAFLQVWDMTKTEEGRIKVNQILRRYLSAVVLHPAVEGADHNVIEILAKDASVVCRLTVDKGFKVIHMTDRPDGKTLFMEIPAAVRHKRNAPLRESSEQSPC

SEQ ID NO: 7261 - protein, 536 aa, synthetic construct
MDCVIYMRWSSSEQSRGSTLERQQADCRRHAAEQGWRVVEELVDDGISAFKGEHATTGRLSSFVRDVEAGRYPDGVILLCEKLDRLSRQEPGRVFLWMMNLTEAGVTVATVDGARRYSKGNLDMAAIIEVVVKAQLSHEESGKKSQRLSAAWAAKRHRLDAGAKFVMTRRAPGWLEVVGDPPRFVPIPGRVDVVRRIFEETVAGFGKQYIARNLNRDGVPTFGRASGWHASAVQKILRNPAVVGELHPATKPRGSKREPTGEVVQDYYPVVVDADLHRRATAAMAERSRRFAGRGRRLVNLFSGLARCEACGSKMTFRGKGRKQRADGSWVNEDYLVCDGYQRGRGCDNRLHYNYAVWEDGILSPIIYDALREESFAPQTEVQELEIEVARLERISQLAKARTKTALDLAIETGRHEARTAWTDLTRQSDEAEAALDAARERLFRIRGSLTAEEQQERVRALRASLDHADEDVRFEARSKVKSAIHALVAELTFAGPARIGVSMKLGDDRQVSIDYDEIVGGTEWIMGRLDGQPLA

SEQ ID NO: 7262 - protein, 599 aa, synthetic construct
MKKEVKVIKGDTTLKRTASGCVERSIKRVAAYCRVSTDTEDQINSYNSQVEHYTEFIQKNNEWTLAGIYADEAITGTQVDRRIDFQRLINDCMNGDIDMIITKSISRFARNTLDTLKYVRKLKEFNVAVFFEEENINTLTMDGELLLTILSSVAQQEVENISANVKKGLRMKMERGEMVGFQGCLGYDYDPETKSISINEKEAEIVRYIFRRYIEGVGGMVISRELEEQGYLSPRGNKRWTETTVLGIIKNEKYKGDLMMGKTYTVDPISKRRLDNFGEQDKFYIENHHEPIISEEDFEKAQGIRLRRSKNRNTVANNGGKREKYSRKYAFSSMLECGFCGHNLSRRNWHSSSEYTKVIWQCVNATKNGKKYCPHSKGIEEEAIEKAFMESYRQVCHNNVEITNEFLKTVEEELKDNSLAKDLKKITNQLDKILKKEKDLVELRLNESISMDIYQDKYNEIAISKEKLLAEKRTLEVTLTDEKALKKRLEGFKKLLESNKYFEEFDRAVFESIVDKIIIGGTNDEGEIDPAMITIIYKTGKKDSQDGRLFKSRRKNAKEVNEKADSKLYPQSSDEVNNLCSYPMDNTRRVRSFANQGVR

SEQ ID NO: 7263 - protein, 582 aa, synthetic construct
MKPRAYSYIRYSSPQQAKGDSFRRQFAQTQKFCEENGYELDTELSVYKELGKSAFKGEQENLKRFIEDCKSGIVEKGSLLIVENLDRLSRDTINKAMRQFLHLLDYVNIYTLQDRKFYTSNDDVDNDAQVFDIITSLLIMSRAHEESQTKRKRLKESWEAKRQQIDKKKFATSYPHWLVLADDWESFSLKEDAVRAIRKIFELCIDGNGYNQILRHLNDKIEQYPTPSKRSKSGLWVRSTIQLLLSDRRLIGEMQMYKGAYKNRKPYGEPIADYYPQVIDEETFLKAQIAMQSRKVGKGKTGKYRFSNIFRGFLHCAECGNAMEYVDKGNTKKRSQKYLTCTSAKRGGSCTHSRHYRYEELELMLLHLVTENGFLPKPVEPNDLHLQVQKLKEQKASANNKLNALLEHDFTAPAIMTKVQELNEQVARFDAEIQTMENKLNQKTITYRYDQLVYDLIDEPDEEIKFNNRVNFNSNFSTKVKRANVQNDINCLLVEFVMENDEHHRIILDSKYNFGGSSLSSGGSVYKRLAGEEFIHNGTSKESNIWHNLQRYIEWHFEIKKKSFTPENKKLIEINMKKMALD

SEQ ID NO: 7264 - protein, 509 aa, synthetic construct
MRRAISYIRFSSERQLKGDSVRRQSKLVTDWLDKNPEFYLDSSLSFKDLGKSAFSGKHLKGGLGDFLTAIEKGLVKAGDTLLIESLDRLSRQDIDIASELLRRILRAGVDVVTLSDGEHYTKESLKDPLSLIKSILIMQRAHEESLRKSERVQAAWNRKKELISEGIKVSRRCPAWLRLNDDRRTFTIIPDKVEVVKRAFDLRLQGLSFWAITRTLNDEGHLSLNQYTPKQKGWSDTAVKKLLRNRAVIGCFTPAGREEVQGYYPAIISESLFYRVQQLNTGQYGRASVSSNPLSVNLFRGIIKCSECGATIVLGGYALKRFGMYRCPNRSANRCSAKAISRKQTDATILYMLALCDRFETENTDTIDGLKIQREDLQRKISKMAELAIELDDMTIITEKLRDMKNALSKLNHDIEEETKRIKAITTGSLKDIDRTTKEGMIETQLLIKGVLKEIVIDAAKRRCKVTFHNGRAITLPITENPSEDVTEAIQSLSEVTERGLIDVDEVII

SEQ ID NO: 7265 - protein, 470 aa, synthetic construct
MKGESELDKKAAIYIRVSTQEQATEGYSIQAQTDRLTKYVEAKDFILYKKYIDAGYSASKLERPAMQELIQDVQSKKVDVVIVYKLDRLSRSQKDTMYLIEDIFRPNDVELISMQESFDTSTAFGSATVGMLSVFAQLERKSISERMITGRVERAKKGFYHTGGQDRPPAGYQFNSDNQLIINEYEAAAIKDLFRLYNDGLGKSSISEYLKKNYPGKNKWLPSSIDRMLKNSLYIGKVKFSGAEYDGIHEPIIDEVTFYKTQKEIARRKQTNTKRYNYVALLGGLCECGICGAKMANRRAVGRKGKVYRYYRCYSKKGSPKHMMKTDGCSSRAQQQFIIDEAVINNLKNIDVEAELKRRSAPQTNTSLISSQIESIDKQINKLIDLFQVDSMPLDVISEKIDKLNKEKQSMEKLLERKNKLDKTELQHRFDVLKSFDWDNSSIESKRVVIEMLVQKVIIHDNSIEIILVE

SEQ ID NO: 7266 - protein, 464 aa, synthetic construct
MDKKAAIYIRVSTQEQATEGYSIQAQTDRLTKYVEAKDFILYKKYIDAGYSASKLERPAMQELIQDVQSKKVDVVIVYKLDRLSRSQKDTMYLIEDIFRPNDVELISMQESFDTSTAFGSATVGMLSVFAQLERKSISERMITGRVERAKKGFYHTGGQDRPPAGYQFNSDNQLIINEYEAAAIKDLFRLYNDGLGKSSISEYLKKNYPGKNKWLPSSIDRMLKNSLYIGKVKFSGAEYDGIHEPIIDEVTFYKTQKEIARRKQTNTKRYNYVALLGGLCECGICGAKMANRRAVGRKGKVYRYYRCYSKKGSPKHMMKTDGCSSRAQQQFIIDEAVINNLKNIDVEAELKRRSAPQTNTSLISSQIESIDKQINKLIDLFQVDSMPLDVISEKIDKLNKEKQSMEKLLERKNKLDKTELQHRFDVLKSFDWDNSSIESKRVVIEMLVQKVIIHDNSIEIILVE

SEQ ID NO: 7267 - protein, 547 aa, synthetic construct
MKLLVTYIRWSTREQDSGDSLRRQTNLIDAFYSKHKNDYYLLPAHRYVDKGKSGFHQQHKNQGSDFRRMFENVMSGVIPEGSLIVVENFDRFSRADIDTAIDDVRQILRKGVSILTLGDGELYDKSALTDPVKLIKHIIIAERAHQESLVKQKRIAQVWNHKTQLARELKKPMGKQAPGWLELSEDGSHYIVDEDKASLVNIIYDKRLSGMSMFAICKWLNEQGYPTINQRKVRISKTKKPDGNWSALSVKHILTSRSVLGYLPAKISSEDRKTVLREEIEGFYPQIVTDSKFYAVQQLLEETGKGKTSSGEHWLYVNILKGLIRCKCGLVMTPTGIRKPVYQGTYRCNGNKESRCSYGTVSRKLLDTQLCSRLFSKLSQLHDEATDTAKLDELQRRLNTVDSELEKLTETLIQLPNITQIQEALRVKQGEKDELIVQLSREKARVKSVSSLNLSGLDMESVEGRTEAQIIIKRLVKEIVVSGNEKLVDIYLHNGNMIRGFPLDGKDDHTLTLEEATDEMQSLDDMLIFGEPVTRIYPAGDMEEVDA

SEQ ID NO: 7268 - protein, 496 aa, synthetic construct
MITYAYSYVRFSSKQQSTGASLKRQIEASEAFCRENNLTLAPLSFHDLGISAYKSKARASLTELLEAVNTGRISAGSYVLIEAIDRLSRKGFDDTHSMLRSILLKGVNVAFVGTDAKSLAGTILTRDSLNDTMAIIQVAISADLAHKESQRKSKLVRDAKKRAKEKVSNGEIAKRRLPFWLTLDGDKYVLNGRVDVVREIINMRQSGYGKHKIAQTLNAKGSKTALNKQWSSQTIKYLLAHPALYGAHQLTERIEDSVINAELVENVYPAVMSKKDFFLIQFDEKRVTSGRTSSNFPFKGVVRCICGSTIVYGPRKLNNKIYHYYFCAASKDGKCTQTKLIPNLSSVLKKVIDKITIQSVVRNQSDVIKQEIQQKKDKMAGIHAKLLEMNDPPLSLFELIRNMEKEIESLSAQLKDESFRSAGATNADVTKLKDISDPVEYNMQVKRIVDVITVYRPNDKQGWLRVKIKKIDGNFQSFIIVDENIRLFSDTEAIKS

SEQ ID NO: 7269 - protein, 506 aa, synthetic construct
MRHVITYLRYSSAIQGAEGADSTRRQNDLFKQWLKKNSDAQVVASFSDEGLSGYKGKHLTGQFGDMLARIESGEFPAGTILLVESIDRIGRLEHLETEALMNRILGNGIEIHTLQDGLIYTKDALADDLGISIIQRVKAYIAHQESKQKSFRVSQKWGQRAKLALAGEQRLTKMVPGWIDPDTFKCNEHAETVRLIFKLLLDGESLHNIARHLQSNDIKSFSRRKDANGFSVHSVRTVLRSESVIGTLPASQRNDRPAIPNYYEAAIDAATFNKAQEILDKNRKGRTPASDNPLTINIFKGLFRCQCGASVHPTGTKNKYAGVYRCNNHLDGRCDVPPLKRKPFDRWMIDNFLGMIDVGNDGESERKIAALQHEVEIVTARIKKATALLLEMDDITELKTQVKGLNQKRTELQTTIDNMRRKASLTDKELPQLKDIDLTTKAGRVECQLILSKHLKGLTLGKDSVIVTLQNDTEITIPTNPLPLNDGSPIFEIADKELLDIDAYQL

SEQ ID NO: 7270 - protein, 453 aa, synthetic construct
MTKAAIYIRVSTQDQVENYSIEVQRERIRAYCTAKGWDIYDEYIDGGYSGSNLDRPDIKRLLNDLKKIDVVVVYKLDRLSRSQRDTLELIEEHFLKNNVDFVSITETLDTSTPFGKAMIGILSVFAQLERETIAERMRMGHIKRAENGLRGNGGDYDPSGYTRVDGHLILKPDEAKHIKRAFDLYEQYHSITRVQEVLKEEGYTVWRFRRYRDILSNILYIGRVTFSGKEYKGQHEPIISSEQFKRVQVLLKRHKGHNAHKAKQSLLSGLITCSCCGEKYVAYSTGKSKDVESKRYYYYICRAKRFPSEYDERCMNKTWSRKKLEEVIFDELKNLTVKQSASQKKEKKINYEKLIKDIDKKMERLLDLFTNTTNISRQLLETKMDKLNSEKEHLILKQQSYEQEFSISKDMITTINESLETMDFRDKQVMINTFIQEIHIDHDVVDIIWRWRF

SEQ ID NO: 7271 - protein, 492 aa, synthetic construct
MDQVKVYSYLRFSDPRQSTGTSIERQTQYARQWAAVHGLKLDESLSLRDEGLSAYHQKHIKQGALGTFLEAVQDGLIAEGSVLIVESLDRLSRAEPILAQGQLSLIINAGITVVTASDNKEYNREKLKANPMDLVYSLLVMIRAHEESDIKSKRVKAALKSRLKGWIDGTYRGRIAAGSTPQWLSWSTDHWEVITDRAQAYQIAVKLYRQGKTSNSIICHLKNLGLAMNENGLPKPNNLATLLRNPALTGVKIVSVDGEKFELNDYYPALISNRDRKSLFLPRHKRHRKPDDIASVVTGSKLLRCGYCDSAVVGGNSLQRKRRPNGTPQDGHRRLHCCGNNKPKRRRCTTSASCSVVPVENAIMAYCSHSQSLQPSHEAPNTTLHENWAQLMDGVNSLDFDAREMAQYLIKETFQKIIIYMNGFTPTKANGPIHTQPPIDLTLIPKHGEPKSLHINRKTGEWVIDNSTINQSHSVAVFHQAVESDESTNSDT

SEQ ID NO: 7272 - protein, 563 aa, synthetic construct
MLILKGDERLTTEQIMGLIGKINAIIYVRVSTTDQAEKGYSLESQIERCKERALTKFKYKESELIALVEPGGMGDDPNRPALNHALYLLEKGLGKKFIVLHPDRLTRDNTLQGIVSRKIWGMGVDIEFIEFEVDPTNPESMLMYNIQGSIAQYNKAKINANSKRGRVAKAKKGEFPSFKRLFGYKFNKETDLPEYDEEERQVLLEMKDMLLNRDMSSNEIAKELSKRGVPAPDGDTWYQATVSRILKNEDYTGNFYYGKSKVVQINGESKQVPTPEEEWILIKIPPIWDYETRDQILKKLKENYKGRSRKTRDYLLKGKAKCGRCGSACGSGFTSKTKSGVYKYYSCRRKNAKAYQNGKKIIDCPGKNWRVDIVDDVFWKWFKKLLKNPTDFLEQFLSETSNEKKIEELQHKVKNLTKQIEEIDSEVSNYVILFGKGKINEDMFDKLTQPLEQKKEYIETELEIINSQINANKDVEDKNQKLKEYVSSFSEMVDKDLSMDEKRKFIDFFIEKVTLFDDDHMEIVWKSDGLNSNDDKVSLYNEGDAMKLNNSHKRLNYVQTYGG

SEQ ID NO: 7273 - protein, 541 aa, synthetic construct
MPKAISYIRFSTKIQSVGDSTKRQSKYINDWLKRNPDYYLDESLRFQDLGISGFSGANAKSGAFGEFLAAVESGYIESGSVLLVESLDRVSRQDIDTAGEQLRKILRAGVEVVTLVDNEWYTKDSLKDSLSMIKAMLVMERAHEESAIKSTRLRSMWAGKRERAANGEIMSKRCAAWLKVSEDRSHFEFIPENVKAVQRVFQLRLEGLSHVKIAKQMNDEGFSTLNQFKSVTGGWSQSSVTELLSNRSVIGFKVPSKSMAVKGVSEIPNYYPAIITDEQFYAVQQLKQGSGRKPSSDLPLLTNLFKGVLRCSECGFIVVVAGVSAKRSGIYKCSMKSEGRCNSVGFSRLQTDRALVQGLLYNTNRLSLNRDNGSAIGALAGELEQLQKQRERLIKLAMLADDTESMAKDLKALNSQIKDAEKAVSEVHQREQSSQLETISHLDLTVKKDRIEAQIIIKRIVKEIRLNTAQKKCDVFLHNGLKLLNFPLDRVVDGAQWLEVLPLIDGDEFDFAEFTTKPRHITLEEAPEWVKAMEKQPNQPL

SEQ ID NO: 7274 - protein, 525 aa, synthetic construct
MTTAYSYIRFSSKKQQKGDSLRRQSELVTTYCRQHNLTLSTQSFSDLGVSAYHSDNIKGDSGLGQFLNAISEGKIKTPCYLLVESLDRLSRAGINKALRQLMEITEQDVTVITLFDNRMYTKDMDLGDFIHSIVYMQRAYEESDTKSKRLKAVWHNRRTNPEALKTNNKPFWLDLTPDRKGFVLNESAETVRRMFDLSINGFGSNLIAKHFNRDGIPSPNVKTWGDAVITKTLNNKAVLGEYQPNTVKGRKYTPIGEPIKGYYPAVVGENTFYLSQAKIKERAKSQRRGSTSSHLNMLKGIGVCVDCGAPLRIQTQQHLKYFRCPEALKGLCNSKPVNIWFLRDWLKEQWLSPVFFETWSVATGESVSKELEALEAKKSELSNTLEMMLQSFSATTSPLVLANIQQRTEEIDSLGKEIESLKEKEASSSQHQVSYQNCWTLIDKAFSEENETENLVARNKIRGLLSRFDSFTVGMTSNREATLAADIDGGIFSFISTPFPYAPKRKAPPFIWYMVEIPSVTKSNV

SEQ ID NO: 7275 - protein, 604 aa, synthetic construct
MKKVFVYHRVSSDQQLDGSGIARQAELLEGYLERTGICAEMDDPAPVVLSDQGVSAFKGLNISEGELGAWMEQVRNGMWDSSILVVESIDRFSRQNPFDVMGYINALMAHNVAIHDVMANIVISRSNSKDLPFVMMNAQRAYDESKYKSDRIRKGWAKKREHAFNKGTIVTNKRPQWIEVENDKYVLNHKAAVVKEIFSLYQTGMGCPTIAKQLQRKEGEQYKFNRPWTGELVHKILTNRRVTGKIFISEIIRNHDDIENPVTQKKYDMDVYPVVINEEEFELVQELLKSRRPNAGRVTVKKDGQEEVLIKSNLFSGIARCTECGGPMYHNVVRAKRTPKKGDPKIEEYRYIRCLNERDGLCENKAMTYETVERFVVEHLLGIDLSTVIKEQEFNPEIEVLRIQIDQVKDQITNYENGIERRKSTGKPISFEMREELDDAKSELERLLARQASLATVQVDVPVLQDVNVTELYNVNNVDIRTRYENELNKIVSNIRLKRNGNFYTIDIIYKQNELKRHVLFIENKKKEQKLISEVIIENVDGAKFYYTPSFVISVKDGEIRFQQTKEDLSIIDYSLLLNYVDAVDRCDAVGVWMRNNMSFLFTK

SEQ ID NO: 7276 - protein, 649 aa, synthetic construct
MLRPICYERVSSIQQIEGGGGLDDQRSVLEAYLDRNAALFNNDRVFIRDLGVSAFRNSNISPESQLGIFLQDVQNRKYGEGDALIVMSLDRISRRSSWAEDTIRFIVNSGVEVHDISASTVLRKDDPHSKLIMELIQMRSHNESLMKSVRAKAAWDRKIKEAIKEGKVISNRMPVWLVNEGGKYAINEEKVELIRSCFKMYAAGMSTGEIVKHYKQKGVLLQMVTVSNWVRDRRLLGEHKRYNDEVYRGVYPVVIDDELFLTANRMMDRVGLEKKKPREDLLLDHAVVKKIFRLFEDGVGTGSIVKQLEAGWSTVNVLRVLRDKKVVKMKIIDNLTFERVNQKLSLNGVANRIRKDLSIAQDDYITNLFPKILKCGCCGGNIAIHYNHVRTKYVICRTREEKKACDAKSIQYIRIEKNILETVKNVNFEQLMKKEETNSSPVDTLREELSSLREEEKAFIARIEERKKKGLLTGIMLSDGLTEVQDRIVQVEDELIGLQDIREIPKLDFNIDEVLDPMNVELRARIRKELRLVLKAIRYRVIANAIFVHLDYFNDYLTHVLVINNKRGGGEMLTEFIIEHRNDVRIYKSDSFCLTYTEGDKLPAFSTLDSKPINFIEYILLRDYIRELEGEESVTAIWMDRNEKFIFQS

SEQ ID NO: 7277 - protein, 604 aa, synthetic construct
MKKVFVYHRVSSDQQLDGSGIARQAELLEGYLERTGICAEMDDPAPVVLSDQGVSAFKGLNISEGELGAWMEQVRNGMWDGSILVVESIDRFSRQNPFDVMGYINALMAHNVAIHDVMANIVISRSNSKDLPFVMMNAQRAYDESKYKSDRIRKGWAKKREQAFNKGTIVTNKRPQWIEVENDKYVLNHKAAVVKEIFALYQTGMGCPTIAKQLQKKEGEQYKFNRPWTGELVHKILTNRRVTGKIFISEIIRNHDDIDNPVTQKKYDMDVYPVVINEEEFELVQELLKSRRPNAGRITVKKEGQEEVLIKSNLFSGIARCTECGGSMYHNVVRAKRTPKKGDPKIEEYKYIRCLNERDGLCENKAMAYETVERFVVEHLLGMDLNTVIKEQEFNPEIEVIRIQIDQVKDQITNYENGIERRKSAGKAVSFEMREELDDAKLELEQLLARQASLVTVQVDVPVLQDVNVTELYDVNNVDIRTRYENELNKIVSNVRLKRNGNFYTIDIIYKQNEVKRHVLFIENKKKEQKLISEVIIEDVDGTKFYYTQSFVISFKDGEIRFQQTKKDLSIIDYSLLLNYVDAVDRIDAVGVWMRNQFNFLTSN

SEQ ID NO: 7278 - protein, 507 aa, synthetic construct
MKRVISYIRFSSEKQSRGDSLRRQSKMVNDWLKAHPEYYLDESLTFRDLGVSGFTGKHLKGGLGDFLTAIEKGLVKAGDTLLIESLDRLSRQNVDRASELLRNILRSGVDVVTLSDGEHYTSESLKDPLALIKSILIMQRSHEESLRKSERIQAAWNRKKELISEGIKISKRCPAWLKLNDDRKSFSVIPEKVETVKRCFQLRLEGKSIWEIVRTLNDEGHQSMSQYKPGSFGQTSVQDLLKNRSVIGYFTPKGREEIAGYYPAIIDETTFYKVQQLSHSRYGKRSVSDKPLSVNLFKGVIRCSECGHALIITGFSDTRNGIYRCPLRNENRCSAKGLSRKQTDGTLLALLSRLDRFDSDTTNTIDTLKLHREHISSNIEKLVQLSLEIEDLSAITSKLRQLKGELSQVDADIEKETQRLKSIDVGCLSDCDLTTKAGRIEAQLIIKSAVKEVVLNTAKRRCKVTFHNGKLIDLPITETPSDNVTEAIQSLSEVTERGLIDVDEVII

SEQ ID NO: 7279 - protein, 507 aa, synthetic construct
MKRVISYIRFSSEKQAKGDSLRRQSKMVTDWLKAHPEYYLDQDLSFRDLGVSGFTGKHLKGGLGDFLTAIEKGLVKAGDTLLIESLDRLSRQAVDRASELLRNILRSGVDVVTLSDGEHYTSESLKDPLALIKSILIMQRAHEESLRKSERIQAAWDAKKEAAKAGIKVSKRCPAWLRLNDDRKSFSVIPEKVETVKRCFQLRLEGKSIWEIVRTLNDEGHQSMSQYKPGKFGQTSVQDLLKNRSVIGYFTPKGCEEISGYYPAIIDETTFYKVQQLSYARYGRKPASDKPLSVNLFKGVIRCSECGHALIITGFSDTRNGIYRCPLRNENRCSAKGLSRKQTDGTLLTLLSRLDRFDSDTTNIIDMLRLHREHISSNIEKLVQLSLEIEDLNAITSKLKQLKGELSQVDADIEKETQRLKSIDVGCLSDCDLTTKAGRIEAQLIIKSAVKEVVLNTAKRRCKVTFHNGKIIDLPITENPSEDVTEAIQSLSEVTERGLIDVDVVEI

SEQ ID NO: 7280 - protein, 547 aa, synthetic construct
MKLLATYIRWSTKEQDSGDSLRRQTNLIDAFYSKHKNDYYLLPAHRYVDKGKSGFHQQHKAQGSDFRRMFENVMSGVIPEGSLIVVENFDRFSRADIDTAIDDVRQILRKGVSILTLGDGELYDKSALTDPVKLIKHIIIAERAHQESLVKQKRIAQVWNHKTQLARELKKPMGKQAPGWLELSEDGSHYIVDEDKASLVNIIYDKRLSGMSMFAICKWLNEQGYPTINQRKVRISKTKKPDGNWSALSVKHILTSRSVLGYLPAKISTEDRKTVLREEIEGFYPQIVTDSKFYAVQQLLEETGKGKTSSGDHWLYVNILKGLIRCKCGLVMTPTGIRKPVYQGTYRCNGNKESRCSYGTVSRKLLDTQLCSRLFSKLSQLHDEATDTAKLDELQRRLNTVDSELEKLTETLIQLPNITQIQEALRVKQEEKDELIVQLSREKARVKSVSSLDLSGLDMESVEGRTEAQIIIKRLVKEIVVSGNEKLVDIYLHNGNMIRGFPLDGKDDHTLTLEEATDEMQSLDDMLIFGEPVTRIYPAGDMEEVDA

SEQ ID NO: 7281 - protein, 559 aa, synthetic construct
MKTKLYSYIRFSSMKQADGSSYERQKRTAAEIAAKYDLELVTSYQDFGVSAFKGANSRTGALSRFLDEIGRSVPVGSWLVVENLDRISRQSIIEAQELFLSIIRRGITIVTGMDGKVYSKESVNANPIDLLLSVMLFARANEESQTKRNRTNSSALIKIKAHQENPQNPAVAIEEIGKNMWWTDTTSGYVLPHPVFFPIVQEVVELRRNGRSTAEILDHLNATYTPPPAASHKRHSNWSRAMIERLFHTRALIGIKEISVDGVKYELKDYYPRVLDDAEFYHLKKSIGVRACNYGDKEEVKPIPLLSGVGLLKCEHCGSAMVKVKGTNKRPNQYRYSCDAMRSSRIACVHTNWSFRGDQLEKAVLQLLADKIWIAEDKANPVPALKVQVDEISRKIDNLIALSAMTGATKELADQITTLNSERETLYNQIKMAEEEMYSVDSQGWEKLAEFDLEDVYNEDRIKVRFKIKQALKRIGCSRIDKYKNLFVLEYIDGKTQRVVIENSRGPRKGRIFVDLKTINDRQILESNGLVLHPCLDMLTDKNWKPEEEIPGPLQEFGI

SEQ ID NO: 7282 - protein, 576 aa, synthetic construct
MKPHAYSYLRMSTDLQLKGDSKRRQLEASRRFASENGLELAEGAELEDIGVSAFKGANVRDGSLGRFLKAIESGLVKPGSYLLVESLDRLTRQELNKAQALFLSIIQAGINVVTLADNRMYRAGTNDLGDLIYSLVVMARAHEESQLKSQRIGAAWKNKRSRAAAGVPMTAWCPGWLKLSEDGSRYIEIPERAAVVRGIFEDSAGGLGILSIANRLNQANVPTFGSRNGWYASYVAKILANRAVLGESQPHCREDGKRIPDGDPNRAFFPAIIGEELFYRAQVAKSERKVSGSGRKGKNFTNLFSGLARCAYCKSRMKLENKGSGRKGTTYFICDRAWRRLGCPGKRWRYQDFEASYLAFVEEVDLERVLTESNGTAVNKVADEISGLKGALAETEKLMERTYEVLTQGGPVDFVTTKLKEQEARKTELKRRLEAAEKEAQRLTARREQQHRTRDELKHLVDRVRNGEDAHLYKLRAQVASHLKALTESLLVASIGEAPLVEERVRKFQELAGPAHEDIVSAMSAPSGFRDHRYFSVGLRDGKVRIVFPDRDDPLKFRQQITADGLWGIQSFSAEV

SEQ ID NO: 7283 - protein, 547 aa, synthetic construct
MKLLVTYIRWSTKEQDSGDSLRRQTNLIDAFYSKHKNDYYLLPAHRYVDKGKSGFHQQHKNQGSDFRRMFENVMSEAIPEGSLIVVENFDRFSRADIDTAIDDVRQILRKGVSILTLGDGELYDKSALTDPVKLIKHIIIAERAHQESLVKQKRIAQVWNHKTQLARELKKPMGKQAPGWLELSEDGSHYIVDEDKASLVNIIYDKRLSGMSMFAICKWLNEQGYPTINQRKVRISKTKKPDGNWSALSVKHILTSRSVLGYLPAKISTEDRKTVLREEIEGFYPQIVTDSKFYAVQQLLEETGKGKTSSGEHWLYVNILKGLIRCKCGLVMTPTGIRKPVYQGTYRCNGNKESRCSYGTVSRKLLDTQLCSRLFSKLSQLHDEATDTAKLDELQRRLNTVDSELEKLTETLIQLPNITQIQEALRIKQEEKDELIVQLSREKARVKSVSSLDLSGLDMESVEGRTEAQIIIKRLVKEIVVSGNEKLVDIYLHNGNMIRGFPLDGKDDHTLTLEEATDEMQSLDDMLIFGEPVTRIYPAGDMEEVDA

SEQ ID NO: 7284 - protein, 445 aa, synthetic construct
MKLLVTYIRWSTREQDSGDSLRRQTNLIDAFYSKHKNDYYLLPAHRYVDKGKSGFHQQHKAQGSDFRRMFENVMSGAIPEGSLIVVENFDRFSRADIDTAIDDVRQILRKGVSILTLGDGELYDKSALTDPVKLIKHIIIAERAHQESLVKQKRIAQVWNHKTQLARELKKPMGKQAPGWLELSEDGSHYIVDEDKASLVNIIYDKRLSGMSMFAICKWLNEQGYPTINQRKVRISKTKKPDGNWSALSVKHILTSRSVLGYLPAKISTEDRKTVLREEIEGFYPQIVTDSKFYAVQQLLEETGKGKTSSGDHWLYVNILKGIIRCKCGLVMTPTGIRKPVYQGTYRCNGNKESRCNYGTVSRKLLDTQLCSRLFSKLSQLHDEATDTAKLDELQRRLNTVDGELEKLTETLIQLPNITQIQEALRVKRKRRLSTVWSRIQDPVT

SEQ ID NO: 7285 - protein, 524 aa, synthetic construct
MASNSAVKKVVTVIPVKPVEVVKGFALGAKKRVAAYCRVSTDLKEQETSFESQVQHYTDTISKRSDWELVDIYADDGISGTTTTKRTEFLRMINECMAGKIDMVITKSISRFARNTEDCLHFVRKLKDKGIAVYFETENIDTLGSGGELLLTILSGMAQDSSRNQSDVTKWGILRQFESGRVLVNTTRFLGYDKNDNGELVINEEQAELVRRVFTEYLEGKSYNAIAKGLTKDKVKTVTGNEKWWDSTISGMLENEKYYGAALLQKTITVNFLTHKRTSNKGQSQKYMIDENHLPIIAKELFEKVQDEKERRALLRGNLVGDRHKYSSRYPFSGKVFCGNCGNIFKRRQWNSNNASKKVVWQCKTYIMDGKDACGARAVDENALMDAFVRMFNRIYENRQSFIKTMTENIETIILLKPDIRETEALDERIEELKNELKKLIRFQVSNNIDSEVYNEEYKSISGELEEMRKKRLEHDKIIESKDGLKQRLDEILETINSRDSLLEEFDEEIFNALVEKYWCAPRQ

SEQ ID NO: 7286 - protein, 515 aa, synthetic construct
MNKKVKAGIYIRVSTEEQKQGHSLEAQESMLKEFADKKGYEIYDVYNDGGYSGKNFNRPEIQRLLRDLKDDKIDVILVWKVDRLSRNNTDVMLLIDTELTPRKKSLIITSIDMDSSSPTGHMFISLLSTFARYERATIIDRVKAGMQKRAEKGYWNGGSILGYDSVDKKLIINENESKIVREIFQLRAEGKGYKFIVNILNDKGIKTKTGKNFSIPAIKLIVNNYIYSGKMVWKKHQDWGTRRRAGKAEPIIVEGIHDAIIDEGLWERVQKVNELQKNSFSSNRNFNGKFLLTGILKCPKCGAGTVISKTKKRNSDDYYLYYTCQAYHNKGPSVCRANLIRKEQVEQQVLNIISLLVNENDIINALIDELNSGNNKTNELHIAHIKMLKKQLSKAYDKRKKLDNDYFEGNIEGSTYNRLMNELQLDINKLKRNVRESESEIIKNDSTINKEEVIHALENFNKLFKMVNDEEKKLLIRSLIREIQMEANRKDIKEITFWFLPGSVLPSNKARRTVS

SEQ ID NO: 7287 - protein, 1219 aa, synthetic construct
MSKEKIKVYLYTRVSTSIQIDGYSLEAQKSRMKAFALYNDYEIVGEYEDAGKSGKSIEGRVQFTRMMEDIKSGKDGVSFVLVFKLSRFARNAADVLSTLQIMQDFGVNLICVEDGIDSSKDAGKLMISVLSAVAEIERENIRVQTMEGRIQKAKEGKWNGGFAPYGYQLIDGKLIINEEEAIAIRTIFDQYVNTSIGANGLSKYLENHGIRKIPRQNGKNPLFDAGLIRKILKNPVYNGKIAFGRRTLEKVHGTRNEYRQVEQDDYLVAEGIHEAIIPDELWQAAQVKLKAQAKKYEHVNKGKNMRTHLLSGIVKCPICGAGMFGNKSIKYKKDGTKYKDFYYYGCKHRLMNRGHKCTYNKQIREELLDDAVAEVIIKLVSNPKFASMIQEKINMKVDTSAIENEIDNYQNELRKSHSTKYKLIEEIDNLDVEDKHYKRRKNDLDDRLYRMYDKIEELESQLIEAKAKKETIEVEKLTGDNIYKVLIYFDKLYKVMNDVERRQLIEALISEIQIYEEKQPNGQWLKSITFKLPIIDEDLNISLENDEQVDGVSVPGVDPNTGFPLPDIGGGIGVEVTFDVVVESIPNPNPTNNIATIDYSYTPVEGGIPNDFSVDSNPVPVEVISADVEVTKLSEPTIVNPGEELIYTIKVVNNGPFPSENVVLTDDVPASIINPEYSLDGGVTFQPWTGSLNIGTLEVGETRVIIIRGIVNPSTVGIITNTAVVSSTTADPNLNNNTSTIETEVNLLADILVMKTAEPNSAVPGTLLRYTIQVENLGPANAENVILNDDIPASIINPEYSLDGGASFQPWNGSLNIGTLNSGISLTVLIQGTVSLNSSEYIVNTATVSSTTPDPDLSNNISTIITPVNPQAGISIIKVADEDVAVPGEEFVYTIEIFNEGPSNATNVVLTDDIPDVILNPEYSLDGGATFQPWNGSLNIGTVAPGQLIRIIIKGLVSSTATGDITNTAEVSADVPEPVTDSSTVTTPIVPSADIEVIKTSNMDTAVPGETFSYTITVINLGPSAAQSIVLTDDIPDVILNPEYSLDGGVTFQPWNGNLSIGTLDAGEIRSIIIRGTVSQTAVGTIINTATISSPTPDPNPDNNTSTDETDISPLADISVIKGNEPVAIPGGRFIYGIEIANAGPSFAENVTLTDNIPASILNPEYSIDNGVTFQPWNGSLNIGTLDAGEIRNIIIRGTVSQTAIGTIINTATVSSTTP

SEQ ID NO: 7288 - protein, 655 aa, synthetic construct
MKPTIITYLRYSSKQQADGLSEYRQSEINRKFVEKFCAEHEVDLNEVISLKDLGVSAYRGLNLTLGSFSQTIKKFKSGEIGKKFNEDGEINTYLIVESLDRITRTGPFKSTQIFTELLEYTNIVVLADGEKKIYSKKSIDSTHGMMDLFMALVSLQRSHSESSMKEFRSRKSWEKKREDLLGYFTLPEEERKGLERPKNATAMCPFWLRAKKDGRGYEFIPENKKVMDFLIEKLLDGNGMTRSVRLLNDEIDKGTLKPKLKKANRKTRHFRAAAYSGLFNSEVSTVKGDYLLTESYYPTDDDVEQGKYPEKHLGKRVRKEIAVLKNYYPALMTESQAAYIRSLMGERRSKGTKPNKAIKNLAQGILRCPHCNSTYIKAKDRKNVYLRCNLAREGLCKAKVIKHEVFEHNLLHFCKGLNINKIISNQTGDMALESSLKEFEHQMIPLQVQKSELEGDMAQLVKNISSIKIPSLLEKVQEDYLSKENELKRVIQEIDLVETSLMKLQQQMSMLDDDSSLQELIDLTLDENADDEVRQRFNIELNKVVKGMTVLYKATDDNPFDYHLISIQFLDGVHRLIPVHEKLTDKIHNILPYQDAVKVDSVDFSETVILPTDYLEGLESGKYPQLDGMAKYYQENPAKYLKLKHQIDQSQEIYQ

SEQ ID NO: 7289 - protein, 435 aa, synthetic construct
MAAYCRVSTDQDEQLSSYENQVRYYKEYIQQNPLYELVDIYADEGISGTNTRKRTEFNRLIADCQKGKVDRIIVKSISRFSRNTLDCLKYVRELKELGIGVTFEKENIDSLDAKGEVLLTILSSLAQDESRSISENATWGIRKKFERGEVRVNTTKFVGYDKGENGNLIINEEQAKIVRRIFQVFLQGETPESIARSLKEEGVPGWNGKANWYPTTIQRMLQNEKYMGDALLQKTYTVDFLTKKRSENQGQVNQYYIEGNHEAIINKEEWDLVQLEVERRNQYRQDNHINFYIIQCEQNPFTCKVFCKECGGLFGRKNWTTSRGKRPIWQCNNRYKVKGVQGCTNRHIDEETLQQVFLRAIAVLRENKGKLEEKWANFSEEQKLEKYYATQLEELLGSDQKDFNGRKMCQVLEKIALGEDGSISIKFLEGTEVNL

SEQ ID NO: 7290 - protein, 407 aa, synthetic construct
MKLEKIRVCAYARVSTMTEKQQDSLTNQQTYYNHFYQNKNDVEFIGVYYDQGISGKLANRPGFQQMLEDCRTGKIDVIHTKSISRFARNTELLLAVSRELKTIQVDIFFEEQNLHTLSNEGEVMLTVLASYAEEELRNMSENQRWAFQKKFQRGELVINTKRFLGYDKNENGELIINPEEAKIVKRIYNLYLSGMGVHTIAKLFNEEKVSTVDGGQWYSSTITNILKNEKYKGDAILQKYYFEEIKAKQRLNQGQVQQYLITDNHEAIVSREDWEAIQKRLQQNRKENPSINYNRRYPLSGLLKCEHCGSTLKRQKYYKGKVVWVCSKYIREGKVACIGMRVPDSVVQDWSIHEPTLVKEENIGGKKYYSYSSKENDTSRAEATHSENPNGGLLPSIHRPRRTAIKL

SEQ ID NO: 7291 - protein, 407 aa, synthetic construct
MKPGKIRVCAYARVSTMTEKQQDSLTNQQAYYNHFYQNKKDVDFIGVYYDQGISGKLAKRPGFQQMLEDCRAGKIDVIHTKSISRFSRNTELLLAVSRELKTIQVDIFFEEQNLHTLSNEGEVMLTVLASYAEEELRNMSENQRWAFQKKFQRGELVINTKRFLGYDKDENGELIINPEEAKIVKRIYNLYLSGMGVHVIAKLFNEEKLSTVDGGKWYSSTITNILKNEKYKGDAILQKYYFAEIKAKQRLNQGQVQQYLITDNHEAIVSREDWEAVKKRLKQNRKAKLSIDYNRRYPLSGLLKCEHCGSTLKRQKYYKGKVVWVCSKYIREGKVACIGMRVPDSVVQDWSIHEPTVVKEENIGGKKYYSYSSKENDTSRAEATHSENPNGGLLPSIHRPRRTAIKL

SEQ ID NO: 7292 - protein, 435 aa, synthetic construct
MAAYCRVSTDQDEQLSSYENQVRYYKEYIQQNPLYELVDIYADEGISGTNTKKRTEFNRLIADCRKGKVDRIIVKSISRFSRNTLDCLKYVRELKELGIGVTFEKENIDSLDAKGEVLLTILSSLAQDESRSISENATWGIRKKFERGEVRVNTTKFMGYDKDENGKLIIVPEQAETVKMIYKKFLEGFSPESIARYLNENDICGWTGKANWYPSAIQKMLQNEKYKGDALLQKTFTVDFLTKKRSVNDGQVNQYYVEDSHEAIIDKEAWELVQLELARRKAFREEHQLNFYIMQNKDNPFTTKVFCAECGSAFGRKNWTTSRGKRPVWQCNNRYKVKGVQGCTNRHIDEETLQQAFLRALEILRENKEKLRDKWDNFREEQKLERYHAAKLKETLNSNQEEFNGRKMCQVLEKISLGEDGNITVKFLEGTEVNL

SEQ ID NO: 7293 - protein, 508 aa, synthetic construct
MKKAIAYMRFSSPGQMSGDSLNRQRRLITEWLKVNSDYYLDTVTYEDLGLSAFNGKHAQSGAFSEFLDAIEHGYILPGTTLLVESLDRLSREKVGEAIERLKLILNHGIDVITLCDNTVYNIDSLNEPYSLIKAILIAQRANEESEIKSSRVKLSWKKKRQDALESGTIMTASCPRWLSLDDKRTAFIPHPDRVKTIELIFKLRMERRSLNAIAKYLNDHAVKNFSGKESAWGPSVIEKLLANKALIGICVPSYRARGKGISEIAGYYPRVISDDLFYAVQEIRLAPFGISNSSKNPMLINLLRTVMKCEACGNTMIVHAVSGRLHGYYVCPMRRLHRCDRPSIKRDLVDYNIINELLFNCSKIQPVENKKDANETLELKIIELQMKINNLIVALSVAPEVTAIAEKIRLLDKELRRASVSLKTLKSKGVSSLGDFHAIDLTSKNGRELCRTLAYKIFEKIIINTDNKTCDIYFMNGIVFKHYPLMKVISAQQAISTLKYMVDGEIYF

SEQ ID NO: 7294 - protein, 560 aa, synthetic construct
MKTKLYSYIRFSSMKQADGSSFERQKRTAKEIAAKYDLELVTSYQDFGVSAFKGANSKTGALSRFLDEIGRSVPVGSWLVVENLDRISRQSVIEAQELFLSIIRRGITIVTGMDGKVYSKESVNANPIDLLLSVMLFARANEESQTKRNRTNSSALLKVKAHQENPQNPAVAIEEVGRNIWWADTSSGYVLPHPVYFPVIKKIVELKQNGYSNGRILDYLNERIAPPNYTTNKDTPKKWARSMLGRMFTNRALLGIKEITIEGVTYELKDYYPRVMEDAEFYQLKKTIGLRSFSYPTKSSPVITLLSGAGLLRCGHCGASMVKRSGASKERLAQYRYMCDGADSRRTNCDHPNWGFRGDQLDKAVLQLLADKIWIAEDKANPIPGMQAQIEDISRKIDNLIALSAMTGATKELADQITTLNSERETLYNQIKVIEENMYSVDSQGWEKLAQFDLEDVCSEERLKVRLKIKEAVKSIKCYKIDANYNHFVMEYIDGKTQRIVIEKSRCNRKGRIFIDLKTINDRQILESNGLVLHPCLDMLTDKNWKPEEEIPGPLQEFGI

SEQ ID NO: 7295 - protein, 508 aa, synthetic construct
MKKAIAYMRFSSPGQMSGDSLNRQRRLIAEWLKVNSDYYLDTITYEDLGLSAFKGKHAQSGAFSEFLDAIEHGYILPGTTLLVESLDRLSREKVGEAIERLKLILNHGIDVITLCDNTVYNIDSLNEPYSLIKAILIAQRANEESEIKSSRVKLSWKKKRQDALESGTIMTASCPRWLSLDDKRTAFVPDPDRVKTIELIFKLRMERRSLNAIAKYLNDHAVKNFSGKESAWGPSVIEKLLANKALIGICVPSYRARGKGISEIAGYYPRVISDDLFYAVQEIRLAPFGISNSSKNPMLINLLRTVMKCEACGNTMIVHAVSGSLHGYYVCPMRRLHRCDRPSIKRDLVDYNIINELLFNCSKIQPVENKKDANETLELKIIELQMKINNLIVALSVAPEVTAIAEKIRLLDKELRRASVSLKTLKSKGVNSFSDFYAIDLTSKNGRELCRTLAYKTFEKIIINTGNKTCDIYFMNGIVFKHYPLMKVISAQQAISALKYMVDGEVYF

SEQ ID NO: 7296 - protein, 521 aa, synthetic construct
MKNVITIEANATRSLELASISLPKKRRVAGYARVSTDHEDQTTSYESQMRYYTEYISSRSDWEFVKMYSDEGISGTNTKLRVGFKSMIEDALAGKIDLIITKSVSRFARNTVDSLTTVRKLKEVGVEIYFEKENIWTLDSKGELLITIMSSLAQEESRSISENVTWGLRKQFAEGKVHFPYTNVMGFEKGENGEIVVNQEEAKTVRYIFQQALLGKTPYSIAKDLTQQGILSPSGKNQWNSVTIKRMLRNEKYIGDALLQKTYTIDFLSKKKNINKGELPQYYVENNHEAIVDKETFDAVQATLDRKEKGKGSTTLFSSKLVCGDCGHYFGSKVWHSTSKYRRVIYQCNEKYKGEKKCTTPHVTEDEIKDWFVTAINKVISNKDEVIQNLEMFLELGKSSELELRMGELESEIEVVVQMVSTLVKENAVMPQNQDNYQKKYRNLVERHDSLVSELESAEKQFLEETHHEKDLRGFLESLNQQSELISEFDELLWETMVDKVEILSNRTVFFKFKNGCEVVA

SEQ ID NO: 7297 - protein, 412 aa, synthetic construct
MRTVRRIQPMMTPQKPKLRVAAYARVSDSRLHHSLSTQVSYYSRLIQSHPNWELVGVYYDEGISGKEQSNRQGLQDLLKACDDGKIDRILTKSIARFGRNTVDLLSTVRVLRQKNIGITFEKEGIDSLSSEGELMLTLLASVAQEESHNISENLRWQIKKKFEQGQPHTPQDIYGYRWNGENYVIEPDEAKVVRQVFQWFLDGDNVPLITKKLNEQGVLTRLGNPFTVSSVREFFKQEAYFGRLVLQKTYRDPFSRNPKRNKGQKNKYIVEDAHEAIVSKAFFDEVLQEKERRYKVMHQESHMHKGTFRELIECSHCGKIMITRVDSKKVHRTIRYCCRTRDRFGTSSCPSKTLSEKRISATFEDKIGFKPDKNWVSENIKKVIYDSSVGLITVFPIKGRKYELKVRKEHFL

SEQ ID NO: 7298 - protein, 368 aa, synthetic construct
MTKHKIHVYTRISKTYQQEGSGLDEQLSRIDAYIKSKPELLGSEITYWQDVGVSAFKNKNIHDGQLAEFIKQVESGSIGSGHALVIYSLDRLSRRSSWDEDTIQKLVKNGVDIHDVSTPVVLKRDDPFSKIIMELIVARGNNESKIKSERSIAGWEKRLKETREQGKVFTRKLPRWLSTDENGYVVITEQAELIKRIFLEYTNGLSSPMIARRLNEEGIKSTGRSMWRPNTITKLIKDERLRGYLRRSTDQALIPDIFPVVIDEEIFVLANRILKNNATGIKGRPRENNITREVNNILTGIVRCGKCGARVTTSKNSRGVRYVVCLNRRNYEMCGQKSIKLDEFEKIVISHAQQVDMSKVFSYDKGLC

SEQ ID NO: 7299 - protein, 523 aa, synthetic construct
MAVSRNVTVIPAIKRIGNNKNSESKPKIRVAAYCRVSTDSEEQASSYEIQIEYYTNYIKRNKEWELAGIFADDGITGTNTKKRDEFNRMIEECMAGNIDMIITKSISRFARNTLDCLKYIRQLKDKNIAVFFEKENINTMDSKGEVLLTIMASLAQQESQSLSQNVKLGIQYRYQQGEVQVNHKRFLGYTKDENKQLVIDPEGAKVVKRIYREYLEGASLLQIARGLEADGILTAAGKAKWRPETLKKILQNEKYIGDALLQKTYTVDFLSKKRVKNNGIVPQYYVENSHEPIIPRELFMQVQEEMVRRANLRGGKGGKKRVYSSKYALSSIVYCGHCGDIYRRVHWNNRGYKSIVWRCVSRLEEKGSECMAPTINEETLQTAVVKAINELLANKEPFLSTLQKNIATVFNEENDNATNDIDSKLEELQQQLLIQAKSKNDYEDVADEIYRLRELKQNALVENAEREGKRQRIAEMTDFLNKQSRELEEYDEQLVRRLIEKVTIYEDKLTVEFKSGIEIDIEI

SEQ ID NO: 7300 - protein, 520 aa, synthetic construct
MKKITKIEGNQDYIFKPKTRVVAYCRVSTDSDEQLVSLQAQKAHYETYIKANPEWEYAGLYYDEGISGTKKENRSGLLRMLSDCETRSIDLIITKSISRFARNTTDCLEMVRKLMDLGVHIYFEKENINTGSMESELMLSILSGLAESESISISENTKWAIQRRFQNGTFKISYPPYGYQNIDGRMIVNPKQAEIVKYIFAEVLSGKGTQKIADDLNRKGIPSKRGGRWTATTIRGILTNEKYTGDVILQKTYTDSRFNRHTNYGEKNMYLVENHHEAIISHEDFEAVEAILNQRAKEKGIEKRNSKYLNRYSFSGKIICSECGSTFKRRIHSSGRREYIAWCCSKHISHITECSMQFIRDEDIKTAFVTMMNKLIFGHKFILRPLLNGLRSQNNAESFRRIEELETKIENNMEQSQMLTGLMAKGYLEPAMFNKEKNSLEAERESLFAEKEQLTHSVNGIFTKVEEVDRLLKFTTKSKMLTAYEDELFKNYVEKIIVFSREVVGFVLKCGITLKERLVN

SEQ ID NO: 7301 - protein, 550 aa, synthetic construct
MATKARVYSYLRFSDPKQAAGSSADRQLEYARRWASEHGMTLDSALSMQDEGLSAYHQRHVKKGALGVFLAAIDEGRIPSGSVLIVEGLDRLSRAEPIQAQAQLAQIINAGITVVTASDGREYNRAGLKAQPMDLVYSLLVMIRAHEESDTKSKRVRAAIHRQCQGWIAGTWRGVIRNGRDPHWLELTKPGEFKLVPERAEAVRLAVRMFREGNGAVTIMRALEEQGLQITNGGNPAGQLYKIVRNRALIGEKVLEVEGQEYRLPGYYPPLLTAEEFADLQYVAGQRIRRKGTSEIPSLIAGMRVTYCGYCGSAMVAQNLMNRGRRADGQPQHGHRRMICVGNSQGSGCAVSGSCSVVPIEHALMTFCADQMNLTRLHEGGNREASIGGQLAVARAAVADTTAKIEKVTDALLSAAAGQAPAAFMRRARELEETLAGQQTEVDALEHELASAAATPPPALAQAWADLVEGVRALDYDARIKARQMVADTFERIAIYHRGIEPVKTRSWKGTIDLVLVAKRGNTRVLHVDRQTGEWRAGEELTTEALPAPL

SEQ ID NO: 7302 - protein, 518 aa, synthetic construct
MPKAISYIRFSTKIQSVGDSTKRQSKYINDWLKRNPDYYLDESLRFQDLGISGFSGANAKSGAFGEFLAAVESGYIESGSVLLVESLDRVSRQDIDTAGEQLRKILRAGVEVVTLVDNEWYTKESLKDSLSMIKAMLVMERAHEESAMKSTRLRSVWAAKRERAAKGEIMSKRCAAWLKVSEDRSHFEFIPENVKAVQRVFQLRLEGLSHVKIAKQMNDEGFSTLNQFKSVTGGWSQSSVTELLSNRSVIGFKVPSKSMAVKGVSEIPNYYPSIITDEQFYAVQQLKQGSGRKPSSDLPLLTNLFKGVLRCSECGFIVVVAGVSAKRSGIYKCSMKSEGRCNSVGFSRLQTDRALVQGLLYNTNRLSLNRDNGSAIGTLQSELEQLQKQRERLIKLAMLADDTESMAKDLKALNSQIKDAEKAVSEVHQREQSSQLETISHLDLTLKKDRIEAQIIIKRIVKEIRLNTAQKKCDVFLHNGLKLLNFPLDRVVDGEIFLEVLPLLEADEFDFDTYRVIE

SEQ ID NO: 7303 - protein, 470 aa, synthetic construct
MKGESELDKKAAIYIRVSTQEQATEGYSIQAQTDRLTKYVEAKDFILYKKYIDAGYSASKLERPAMQELIQDVQSKKVDVVIVYKLDRLSRSQKDTMYLIEDIFRPNDVELISMQESFDTSTAFGSATVGMLSVFAQLERKSISERMITGRVERAKKGFYHTGGQDRPPAGYQFNSDNQLIINEYEAAAIKDLFRLYNDGLGKSSISEYLKKNYPGKNKWLPSSIDRMLKNSLYIGKVKFSGVEYDGIHEPIIDEVTFYKTQKEIARRKQSNTKRYNYVALLGGLCECGICGAKMANRRAVGRKGKVYRYYRCYSKKGSPKHMMKTDGCSSKAQQQFIIDEAVINNLKNIDVEAELKRRSAPQTNTSLISSQIESIDKQINKLIDLFQVDSMPLDVISEKIDKLNKEKQSMEKLLERKNRLDKTELQHRFDILKSFDWDNSSIESKRAVIEMLVQKVIIHDNSIEIILVE

SEQ ID NO: 7304 - protein, 517 aa, synthetic construct
MKTIHKLARPQLPEPPKLKVAAYARVSTSSNEQLASLQTQITHYENHIQNNDQWEYVGVYYDEGTSGTKVEKRDGLHRLIKDAELGKIDLILTKSISRFSRNTVDCLNLVRKLTDIGVTIFFEKENINTGDMESELLLSILSSLAESESYSNSENMKWANRKRMAKGIFKTVPPYGYQRKGADFYLIPDEAKVIEQIFKWALEGVSAYQVAKRLNEKNIFTRKGSKWQDSGINNILHNIIYTGTMIHQRYFNDDQFRKKKNNGELPMYRIDNNHPPIISWEDYERVQELITLRANAKGTSKGSQKYSQRYVFTKRIICDKCGCNYKRVHIAGKGNTKVVKWSCTGHLKNKDGCDALPITDESLKTAYLTMLNKLILGHTIVLEPLINTPVEGKASKQELEKLSIEITKIDEKLEVLASLNASGVVSTKTAIEEQGRLQMELNKLQEKQHKIMESVNGTSTQRIQLEQLHQFTKRSEMLTEWDEDLFLRFAELIVVYSRQEVSFELKCGLLLKERLEA

SEQ ID NO: 7305 - protein, 516 aa, synthetic construct
MAGKKVTVIPMKPRQWAAENTEEKPKLKVAAYCRVSTEMEEQASSYEAQVQHYTDYIQRNPDWELAGIFADEGISGTGTKKRDGFNRMIEACQKGDVEYIITKSISRFARNTVDCLQYIRQLKDLHIAVFFEKENINTMDAKGEVLLTIMASLAQQESQSLSQNTKMGVQYRFQQGQLRINHNHFLGYTKDEDGNLVIEPKEAEVIKRIFREYLEGSSLQEIANGLMSDGILTGGKRKLWRGEGVRLILRNEKYMGDALLQKTYTTDFLTKKRVKNDGSYAQQYYVENSHPAIIPRDIFMQVQQELDRRKSMKNKHSQCFSGKYALSGITVCGDCGNAYRRVHWKNRGTVWRCKSRVDKREHNCSGRTIYEKDLDEAIIKAINETVVDREDFLQQLSENINSVLTDGLTGRLEELDSKLKELESEIISMAIGGQGYDELASQIFSLRDERDAVAKQIAANTNLQQRVYEMVVFVKEHDVINEYSEVLVRRLIEKVTIFEKNIVVDFKSGMRVTVEI

SEQ ID NO: 7306 - protein, 480 aa, synthetic construct
MKFAIYVRVSTLEQAEEGYSIEEQIDKLSKYCEVKNWDIFKIYKDGGFSGSTTDRPGLSSLITDSKRKKFQGVLVYKLDRLSRSQKDTLYLIEDVFTANDISFVSLNENFDTSSAFGKAMIGILAVFAQLEREQIKERMVMGKVGRAKSGKAMSWSKVPFGYIYENDTYVAHPIQAPIVKQIFDDYMSGISITKLKDKLNDEGHIGKEINWSYRTIRQTLANPIYAGINRYNGELFEGNHEGIITKDFFEKVQSELKVRQVAAYEKNNNPRPFQSKYMLSGIIRCGLCGASLSVGMQAKRKDGSRHRYYRCYSKSKKKNLTMTKDPNGCSSPNYSMDELEKHILSQIEQIRLNPELINALSANDSVVDFSSYNKRIDELDLSLEKIVNLFIDDAIPKDILEAKMKKIKQEKDSLEKKIDSLKIKRPILEPIEAKDILSKLTDNIWNLSYEDQKSIVMELISKILVYPDKLEIYWKFAINQ

SEQ ID NO: 7307 - protein, 560 aa, synthetic construct
MSKEKIKVYLYTRVSTSIQIEGYSLEAQKSRMKAFAIYNDYEIVGEYEDAGKSGKSIEGRKQFNRMMEDIKSGKDGVSFVLVFKLSRFARNAADVLSTLQIMQDYGVNLICVEDGIDSSKDAGKLMISVLSAVAEIERENIRIQTMEGRIQKAREGKWNGGFAPYGYKLEDGKLFINEEEAVAIRTIFDQYVNTTIGANGISKYLENHGIRKIPRQNGKNPLFDAGLIRKILKNPVYNGKIAFGRRTLEKVHGTRNEYKQVEQDEYLISEGIHEAIVSDEIWQAAQVKLKSQAKKYEHVNKGKDTRTHLLSGIVKCPICGVGMFGNKSIKKKKDGTKYKDYYYYGCKHRQMIRGHKCTFSKQIREELLDDAVAEVIVKIVSNPKFASMMQEKINMKVDTSEIEKEIDNYQKELRKSHSTKFKLIEEIDNLDVEDKHYKRRKQDLDDRLYRMYDKIDELESSLIDAKAKKQTIEAEKLTGDNIYKVLIYFDKLYKVMNDVERRQLITALISEIQVYEEKQPNGQWLKSITFKLPIIDDDLNISLDNNEQVESVTLLTKAVD

SEQ ID NO: 7308 - protein, 613 aa, synthetic construct
MRNFEKITALYERLSRDDELEGESNSIVNQKKILEEYASNNNLTNIIHFTDDGISGTQFDRPGFMEMMNGVNTGNIGCIIVKDMSRLGRDYLKVGQCMEILRQKGVRLIAINDNVDSFYREDDFTPFRNIMNEWYARDTSRKIQSTFRSKGESGKHTASTPPYGYIKDEKDKDKWVVDEKAAEIVRRIFNLTMDGAGPYKIAKILEADKIDIPAYHQQKMGYGLHQSKNFEYPYRWCSSTIASILKKKEYLGHTVNFKTRKHFKDKKSKYVSEDKWLIFENTHEAIIDQETFDNVQRIRGNVKRYPDGWGEYHPLTGLMYCADCGSKMYVHRTNNYKNIPYYVCSNYKKVPCGTLCPSAHRIKAEVVLNLIQETLKDIKNYLDEDNEAFTRSIQNEMEEKEKVEIEKQRVRLINNKSRIQELERLMCRIYEDMILEKIPSSRYEILNSQYETEQRVLSKEIEDLDLAISRYEKETDKTRKFISLISRYENFDELTNTMINEFVEKIIIHERDRKGSQTSKQKIEIYFNFIGNYEVPKEELSEEERLKLEEEERKINERRDRLHQNYLKRKANGKQQEYEERYKARRKQKKQEKLKVLKRAGIPVCEMQNILIK

SEQ ID NO: 7309 - protein, 553 aa, synthetic construct
MLCYSYVRFSTPDQAKGDSYRRQMEFASNYCKLHNLTLVEDLSFKDLGVSAYKGNNLKNGALGKFLELVVSGQIPSGSTLIIESFDRLSRQTAIKAQAVFFEIISAGITIVTAMDNRSYNLQSVADNPFDLMYSLMIMIRANEESETKSKRVKEAIKSKIDNKKIIPSKLPYWIKHNKNEDVLELIPERAQIISYIIERYLSGFGINKLTRHLNETIPPFAGKSWYPLYLQKLLRSESLYGERQYNMNDTLYIMDNYYPAIIDKSKFAVIQENLDSRAPTRGGKIPSAITGIRKAYCGYCQGVLVSQSTKRNGKIVDGLRRARCGTNNNAGSCITSSFRISIVESAIAEYCSQHFDLSLLVPESNNSKLDLAKYRLELKQLDTKIANYVKFISDGNISPAIISALDEAEKNKKNLQQKIKKSELNTLTNSNNEITAKWKKIKTNLSVYDEENTLKLRELIRSSIKRILVFQYGPWANTGPIKTPSGKIIQPYKGNFSIQITFNNGIRKTLELGENVKDQEVDTINRTITENGNTYTPDEYILMIQKTLTKQST

SEQ ID NO: 7310 - protein, 449 aa, synthetic construct
MLKRAALYIRVSTDQQAKHGDSLDAQIATLKDYVSTQDNLTIIDTYIDDGISGQKLYRDEFQRLLEDIKKNRIDIILFTKLDRWFRNLRHYLNIQEILDNSGVTWLAVSQPFFNTDTAYGRSFVNQSMSFAELEAQMASERIKAVFENKIRKGEVVTGSVPFGYKICDKKLIPNENAPIAKDIFKHYSIHNSIRLTVEYLFNEYDITRSSRTIKHMLRNRKYIGEVSGNKNYCPPIVDKETFEKVQNLLDKNISSIAKRTYIFSGLVVCSCCGKKMTGRYRKRKYIKKDGTVMYYTKKVYRCNGNTYKRNKCPNKINIAEEILEEYLLNNIKADAENFEAKQKKIAVYAPEKNNNSKILKKIERLKKAYLNEVISLDEYKKDRKELEQMMIQVKPKETIVFKSNWFNKNIESTYRDFDEEEKRFVWRSVLKNLIVDPHSKITINFLTKN

SEQ ID NO: 7311 - protein, 612 aa, synthetic construct
MRNVEKITALYERLSRDDELEGESNSIVNQKKILEEYASKNNLSNIIHFTDDGISGTQFDRPGFMAMMNGVNQGNIGCIIVKDMSRLGRDYLKVGQCMEILRQKGVRLIAINDNVDSFYREDDFTPFRNIMNEWYARDTSRKIQSTFRSKGESGKHTASTPPYGYIKDEKDKNKWIVDEKAAEIVRRIFNLTMQGNGPYRIAKILESEKVDIPAYHQQKLGYGLYQSKNFEHPYRWCSSTIASILKKQEYLGHTVNFKTRKHFKDKKSKYVSEDNWLIFENTHEPIIDQETFDNVQRIRGNVKRYPDGWGEYHPLTGLMYCADCGSKMYVHRTSNYKNIPYYTCSAYTKTPCGMLCPSAHRIKAEVVLNLIQDTLKDIKKYLDEDNEAFICSIQNEMEEKEKIEIEKKKVRLTESQNRLRELERLMCRIYEDMILNKIPNSRYEILNNQYETEQITLSKEIKDLEQQVSRYEKETDRARKFISLISRYENFDELTTTMINEFVEKIIVHERDRKGSQTSKQKIEIYFNFIGNYELPQAELSEEKKQKLEEEERKIEERKDKLHQNYLKRKASGKQKEYEDKYKARREQKKQEKIKVLKRVGIPVSEYIKTNI

SEQ ID NO: 7312 - protein, 588 aa, synthetic construct
MKKEVKVIKGDTTLKRTASGCVERSIKRVAAYCRVSTDTEDQINSYNSQVEHYTEFIQKNNEWTLAGIYADEAITGTQVDRRIDFQRLINDCMNGDIDMIITKSISRFARNTLDTLKYVRKLKEFNVAVFFEEENINTLTMDGELLLTILSSVAQQEVENISANVKKGLRMKMERGEMVGFQGCLGYDYDPETKSISINEKEAEIVRYIFRRYIEGVGGMVISRELEEQGYLSPRGNKKWTETTVLGIIKNEKYKGDLMMGKTYTVDPISKRRLDNYGEQDKFYIENHHEPIISEEDFEKAQGIRLRRSKNRNTVANNGGKREKYSRKYAFSSMLECGFCGHNLSRRNWHSSSEYTKVIWQCVNATKNGKKYCPHSKGIEEEAIEKAFMESYRQVCHNNVEITNEFLKTVEEELKDNSLAKDLKKITNQLDKVLKKEKDLVELRLNESISMDIYQDKYNEIAISKEKLLAEKRTLEVTLTDEKALKKRLEGFKKLLESNKYLEEFDRAVFESIVDKIIIGGTNDEGEIDPAMITIIYKTGKKDSQDGRLFKSRRKNAKEVDEGTDNKLYPQSSDEVNNLCSYPMDNTH

SEQ ID NO: 7313 - protein, 553 aa, synthetic construct
MLCYSYVRFSTPDQAKGDSYRRQMEFASNYCKLHNLTLVEDLSFKDLGVSAYKGNNLKNGALGKFLELVVSGQIPSGSTLVIESFDRLSRQTAIKAQAVFFEIISAGITIVTAMDNRSYNLQSVADNPFDLMYSLMIMIRANEESETKSKRVKEAIKSKIDNKKIIPSKLPYWIKHNKNEDVLELIPERAQIISYIIERYLSGFGINKLTRHLNETIPPFAGKSWYPLYLQKLLRSESLYGERQYNMNDTLYIMDNYYPAIIDKSKFAVIQENLDSRAPTRGGKIPSAITGIRKAYCGYCQGVLVSQSTKRNGKIVDGLRRARCGTNNNAGSCITSSFRISIVESAIAEYCSQHFDLSLLVPESNNSKLDLAKYRLELKQLDTKIANYVKFISDGNISPAIISALDEAEKNKKNLQQKIKKSELNTLTNSNNEITAKWKKIKTNLSVYDEENTLKLRELIRSSIKRILVFQYGPWANTGPIKTPSGKIIQPYKGNFSIQITFNNGIRKTLELGENVKDQEVDTINRTITENGNTYTPDEYILMIQKTLTKQST

SEQ ID NO: 7314 - protein, 455 aa, synthetic construct
MANEIKQVALYIRVSTDQQAKHGDSLDEQQHTLNEYVRQQGNMRVFKTYIDDGISGQKLYRDEFQKLLDDVKKGRIDTVLFTKLDRWFRNLRHYLNIQEILDKNNVTWLAVTQPFFNTETAMGRSFVNQSMGFAELEAQMTSERIRAVFDNKIRKGEVVSGKVPLGYDIKDKHLVPNEKAEIVKEIFQYYLETGSMRATVRHLENHFSMTRDYQSVRQMLTNRKYIGELRDNKNFCEPIIDRDIFERVQLQLSKNIRMNKKRDYMFTGLLVCSECGCNYSATAVISRYVRKDGTTNPNERHLYRCTKNRNNTKKCSNKKGVYETTLENFLLENIEKQAEELSVKMQQEPEVKKTKNTNDKIKKKIDRLKKAYLNEVITLEEYKKDREELEALLIPEQDNKIAKIDLNSLHNYSTAEFRDGYKQLTISEKSSLWRQVIKNIVVYPDGNLKINFLGY

SEQ ID NO: 7315 - protein, 588 aa, synthetic construct
MKRDVKVIKGDTTLKRTASGCVERSIKRVAAYCRVSTDTEDQINSYNSQVEHYTDFIKQNNEWTLAGIYADEAITGTQVDRRIDFQRLINDCMNGDIDMVITKSISRFARNTLDTLKYVRKLKEFNVAVFFEEENINTLTMDGELLLTILSSVAQQEVENISANVKKGLRMKMERGEMVGFQGCLGYDYDPETKSISINEKEAEIVRYIFRRYIEGVGGMVISRELEEQGYLSPRGNKRWTETTVLGIIKNEKYKGDLMMGKTYTVDPISKRRLDNYGEQDKFYIENHHEPIISEEDFEKAQGIRLRRSKNRNTVANNGGKREKYSRKYAFSSMLECGFCGHNLSRRNWHSSSEYTKVIWQCVNATKNGKKYCPHSKGIEEEAIEKAFMESYRQVCHNNVEITNEFLKTVEEELKDNSLAKDLKKITNQLDKILKKEKDLVELRLNDSISMDIYQDKYNEIAISKEKLLAEKRTLEVTLTDEKALKKRLEGFKKLLESNKYLEEFDRAVFESIVDKIIIGGTNDEGEIDPAMITIIYKTGKKDSQDGRLFKSRRKNAKEVNEETDNKLYPHSSDEVNNLYSYPIDNTH

SEQ ID NO: 7316 - protein, 503 aa, synthetic construct
MIEAFSYVRFSTKSQATGTSLERQLNASRLFCTQQGLRLSNQSYHDLGISGFKNVRRPELEQMFEAIQTGVIPAGSFILIEAIDRLSRKGISHTQDILKKILQHDIKVAFVGEDAKTLQGQVLNKDSLNDLSSVIMVALAADLAHKESLRKSKLVRESKAIAREKVQNGVILPGKSMFWLDYDKEQRHYVLNDRATIAKEIIELRLLGHGPRKIAKILNERQIPGPTGKEWYQPSIKRIITSPVLYGAYQSHQVIEGQYIPVALVENYYPALIDYNLFSQIQFDNKNASKGRPSRVNPFGGVFYCECGNAICFKKSYSKTAKKVKNEYHYHYCIAAREGRCKNTKAIPNFTPILINLLDKLEIKSTSTKNIRSESIISKRNKIEQLNEMLLKLDSPPVSVLKTISNLEKELQTLLERPEIIPPKQEDIVVLSTIQDPSKYNMYLKRLVKRITVYQIDGPKNLRIKVDKTDGHYQSFLIKDGETIFKSDTERLKKLLAGFKDGF

SEQ ID NO: 7317 - protein, 521 aa, synthetic construct
MPKAISYIRFSTKIQSVGDSTKRQSKYINDWLKRNPDYYLDESLRFQDLGISGFSGANAKSGAFGEFLAAVESGYIEAGSVLLVESLDRVSRQDIDTAGEQLRKILRAGVEVVTLVDNEWYTKESLKDSLSMIKAMLVMERAHEESAMKSTRLRSMWAGKRERAANGEIMSKRCAAWLKVSEDRSHFEFIPENVKAVQRVFQLRLEGLSHVKIAKQMNDEGFSTLNQFKPVKGGWSQSSVTELLSNRSVIGFKVPSKSMAVKGVSEIPNYYPSIITDEQFYAVQQLKQGSGRKPSSDLPLLTNLFKGVLRCSECGFIVVVAGVSAKRSGIYKCSMKSEGRCNSVGFSRLQTDRALVQGLLYNTNRLSLNRDNGSAIGSLQSELEQLQKQRERLIKLAMLADDTESMAKDLKALNRQIKDAEKAVSEVHQREQSSQLETISHLDLTVKKDRIEAQIIIKRIVKEIRLNTAGKKCDVFLHNGLKLLNFPLDRIVDGEIFLEVLPVLEADEFDFDTYRVVEQAP

SEQ ID NO: 7318 - protein, 521 aa, synthetic construct
MPKAISYIRFSTKIQSVGDSTKRQGKYINDWLKRNPDYYLDESLRFQDLGISGFSGANAKSGAFGEFLAAVESGYIEAGSVLLVESLDRVSRQDIDTAGEQLRKILRSGVEVVTLVDNEWYTKESLKDSLSMIKAMLVMERAHEESAMKSTRLRSVWAAKRERAANGEIMSKRCAAWLKVSEDRSHFEFIPENVKAVQRVFQLRLEGKSHAKIAKQMNEEGFYTLNQFNPVKGGWSQSSITELLSNQAVIGVKVPSKSMVVKGVSEIPDYYPAIISEQQFHAVQQLKQGAGRKPSSDLPLLTNLFKGVLRCSECGFIIIVSGVTAKRSGNYRCSMKYEGRCNAKGFSRLQTDKALVQGLLYNTNRLSLNRDNGSAIGALQTELEQLQKQRERLIKLAMLADDTESMAKDLKALNRQIKDAEKAVSEVHQREQSSQLEIISHLDLTVKKDRIEAQIIIKRIVKEIRLNTAGKKCDVFLHNGLKLYNFPLDRVVDGEIFLEVLPVLEADEFDFDTYRVIEQAP

SEQ ID NO: 7319 - protein, 561 aa, synthetic construct
MVKAYIYTRVSSLQQSDGFGIERQVHTLMDFLEDAELPKELGYQLDPHDYEVLEQDAGLSGFKGHNFTKGSIGKFKNRVASGEITSGCLLIESVDRFSRKQGYDAIDEFTFLIKRNIDIIEVETGQIFSYKLDHKLTQLSTSIERAYQESKRKSRMAVKSWANIKRKAVEEGIAISRNVPYWLEVKNNEYLTRTEHVNKIKRVFDMYINGVGVTSIVRELNKEGGKHDGGVYSTNFINMMLRDRRLLGWQRGKKKANETQEEREKRAIKIYPVIIGTDIFDLVQRKIDANKVTKSVRTSSKQKSLFNGLVRCEICGEALVGHFSERGNYLRCIGKRSKVGSCDSRLIKYSTFEESMLVNLKGIDFKEIYTNKNVSDDHVNNLRNELAVVNAEYDEIEGLLNTSGSTIEIVALSKALREKNKDKDKLQSELTTLTNNNVIEDVEIDVSKLTNQNNVELREKYNIYLKKVIKEIRVKRVDDILYVMVQYFTDVISHLFIIDGKDGTLLSRSHISNDLVFESDMMTIDMLKGEWELKKNNMSQWDELALDIWQSVVESAVKSIK

SEQ ID NO: 7320 - protein, 506 aa, synthetic construct
MRTVITYLRFSSAIQGAEGADSTRRQNELFKQWLRKNSDAQVVASFSDEGLSGYKGKHLTGQFGDMLARIEAGEFPAGTILLVESIDRIGRLEHLETEALMNRILGNGIEIHTLQDGLIYTKDALADDLGISIIQRVKAYIAHQESKQKSFRVSQKWEQRAKLALAGEQRLTKMVPGWIDPDTFKCNEHAETVRLIFKLLLDGESLHNIARHLQSNDIKSFSRRKDANGFSVHSVRTILRSETTRGTLPASQRNDRPAIPNYYEAAIDAATFNKAQEILDKNRKGRTPASDNPLTINIFKGLFRCQCGASVHPTGTKNKYQGVYRCNNHLDGRCDVPPLKRKPFDKWMIDNFLGMIDVGNDGESERKIAALQHEVEIVTARIKKATALLLEMDDITELKTQVKGLNQKRTELQTTIDNMRRKASLTDKELPQLKDIDLTTKAGRVECQLILSKHLKGLTLGKDSVTVTLQNDTEITIPTDPLPLNDGTSIFEIAEKNLLNIDTFQL

SEQ ID NO: 7321 - protein, 455 aa, synthetic construct
MANEIKQVALYIRVSTDQQAKHGDSLDEQQHTLNEYVRQQGNMRVFKTYIDDGISGQKLHRDEFQKLLDDVKKGKIDTILFTKLDRWFRNLRHYLNIQEILDKNNVTWLAVTQPFFNTETAMGRSFVNQSMGFAELEAQMTSERIRAVFDNKIRKGEVVSGKVPLGYDIKDKHLVPNEKAEIVKEIFQYYLETGSMRATVRHLENHFSMTRDYQSVRQMLTNRKYIGELRDNKNFCEPIIDRDVFERVQLQLSKNIRMNKKRDYMFTGLLVCSECGCNYSATAVISRYVRKDGTTNPNERHLYRCTKNRNNVKKCSNKKGIYETTLENFLLENIEKQAEELSVKMQQEPEVKKTKNTNDKIKKKIDRLKKAYLNEVITLEEYKKDREELEALLIPEQDNKISKIDLNSLHNYSTAEFRDGYKQLTVSEKSSLWRQVIKNIVVYPDGNLKINFLGY

SEQ ID NO: 7322 - protein, 455 aa, synthetic construct
MANEIKQVALYIRVSTDQQAKHGDSLDEQQHTLNEYVRQQGNMRVFKTYIDDGISGQKLYRDEFQKLLDDVKKGRIDTILFTKLDRWFRNLRHYLNIQEILDKNNVTWLAVTQPFFNTETAMGRSFVNQSMGFAELEAQMTSERIRAVFDNKIRKGEVVSGKVPLGYDIKDKHLVPNEKAKIVKEIFQYYLETGSMRATVRHLENHFSMTRDYQSVRQMLTNRKYIGELRDNKNFCEPIIDRDIFERVQLQLSKNIRMNKKRDYMFTGLLVCSECGCNYSATAVISRYVRKDGTTNPNERHLYRCTKNRNNVKKCSNKKGIYETTLEIFLLENIEKQAEELSVKMQQEPEEKKTKNTNDKIKKKIDRLKKAYLNEVITLEEYKKDREELEALLIPERDNKIAKIDLNSLHNYSTAEFRDGYKQLTISEKSSLWRQVIKNIVVYPDGNLKINFLGY

SEQ ID NO: 7323 - protein, 489 aa, synthetic construct
MKAALYIRVSTEEQAQHGYSLAAQEEKLSAYALSQDWEIVQVYRDEGRSAKDLKREQLQRMLTDLKDGLFDVVLVYRLDRLTRSVLDLYELLNIFDQYGVKFKSATEVYDTTTAIGRLFITLVAALAQWERENLAERVKFGMLKKASLGEWMGGIVPYGYTLEGSSFRIIKHEADIVKKIFKMAKSKGMDAISKSLNAENCRTRKGFNWSGFTVHYILRNPVYTGRFRYNEGSGKTDRPLEDQRIFESELIDPIVTENEFWEVQKILDARKSKKGKALTGKYYFTSVLLCGKCGASMTGTAYKYKEKNGETRVTKYYRCSNKIKSGDCAMPQIQESRLAEEIIRTFNDLTENWFSKPQAKQIADSNADRKAAARELDNVKKTINKYKLMFINDLIDMEELNNQLAALKIKQKNLEEGWSRVPDQDDTAKLSPGELENMIYHFKAVWDIADDEERKKLITSIFSEIVIDARVKSPCGPGTSKHFWIVSAK

SEQ ID NO: 7324 - protein, 541 aa, synthetic construct
MPKAISYIRFSTKIQSVGDSTKRQSKYINDWLKRNPDYYLDESLRFQDLGISGFSGANAKSGAFGEFLAAVESGYIEAGSVLLVESLDRVSRQDIDTAGEQLRKILRSGVEVVTLVDNEWYTKESLKDSLSMIKAMLVMERAHEESAMKSTRLRSVWAAKRERAANGEIMSKRCAAWLKVSDDRSHFEFIPENVKAVQRVFQLRLEGLSHVKIAKQMNDEGFSTLNQFKSVTGGWSQSSVTELLSNRSVIGFKVPSKSMAVKGVSEIPNYYPSIITDEQFYAVQQLKQGSGRKPSSDLPLLTNLFKGVLRCSECGFIVVVAGVSAKRSGIYKCSMKSEGRCNSVGFSRLQTDRALVQGLLYNTNRLSLNRDNGSAIGTLQSELEQLQKQRERLIKLAMLADDTESMAKDLKALNSQIKDAEKAVSEVHQREQSSQLETISHLDLTLKKDRIEAQIIIKRIVKEIRLNTAGKKCDVFLHNGLKLLNFPLDRVVDGAQWLEVLPLIDGDEFDFEGFTTKPRHLVLEEAPEWVKEIEAQPNQPL

SEQ ID NO: 7325 - protein, 649 aa, synthetic construct
MLRPICYERVSSIQQLEGGGGLDDQRSVLEAYLDRNAALFNNDRVFIRDLGVSAFRNSNISPESQLGIFLQDVQNRKYGEGDALIVMSLDRISRRSSWAEDTIRFIVNSGVEVHDISASTVLRKDDPHSKLIMELIQMRSHNESLMKSVRAKAAWDRKIKEAIKEGKVISNRMPVWLVNEGGKYAINEEKVELIRSCFKMYAAGMSTGEIVKHYKQKGVLLQMVTVSNWVRDRRLLGEHKRYNDEVYRGVYPVVIDDELFLTANRMMDRVGLEKKKPREDLLLDHAVVKKIFRLFEDGVGTGSIVKQLEAGWSTVNVLRVLRDKKVVKMKIIDNLTFERVNQKLSLNGVANRIRKDLSIAQDDYITNLFPKILKCGCCGGNIAIHYNHVRTKYVICRTREEKKACDAKSIQYIRIEKNILETVKNVNFEQLMKKEETNSSPVDTLREELSSLREEEKAFIARIEERKKKGLLTGIMLSDGLTEVQDRIVQVEDELIGLQDIREIPKLDFNIDEVLDPMNVELRARIRKELRLVLKAIRYRVIANAIFVHLDYFNDYLTHVLVINNKRGGGEMLTEFIIEHRNDVRIYKSDSFCLTYTEGDKLPAFSTLDSKPINFIEYILLRDYIRELEGEESVTAIWMDRNEKFIFQS

SEQ ID NO: 7326 - protein, 560 aa, synthetic construct
MSKEKIKVYLYTRVSTSIQIDGYSLEAQKSRMKAFALYNDYEIVGEYEDAGKSGKSIEGRIQFTRMMEDIKSGKDGVSFVLVFKLSRFARNAADVLSTLQIMQDFGVNLICVEDGIDSSKDAGKLMISVLSAVAEIERENIRVQTMEGRIQKAREGKWNGGFAPYGYQLIDGKLLINEEEAIAIRTIFDQYVNTSIGANGLSKYLENHGIRKIPRQNGKNPLFDAGLIRKILKNPVYNGKIAFGRRTLEKVHGTRNEYRQVEQDDYLVAEGIHEAIIPDELWQAAQVKLKAQAKKYEHVNKGKNMRTHLLSGIVKCPICGAGMFGNKSIKYKKDGTKYKDFYYYGCKHRLMNRGHKCTYNKQIREELLDDAVAEVIIKLVSNPKFASMMQEKINMKVDTSAIENEIDNYQKELRKSHSTKFKLIEEIDNLDVDDKHYKRRKQDLDDRLYRMYDKIEELEGQLIEAKAKKETIEAEKLTGDNIYKVLIYFDKLYKVMNDVERRQLIEALISEIQIYEEKQPNGQWLKSITFKLPIIDEDLNISLDNDEQVESVTLLTKAVD

SEQ ID NO: 7327 - protein, 546 aa, synthetic construct
MQSDFQTNRVAIYCRLSKDDEFKKGESASIQNQRDMLIDYCKQRNWTIADIYVDDGYTGLNIDRPDFQRMLVDIKAKKIDTVITKDLSRLGRNYLQTGKFTEEFFPKNGVRYIAVNDGVDTNQDNNEIVPFKNVLNEFYSRDVSKKMKSAYYTRAKQGKFTGCLAPFGYKKDENNPHLLVIDEETSWIVEKIFDYAARGYGVQYIRTLLREEKIPTPTWWNRKKGLRNAVTKWEKTMEGGEYVWDCATLTEMIQNPVYLGHIASQKANHKFKIGWISDKPQEEWLVVEDMHEALIDEDTFEIANEKLKSRKRPFKTGELSLFAGLIKCPDCGKSLNLARNNSKKKEKLFTCNTYRRYGKDFCSQHRIMYDEVYRVVLEDIRSNAKLALKDEKEVLKILELNQEEELDSQVVLAGQMIEEDSLRYKELETKVERLYDDWIDKRINETNFNRLMEKTQKEQDILLERIKVNEEKIKNSESKDINISKWIESIKKYQNIKKLDRHILNELIDKIFVYEKEIIDGEVVQTVEIFYNFLLNTKELNIKYHL

SEQ ID NO: 7328 - protein, 480 aa, synthetic construct
MTMHKVAIYVRVSTTSQVDEGYSIDEQKAKLTSYCDIKDWNIYDIYTDGGFSGSNTERPALERLIRDAKRKLFDTVLVYKLDRLSRSQKDTLYLIEDIFLENNIEFVSLLENFDTSTPFGKAMIGLLSVFAQLEREQIKERMQLGKLGRAKSGKSMMWSKTSYGYDYVKETGTLSVNPYQALIVRKMFEWYLSGMSITKLRDTLNEQYGQDKEWSYRTVRVILSNPVYCGYNQFKGQIFPGTHEAIISEDDFNKTQEEIKTRQRTAAQRFNPRPFQAKYMLSGIAQCGYCSAPLAIKLGRIRRDGTRLVKYECKQRHPRKTKGVTVYNNNEKCDSGFYFKDDIENFVLTEISKLQTDSDYIDKLFSNTNQETIDRDSYQKQIDNLTAKISRLNDLYIDDRISLEELQKRSSDFMAERATLEKELDADTSIKAVERKKDIRRVLDTKDIFTLDYDQQKAIARALISKVRVTSEAIVILWKL

SEQ ID NO: 7329 - protein, 700 aa, synthetic construct
MLNTMQVLEDDEEYQNPVDLLFEELAKKKPNSFAGRQYKLYKLAAGVVCSKRLLNQAVGKSLRTHNLKPKKGAQVMRKNEKITALYERLSRDDFGKDDDQQRESNSISNQKAMLEEFAARQGFTNIVHFTDDGISGTCFDRPGFLAMMKEVEAGNVEYLCIKDMSRMGRDYLKVGQIMEILRQRGVRLIAINDGVDSARGDDDFTPFRNIMNEYYARDTSRKIRSTFQSKGKSGKHLTGTVIYGYLWNEARDQWLVDPEAAEVVKRIFAMTIDGYGPYQIASRLKEEKVLIPSAYLAQHGEGVNKNKTFKDVYGWGSSTICNILEKREYLGHTINFKTRKHFKDKKSHYVPEDEWTIFENTHEPIIDQQTFDLVQKIRGNVRRYPDGWGEAAPLTGLLYCADCGGKMYVHRTNNGKRISQYTCSQYTKVPCGTLCKTQHRINEDVVLSLVSEMLKAIAEYAKHDRVEFVRVVQEAQSSQQTTEVRKQRTRLATAKQRVSELEVLLCKIYEDNILGKLSDSRYATLDAQYAKEQAELTAEISALEKAVKSYETHEKDADRFITLIDKYENFDKLTIAMLNEFIEKILVHERDRKGSIQTTQEVEIYFNFVGRFVPPAFGEVELTPEELEEIRKREERKDRLHQNYLKRKANGKQKEYEERTKAKKKAEIEARKQAIRTEDIARGVFIPVSSLPQLGPRKGA

SEQ ID NO: 7330 - protein, 626 aa, synthetic construct
MRNEKITPLYERLSRDDELQGESNSISHQKQMLEEFARRNGLPNPTHFTDDGVSGTRFDRPGFLAMMEEVEAGRVEAIVIKDMSRLGRDYLKVGQVMEVLRQRGVRLIAINDGVDSLKGDDDFTPFRNIMNEFYARDTSRKIRSVFKSKGMSGKHLTGTVIYGYLWDEKREHWLVDEEAAEVVRRIFSLTMEGYGPYQISRLLSEAKVEIPAVHLARFDEGVNRTKPVKGPYGWGSSTIVSILKKREYLGHTVNFKTRKHFKDKKSHYVDESEWTIFENTHEAIIDQETFDNVQRVRGNARRYPDGFGEAYPLTGLMYCADCGGKMYVHRTYNGKRVPQYTCGQYGKYPIGSLCPTQHRIKAEAVLTLIADMLRTIAEYSKNDRAEFIRTVQETQTAQQTADISKKRKRLAAAQKRAGELERLICKIYEDNALGKLPDARYEALDAQYAKEQDALNAEITELEKAVTGYEQSRKSAEKFIALIDKYENFDTLTNIMLNEFVEKILVHERARKGSQDTTQEVEIYFNFVGRYIPPALQPVPLTPEEQEELRKKEERKDRLHQNYLRRKANGKQKEWEERYNAKRKAQVEAAKATIRAEDMEKGIFTTVSQLPRQEPRKATLLASAAV

SEQ ID NO: 7331 - protein, 502 aa, synthetic construct
MPQQNNGIAYSYVRFSSKRQEQGDSVRRQTEMAEKYALEKGLTLSSKNFQDLGISAFKEGKRPSLVDMLDTIENGQITAGSTIIIEALDRLSRRGIDATLETVKDILRKDVQVVSLSDGLLLTKNSLNDLQSIIRIAVAADLAHKESERKSSRLRETKGQQRQAALAGKAINKILPFWLQRASERYEFSDKVNIAREIIRLKQEGKGSNMIAKTLNKQGVAGIRSPQWNHASITKMLKHPALYGAYQTGETTKERELIKLDLIENYYPALISKEDWLLIQSDQSKSTRGRRTIDNPYSGLLRCGCGGALVKRQTTVKNKLYIYHGCLNAKDGRCEQNISIKGLDQALKKILGRLEFKKKPTPDQSIHHERKQLEDRINNLNNKLLTLDDIPVSVIKTIGILEERLKTVTTLILQNEREQRGIDAVQSETLSSITDGLELNLLLKRVLKSITVRASGNGWAVKVLHLSGHKQNFLMIDGKIKFLSDTIALQKLLASFKEPAEE

SEQ ID NO: 7332 - protein, 570 aa, synthetic construct
MRVSSEQQLSGDGLDRQESLLIRYFDDNASCYDFDPNYELIVDRGVSAFKGHHQRESAGLGGFFKRIRDGEVEKGSVLCVESLDRFSRENPFKCVEYISILDSYQIELHDVDKKLKIGRKYPNSLSFAVMIAERSYEESRLKSDRIQKGWDKRRKIAKEKGQYMIKNCPKWIDVVNNKYVLNEHHLIIREIFDLYRSGIGSYTIAVMLNRDNKTIDGMKWNSTKICHVLRNRRCKGEYTSNRIIRNFEDDTVTSTFEILNIYPRIVTDDEFYEVSTRLEKFNYTGRIRHDLKRTVFNGLLKCELCGSALGVSSTSGYTYIKCDNARAKGGCTGVLMAYMPFEKGILSHIKDIDISKVINMDSTISNIDILKTEVVELESYIQSFIIGIENLKQQGRFPTFDMLDGKAQAEERLQDVKKTLAAEKDTFNVSNLEFSSDIHKLENIIERSKLELELRKVIKRIAIKADKTYITADISYYNDDNIKHVLLIHKKKTTIEVMGEIVQQDGWRTYSFSEGGSLVFRVKSNGEIWTLSAAKNKSISEIQKYMTMMVGREPIDFDFYINEDFIEWVE

SEQ ID NO: 7333 - protein, 482 aa, synthetic construct
MTEWLDANPDYMLDDLTYKDLGISAYHGTHATRGAFSDFMVAVEGGYIEYGTVLLVESLDRLSREKIGEATERLKSILKAGIDVVTLSDHTHYTKDSLDDPYSLIKAILIAQRANEESEIKSRRMKSAWKKKREEAEASGKIITRSCPRWLKVSQSGDSFELIPEHARTIKEIFRLRLKGQSLNGIVKVLNDKKVITLTGEIGVWNPSTIEKLLVNKALIGINAPSYRTIANGIQEIAGYFPRVISDKTFYAVREFRKPPFGKDKHTDNPYLINLFRSVMKCKACGHSIILNSIDGKGMGYYVCPMRRLHRCNTPSIRRDIADVNLITTVVIHADKFQTNSTSRESTRSLQDRNIEVLKSIDRLIEALQIAPEVAALAEKIKALHKEFKSNESMIRAVNNKQRLAVSEDVTTLDLTLKEDREKCRRFIFKTFKEIVLDTENKTCDIYFSNGFKLINFPLLKSISSEQLISALTYTDDSTLIL

SEQ ID NO: 7334 - protein, 506 aa, synthetic construct
MTLAYSYVRFSSKTQATGASLQRQLEASELFCLKHGLTLSDVSFRDLGVSAFKEKIRASLEDMLTAIENGTIPKGSYILIEALDRLSRKGISHTQDILKSILRQGVSVAFVGEDARTLSGMVLTEASLDDLTSVIMVSLAADLAHKESLRKAKLVQDAKARTREKAKQGIPIARRLPFWLQYQDGTYIFNDKVSVIREIVSLRQQGQGPRRIATYLNLSEIDAPAGRGWSHTTVSHILTAPYLCGDYQTYRTIDDKLVPDTLVKDYFPAVVCRDEWLLLKADQKYSSKGKVAKDNPFAGVLKCKCGGGLVYSLKKMRGKSKESYYEYHHCSNSKLGLCDQKGYIRDLIPLLKRVMNKLEIKTIKNDRSSIIQASMDEANDKIRHLNRLLLELASPPLSVLQSILELEAKVETAKSELHQVMHANIGLSSSDVDRLASISDAAEYNMHIKRLVERIAVSHSSKQNYSVRIKKRDGHTQSFIVLNGEIKLMSDSEKLKNWLQEHGQSN

SEQ ID NO: 7335 - protein, 502 aa, synthetic construct
MPQQNNGIAYSYVRFSSKRQEQGDSVRRQTEMAEKYALEKGLTLSSKNFQDLGISAFKEGKRPSLVDMLDTIENGQITAGSTIIIEALDRLSRRGIDATLETVKDILRKDVQVVSLSDGLLLTKNSLNDLQSIIRIAVAADLANKESERKSSRLRETKGQQRQAALAGKAINKILPFWLQRASERYKFSDKAHIAREIIRLKQEGKGSNMIAKTLNKQGVAGIRSSQWNHASITKMLKHPALYGAYQTGETTKERELIKLDLIENYYPALISKEDWLLIQSDQSKSTRGRRTTDNPYSGLLRCDCGGALVKRQTTVKNKLYVYHGCLNAKDGRCEQNLSIKGLDQALKTILGRLEFKKRPTPDQSIHQERKQLEDRISNLNNKLLTLDDIPVSVIKTIGTLEERLKTVTDLILQNEREQRGIDAVQSETLSSITDSLELNLLLKRVLKSITVSASGNGWAVKVLHLSGHKQNFLMVDGKIKFLSDTIALQKLLASFKKTTEE

SEQ ID NO: 7336 - protein, 569 aa, synthetic construct
MRVSSEQQLSGDGLDRQESMLTRYFDDNASCYDFDPNYELIVDRGVSAFKGHHQRESAGLGGFFKKVRNGEVEKGSVLCVESLDRFSRENPFKCVEYISILDSYQIELHDVDKKLKIGRKYPNSLSFAVMIAERSYEESRLKSVRIQKGWDKRRKMAKEEGQYMIKNCPKWIDVVNDRYVLNENHIVIREIFDLYLSGIGSYTIAVMLNRDNKTIDGMKWNSTKICHVLRNRRCKGEYTSNRVIRNFDDDTVTSTFEILNIYPRIVSDDEFHEVSTRLEKFNYTGRIRHDLKRTVFNTLLKCELCGSALGVSSTSGYTYIKCDNARANGGCTGVLMAYMPFEKAILSHIKDIDISRVINIDSTISNIDILKTEIVELESYIQSFTAGIENLKQQGRLPTFDMLDGKAQAEERLQDVKKTLAAERDTANVSNLEFSSDIHKLENIIERSRLEVELRKVIKRIAVKANKTYITADISYYNDDNIKHILLIHKKKAIIEAMGEISQQGRWRTYSFLESGVQVFRVESNGDVWTLAAARNKSINEIQKYMTMMVGREPIDFDYIINEDMIDWL

SEQ ID NO: 7337 - protein, 644 aa, synthetic construct
MFNFDKSKYKGICVPYARFSTDVQDEIGRKSLERQIEEAKRFSNEYGLFFDEDIAFVDRGVSGFALSGDTAKTFQKGQMQLMLELLEEIDVAEREFIYITFHNFDRFSRMSPDVASRYFEQILDKGFNIVTTIDNEVYKRNSGNLEQMIISIIHMSTAYYESEVKSIYISDSRQRKRDVIEYLYNDEKQKGKHRHVGIKACCPRWIKTKDIIYEYVGKDGSVKKEALKRFEIDEERAQIINYIFDLKIQGLGNGKICQVLNEQNIPVFHSGNYTKAKYWNLSTISNYLKNENVIGHSYLYHKAKEEVFNEKTQTFSTKRVRKIATDKLYNYYPPIMSEEKFNQAKEAVKANSNNVDRSKASEKPHMFSNLMRCSCGTRLHYKLTKKNNVKKVDDYFEYLKCERSALNDGCEGENINYKNFEAQFINFIRYIDVNEILDHANGVEAVTQGLTELEEREAAINLKITGLTKTYQSLINAGVDGSDVLVELEKAKGELQEVEFEKSKFLNSMKSQTSSSSESIKQKKSALKSKVFAEKVEARKAVNEQLKQKIRWMEVYATAYAKFVIVCFVDNVIRTYAYQDEFATDLMFNTIKINTDGLKGYEADELMVLMIKTVRESLAGMNEVITNTDLKIKLAAVKSEYMNK

SEQ ID NO: 7338 - protein, 664 aa, synthetic construct
MFSFDKSKFKGICVPYARFSTKGQSKIGKKSLERQIEEARRYAKSNNLYINEDLIFADKGISGFAQQGNIAKAFKKGQMQVMLALLEEVPYQEREFIYVTFHNFDRFSRMSPKQARTYFDLILQKGFNVVTTIDNQLYTRHDKDLGKMLISTIKMTTAWEESQVKSIYIKDALARKKKVVEYLYTHPSQKGKYKHIGVVQPNMPRWIDHEKIELTYTDESGSKRTDSFKKFTLNKEKTKIVNYIFDLKIQGLGYARICRRLNEEGIPTFDQGKHRIAKKWHVFAVQNLICNEMVLGHITLHTHNEEEYMCEIDKVFKKRKIKQTATEKLYNYYPAAVSEAKYLEAHKNTIQQDKPKKLGRIGERTNIFAQILLCECGGTLQYRRTKKNKKKSESVSVNEYLQCNNAFVNHKCNSQTINYTMLETAFFRYVNNIDFKKICSTTNSKHALKIIDLDADIKELTDEIEYLKLREAGLAKTYMSLASAGLDGSTALIDREKTKKEIAEKVLELENLELKKKGLEIEADKDNREFVDINDYMLNKDNYSSDEKIIIRKKINDFLHSKIEWMEVVSTERQKFVIIAFHDTVIRTFAFDDRCANDLMFNEIDVDLSGLNRVQASNLMFTLIKAIRNSLKGVEAVITKADLISYLQHIKQDYLNNIGEQASV

SEQ ID NO: 7339 - protein, 507 aa, synthetic construct
MKRVISYIRFSSERQAKGDSLRRQSKMVNDWLKAHPEYYLDQDLSFRDLGVSGFTGKHLKGGLGDFLTAIEKGLVKAGDTLLIESLDRLSRQAVDRASELLRNILRSGVDVVTLSDGEHYTSESLKDPLALIKSILIMQRAHEESLRKSERIQAAWNRKKELISEGIKISKRCPAWLRLNDDRKSFSVIPEKVETVKRCFQLRLEGKSIWEIVRTLNDEGHQTLNQHKAGSFGQSSVQDLLKNRSVIGYFTPKGCEEISGYFPPIIPETDFYKVQQLSYSRYGRKPASDKPLSVNLFKGVIRCSECGHALIITGFSDTRNGIYRCPLRNENRCSAKGLSRKQTDGTLLTLLSRLDRFDSDTTNTIDMLRLHREHISSNIEKLVQLSLEIEDLSAITIKLKQLKGELSQVDADIEKETQRLKSIDVGCLSDCDLTTKAGRIEAQLIIKSAVKEVVLNTAKRRCKVTFHNGKAITLPITENPSEDVTEAIQSLSEVTERGLIDVDEVII

SEQ ID NO: 7340 - protein, 557 aa, synthetic construct
MITKTAYCYCRVSSSQQADDNGGFGMTRQQATLIEYISSFGENKELGYALSPDQVVFLRAEGESGFTGKNIEKGSILLNFIEDIKSKKIKNSVLLIENIDRFSRFNVNESTELFLSIVNNGCDIHECDGGVIHHRKSDTNLISAGLTRARAESYRKSKFSIKNWDKRFENTIKDKSVLTHHSPSWLNTDGGFYTIIESEAVVYRKIFAMFNNGYGQAAIRTYLNDNGMTINGNTIGTWMIHKVLKDDRLWGRLRTKSDLRKEHDGLLIYPVVVEREIVNTAALILSSKGKSIKINKRANNIFTGLMICGVCKNGHLLVNHDKRGSYLRCSNSLSSNTRCIARGFKYGIVEQALIKFIKNIDTKILDSNDDNILELDRLGEELKYYLDYMNQVQQDFNSVDIPDPNDRKLLKNLQSKVRVLEDEILKIKSFENSEADFEVIQVASINSDLLDPFNVDLRKEFNIKLRKIIQQIEAFRYDKSNILIIIKYYAVKNQQWLLIDSKTGDMKSHTYIDEEHVVIEGVDKKPLRFDVKTKQYKLDGTQISVEDLISELKIISQ

SEQ ID NO: 7341 - protein, 550 aa, synthetic construct
MGDSAKNGLVYSYLRFSDPKQSAGGSTDRQLAYAAKWAAEHDLKLDTHLSLRDEGLSAYHQQHIKSGALGVFLRAVEEGRVPFGSVLIVEGLDRLSRAEPIQAQAQLAQIVNAGITVVTASDGKTYSRQRLKDNPMDLVYSLLVMIRAHEESDTKSKRVKASVRRLCEKWIDGSYRGRVEQGHDPAWLTRNDADGWDFKPDTVKAIQRTIEMYKQGLGGKRIIEKLNAEGLRIYPTSKENQTLQVYRVTKMPQLAGHKPISVDGDEYLLKGYYPPLLSELEWEDLQRVVKSSGRRRVKGDLPHVITGIGITFCGYCGHPMAGQHLASKKRLPDGRIRDGYRRLLCSAAATFSEVCPVRGSTSVAPIERAIMSYCSDMMNLQGLFEADTSSESRKELLKAQKNVEAIKAQLDKLTDAMLASADEGIPLTFARRARQLEEDLAIAEKTLAAQERDIAMLARRDISGADEKWRALAAGVEAQDIEIRLQARQLVADTFSRISVYHHGLRPNHTPKSRDYYIDLMLVAKGGSSRWLRIDRDGNWVHGENYEAAD

SEQ ID NO: 7342 - protein, 576 aa, synthetic construct
METLKIDRSKPLAIAYVRWSSTVQGGDDKDSYDRQTSPLEFFTSSTGVPVVETIIDPGQSAFTGENSKKGKLKGILDRIESGEIRKGDFLVVESIDRITRMRVLDGVALIQDGILKKGVKLYTTTDNKTYSYEDPEKDFENLLMISLIAKRANEESEIKSKRRRSAWNKAKTKATDGVPFNAHNPPYGLRYDPEENRFEIVEDEAIEIKKIFEGLKYEGVSNTLKKVNLTSKRKWSRKTVHLMLTSRYPIGTLMSQKRDGKTKVFERYIENYYPAILTHKEFQDALQAMKQRGKVKDYGRNTEGYLNIFKHCVKCAVCGQSLMFEKSMNKKGIKYGYFHCWTRKETLSHCDVPRFRFDFAFGTLLQLVKQLTCEEDFDAHPWASEMPADYDSTLADDEINIENFGNQFLSLFSKSTATEAVKTEFYKAENELAKAKSIYENLTASFSQFSDGRIPSFFIKQMSDAEQAYENAKADVDALSVQIDNAESSLEIYSYKDIIDLYSSDEGRLKLNYFFKSNGFKFIFNYEAKTRTLFMTVRDKADAEIYRVGKKFTLHNPLKEFGIDNLNEQMNSVLKV

SEQ ID NO: 7343 - protein, 535 aa, synthetic construct
MSKAAIYARKSKATEKGASVENQINKCKAHLNNLDITDVLIYKDDGFSGKDTDRPAFIQMMKDAKNKKFTTLICYKFDRVSRNVSDFSNLVDELTELGISFISLSEQFDTSTPIGKAMMNICSVFSQLERETTCLRVTDNMYALAESGYWLGGECPTGYKNKRVFYTDSSGKQKSYSVLEPIAEEVKLVKLIFEKYLSFGSLSKLEKYMLSNNIKTKRNKDFSKTSLSSILRNPAYVKADKNVFKYFKSLKINTFGNPDDLHGVLIYKKHKGKKGKTHDISEWIYSISSHEGIIAAEDWLNVQKMLDSNKSRAPALGCSNTALLSGLVTCAKCNKPMRVAYGTKIPNSNNKRFYYMCTLKHNSGKTRCDSRNVNGIDLDTIVINKIKELSTNKKILLNELLAHSKSIDSSFENSYYDSINKEIESNNVSINNLLSNIALTTDEDIVKIFLEKISALKEKNKELNAKLTELNYEIASHKKLLNNSTKLIERLKNISKYIDTATNEEKKKLISSIIERVYVNGDTGAVNIKFKQPDN

SEQ ID NO: 7344 - protein, 502 aa, synthetic construct
MEFIREDCIYARQSVDRKDSISIESQIDFCKYELKGGSCRVFKDKGYSGKNTDRPEFQKLLGEIRKGKVRRVIVYKLDRISRSILDFATMMELFQEYDVEFVSSTEKFDTSTPMGRAMLNICIVFAQLERETIQKRVTDAYYSRCLKGFHMSGQAPYGYQLEPTVVEGIRTKKMVADPIAADHVRLMFEMYAEPETSFGDITRYFEEHDIKIYGKSMFRTFLSQLLRNPVYAQADLELYEFFKSQGAAIVNDASDFAGTNGCYLYQGRDVKEDKDRCLKDQILVIAPHEALISSDTWLKCRKKLMANTTFQQGRKPKNTWLAGKIKCGHCGYALKATHVPNSTGYFRCTKRTENKGCPGCGKIRKEEFEQFIFSTMQEKFKDFQILHGREEKVNPKLTAYQVELAQVEAEIEKLLDTLTRANATLLAYANKKIEELDTRRQTISKAIAELSVETISPQQIKKLSYYLDNWDSIDFDDKRKAADGLISTIKATSDRVQIEWKI

SEQ ID NO: 7345 - protein, 881 aa, synthetic construct
MEHGSAKWGNVSEICRRYCEKQYTNNLLLTQHFRMGLDGYKHKRNLNVLVVGGSGAGKSRTYAIPNIMQCNCSMVITDPKAELLRKTGGVLERNGYEVRVFDLINPETSWCYNPFAYVRDDKDVLKLINNLIRNTTPKGAQSSDPFWEKSETALLQALMLYLLHEAPPEEQNFPMIMEMLGSAQVKEDDEDYQSPLDILFERLEMRDPESIAVKQYAIYKQAAGVVCSKRLLNQAVGKSLRTHNLKPKKGAQVMRKNEKITALYERLSRDDFGKDDDQQRESNSISNQKAMLEEFAARQGFTNIVHFTDDGISGTCFDRPGFLAMMKEVEAGNVEYLCIKDMSRMGRDYLKVGQIMEILRQRGVRLIAINDGVDSARGDDDFTPFRNIMNEYYARDTSRKIRSTFQSKGKSGKHLTGTVIYGYLWNEARDQWLVDPEAAEVVKRIFAMTIEGYGPYQIASKLKEEKILIPSAYLAQHGEGVNKNKTFKDVYGWGSSTICNLLEKREYLGHTINFKTRKHFKDKKSHYVPEDEWTIFENTHEAIIDQQTFDLVQKIRGNVRRYPDGWGEAAPLTGLLYCADCGGKMYVHRTNNGKRISQYTCSQYSKVPVGKLCTTQHRINEDVVLSLVSEMLKAIAEYAKHDRAEFVRVVQEAQSSQQTAEVRKQRTRLATAKQRVSELEVLLCKIYEDNILGKLSDSRYATLDAQYEKEQSELTAEISVLEKAVKSYEKHEKDADRFIALIGKYENFDKLTIAMLNEFIEKILVHERDRKGSIQTTQEVEIYFNFVGRFVPPAFGEVELTPEELEEIRKREERKDRLHQNYLKRKASGAQKRYEDKIKERKKAEIEAKKAAIRAEDIAKGVFVPVSSLPQREPMKGVQSA

SEQ ID NO: 7346 - protein, 550 aa, synthetic construct
MSRKKQVYEKITALYCRISLDDGGDNESMSISNQKLMLRDFAEKHGMFQYKYYVDDGYTGRNFNRPSFQRMIADIEAGKIGCVITKDLSRLGRNYIEAGSYIEIFFPKHNVRYIAVTDGVDSLTRQEMDITPFKNILNDMYSRDISKKVLAGITTRSRQGKFCGGTPPFGLMRDPEDKGHLIIDPETAPVIRKIYDMALDGWGCMRIAKQLMEDKIPITRVKSNTECDVNYYSWGSARISHILRNPFYKGAHLVCRTHQKGIRSNTYDIIPREDWEVIEGCHEAIVTPEEWEQVQEIIDRRPTIMKGNACPFYNLFHGLVYCATCGKSMQVRYEKVGRTGKNRFTGEMREPIDKAYYICQTYNRLGKNACTSHKIEARDLYNLVLKDIQELAAQAMKDADAFYQRLSSRMERRYLVDASQTEKERKRLEARNQEIDGMFLSLYTDKAKGVLTEQRFMKLTAALEQEQESNQKRLHDLAVMQSRADAQESEVRTFIKEIRRYAAIEELDESVLNRLISKILIGEVKKVDGQKVQEVRIVYNFVGEIPEIAA

SEQ ID NO: 7347 - protein, 556 aa, synthetic construct
MAMMNEMEYRTIGKALAGGYRAAVYCRLSKDDDLQGESASIANQRDMLEKYCEKQGWEVVAVYQDDGFTGLNMERPDLQRMLRAIERRQINLVITKDLSRLGRNYLQTGHLIEDFFPRNGVRYIAMNDGIDTLRDNNDIAPFKNILNEMYSKDISKKVHSSYLLKAQKGQFTGCLAPFGYRKDPEDRNHLLIDEETAPIVRLIFGYALNGHGPNYIRRRLEEEKIPCPTWWNRERGLRNTRTKWEKKDPENGRYMWDFSVIKDLLMNPVYTGAIASQKKDYRFKIGTIGEKKPEDWIVVEEQHEPLIDRMSFDIVQNKLKSRQRPGQTNEISLFAGLIKCGECGKSLTIRYTNAKHPQQIYSCKTYNAFGKNHCTQHRIDYDTLYSHVLRKIRECARAALMDGKAVADRLTNTCEAEQREQREAMERSLTRDEERIEVLDKMVMRLYEDMIAGRISEQNFNTMLEKTQTEQAELKAKVSEGRKRLSDEVQLANDAKQWVEAIQEYANITELDAATLNRLIKEIVVHERIDEDKTRHISIEIHFNLKPIPEVEQVTA

SEQ ID NO: 7348 - protein, 635 aa, synthetic construct
MAGIKEEKKIYLVGIYCRLSKDDGTDNESASIATQKSILADYVKKQGWHLAKTYVDDGYSGTNFQRPSFQNMIKDIESGLINCVITKDLSRLGRNYLDCGLYLEVFFPEHNVRYIAVNDGVDTLNKSAMDITPFRNILNEMYSADVSVKIKSAYRARFQQGKFMGTTAPYGYVKDPADHNHLLIDDKVAHVVREIFDLALAGNGIAKIRKHINKQHILRPAAYAVTQGAIGYERHFEDNEENRYIWSENSIRGILRSPIYAGNLAGYKRIAANMKSKKRPSKLPEEWEVIPDTHEGIVTQEEFDTVQQLMTSRRREQNAGGFENIFSGVIKCADCGYAMRAASANRRKRPDIIDCVQYTCNNYGRYGNVMCTAHSIEARDLFNAVLADINRFADMAVNDEKAVRAIEKRLTETDQSRARALEKEQRKLNKRLAELDRLFSSLYEDKVMERITERNFEMMSGKYQKEQLEIEARLREVTETLNDSYEKSQGVRDFLSLIRNYQGLKELDATIINALIDKILVSEREKLTDGTVRQEIKIYYKFIGFVGELHITPTKRWTALKPKNCTVCGVEYVPRSAISKYCPECRKRIRKVQGTETKRRSRERNRQACIELSAKNDRLMWTSNHPDRPFPKRAV

SEQ ID NO: 7349 - protein, 575 aa, synthetic construct
MENFDLKGFAKGKKQQKEQIGGNAIIYTRVSSSEQVDGQSLEVQQDKCREYAQSHSYTVVAEFGGTYESAKSDKERKEFNRMLDFIKKSNKKGNTQKVDVVIVFSTSRFSRTGSTTIIEEVEARGAYVVSATSSYDPRTAVGKYMQLMELANARFQNDEKRATTIENSVKALLKGRWIGKAPRGYDQKTTKKEQIITINEEGKLIRKAFLWKANNKLSNEEIRHRLEAEGLHICKQKLSELFKNPFYCGYMAHKFLQGDIVQGNHPPLISKEIFLKVNGELSKNHSGYEQKIDKEYAPLLGSIKCPCCGKNLSASISTKMRKRFGRTDIGYYVCSRKGCKYNSSTKKVHEAFEEEVNRYALSDKVSELLKMQLTITFEYMNQENRERAKSIKANIKAKEKELEQVETNYALCTDAKKQSICEKVMTKLEKEVRDLKTEFSKVNTEILNLDKFIDFAFKMRSNLFELWELQGLEGRRRLQKLVFPDGFIYDKNNEHIEPKKVNQFFLLKYSYPTGNGDKKKETNREKHDSSLRVLEAGLEPAQPQWPKDFKSFVSTIPPFEHPFKESGKRDSNSRP

SEQ ID NO: 7350 - protein, 537 aa, synthetic construct
MKQQIYNTALYLRLSRDDELQGESSSITTQRSMLRLYAKEHHLNVIDEYIDDGWSGTNFDRPSFQRMIEDIEAGKINCVVTKDLSRLGRNYIMTGQYTELYFPSHNVRYIAIDDGVDSEKGESEIAPFKNIINEWVARDTSRKVKSAFKTKFAEGAHYGAYAPLGYKKHPDIKGKLLIDDETKWIIEKIFSLAYQGYGSAKITKQLRAEKVPTASWLNFTRYGTFAHIFEGNPESKRYEWTIAHVKAILKSEVYIGNSVHNMQSTVSFKSKKKVRKPESEWFRVENTHEPIIDKEVFYRVQEQIKSRRRQTKEKATPIFAGLVKCADCGWSMRFGTNKANKTPYSYYACSYYGQFGKGNCSMHYIRYDVLYQAVLERLQYWAKAVQQDEEKALNKIQKVGNAERIREKKKKASTLKKAENRQSEIDRLFAKMYEDRACEKITERNFVMLSSKYQKEQIELEQQITSLREELSKMEQDMIGAEKWIELIKEYSIPKELTAPLLNAMIEKILIHEATTNEDNERIQEIEIYYRFIGKVE

SEQ ID NO: 7351 - protein, 679 aa, synthetic construct
MNNMDKKVLIYCRVSTQQQTTDRQKEELLKFAVENHWNVEEEDIFIDVISGFKKGEFRPEYVKMLERVEYGDIDIILFSEFSRLARNATELLEQIKLFIDKGINLYFDKQKLWVRDSNKDVGSIILLHVLAVMSSYEIELFIERSLSGKITKVQAGHGGGDERAYGYMHNKNKQIVINPIESKIVTRIFEMYVGGYSSIQISEILNAEKVPAPYVRKLNEYKKNREAKGLEVKEYKFDTDNLKWRISTINRLMHNELYKGNRRITFYKPDPTNPLPLSERQDREIVYEYSEHVESLRIVSDELFQQAEDKLSKAHYNKNNAVRHENLLKHLMVCGECGANFSVGKSNETSKNYISGGRTYKCYGRVNRKDKPRTCTNGAELRQWKLDGLVLQLSIQMFAEINIQQTNILKIENLGKEIEELVQIKSSKNTELVEAENLYKKTLKRLIAIEDDEVAKNLISDAKHKYDETKNVLNKTMDKLSREITTKRITIDNLKRLNANPLLINKMDEIRKNRDLVKTMVDEYIDKITIFRLHELWLLVVVSYKGGEEMWGTIKCARYKKEEMFYDELHCHYGVEFQGWLLNNTEHCFSYDKSTRIITYHGGSKIYVEFKSGEYDYDTFNQMIQETGWMGCFPFYAYEDSDKDLSVPFNEKFRKSLQENRVDWKAHNDKVLERLLSES

SEQ ID NO: 7352 - protein, 679 aa, synthetic construct
MNNMDKKVLIYCRVSTQQQTTDRQKEELLKFAAENHWNVEEEDIFIDVISGFKKGEFRPEYVKMLERVEYGDIDIILFSEFSRLARNATELLEQIKLFIDKGINLYFDKQKLWVRDSNKDVGSIILLHVLAVMSSYEIELFVERSLSGKITKVQAGHGGGDERAYGYMHNENKQIVINPIESKIVARIFEMYVGGYSSIQISEILNAEKVPAPYVRKLNEYKKNREAKGLEVKEYKFDTDNLKWRISTINRLMHNELYKGNRRITFYKPDPTNPLPLSERQDREIVYEYSEHVESLRIVSDELFQQAQDKLSKAHYNKNNAVRHENLLKHLMVCGECGANFSVGKSNETSKNYISGGRTYKCYGRVNRKDKPRTCTNGAELRQWKLDGLVLQLSIQMFAEINIQQTNILKIENLGKEIEELVQIKSSKNTELVEAENLYKKTLKRLIAIEDDEVAKNLISDAKHKYDETKNVLNKTMDKLSREITTKRITIDNLKRLNANPLLINKMDEIRKNRDLVKTMVDEYIDKITIFRLHELWLLVVVSYKGGEEMWGTIKCARYKKEEMFYDELHCHYGVEFQGWLLNNTEHCFSYDKSTRIITYHGGSKIYVEFKSGEYDYDTFNQMIQATGWMGCFPFYAYEDSGKDLSVPSNEDFGKSLQENRTDWKVHNDKVLERLLSKS

SEQ ID NO: 7353 - protein, 402 aa, synthetic construct
MKQIKTIQAQKVTTIKRLKVAAYTRVSHTSLLQSLSNQVSHYSQMIQANPEWDYVGVYSDSAISGRSQAHRRDFQQLLEDCRKGKIDIILTKSISRFGRNTVELLETVRELKRLGISVRFEKEKIDTLTAEGELLLTLLASMAQEESQSISQNIRWRVKKRFEDGKPYIPQDIFGYRWNGEEYVIEPHEASIVRQVFEWYMEGLSAPKIAKRLDDRGERTRLGNRFTKRIIYNMFDQESYCGRLILQKTFRDHFGSRSIPNDGQMAKYIVENAHEAIVTPEYFQQVNQEKKRRARRRASKHDALAKLQGKVYCEHCGLDMILTLETKSNQEKRVRYYCRTRDAKGVEACLGRTVTEEQLFQAFGESINTEDIHHISFNSVTNEAKATYRNGEEKHVIIQKGR

SEQ ID NO: 7354 - protein, 521 aa, synthetic construct
MKKVITIEPAKQVTHKVDLPSFTKRRVAGYARVSTDHEDQTTSYEAQMTYYTDYINSRSDWEFVKMYSDEGISGTNTKKRLGFQEMVEDALDGKVDLILTKSVSRFARNTVDSLSTVRKLKEAGVEIYFEKENIWTFDSKGELLITIMSSLAQEESRSISENVTWGRRRQLAEGQVTFSYSQVLGFKKSDTGGFEIDQEEAKIVRYIFHQVLLGNNPNKIARELTAQGIPTPQGKRKWSYGTVKRMLRNEKYKGDALLQKSFTTDFLTKSTKPNEGELPQYYVENNHEAIIKREVFDLVQVELDKLEKKRQTNNIFTGRLFCGNCGSAFGSKVWHSTSKYKRTIYQCNAKYKDEHKCQTPHVTEEEIKGWFLSAMNQLLSNREEIVANTELLIDLAKDTSPLENKIDDLEQQLETIRQDIEDLVDRNARKAQNQDLYQEQYDTLVTAYQERQKELQEATSSLEEQKSKQLSLDGFIQQLKQQEDLITDFNQELWQTSVERLDIKEGKKISLTFKNGVRIDL

SEQ ID NO: 7355 - protein, 603 aa, synthetic construct
MKNAALLLRVSTDIQDIDSQKEALLPVAKSMGYNVSEEWIFGQHITGKDDIRKGERESIKKLKELCKTGIIDVIIIWEVSRLSRSGIAGRQFIQDFNEMKIPIFFKDRNIWTLNPDTLEEDINSKMIIGLYLDIAESELKTLKDRTNRGKRKNVEHGLSTGGFQNYGYKVDPETNKIEIDEEEAKFVRDLFAKYASGKYSTASLTKYANTTGYLPRYNKTSRKGSFRTNSGIDRNTSTVRWSRSVITKMLHNRRYIGERVYKDMITKVPAIVDEEIFNKAQTFFRENPNKIEKAKKYIHLLGRKVVCGQCGSSYYSHVGITGSVYLCTTYSSKSKDCDNIRINYEKSEAVVWDYLKNYSYYFKRIDETEKERITEEIDKKRRELLERQNKFNQLVDEENVKVKNLLNLVKNSGGAFKMEDIIQDKINIDKTIENYNIDLNKIHSELALLDNRLNQIVNTNLTNIAIERIEADRNQMKNIIDSVIDVITVYKGGTDRIILQIELYGRVVNILMRRRVKVNCIYCFIDDTVATFQNPDKFRKETPLPSEIIDQIPIFDVGSNNNNVFDEMIFGGYSFDEMWNILIKYGCYREYTPFQPVRREKKN

SEQ ID NO: 7356 - protein, 540 aa, synthetic construct
MKQPYNTTIYNTALYLRLSRDDELQGESGSIQTQRMMLRQYAAEHGLTVVDEYIDDGWSGTNFERPSFQRMIDDIEDGKINCVVTKDLSRLGRNYILTGQYTEIYFPSKGVRYIAINDNVDTINGDSELAPFLNILNEMHARQTSKKVKAAMRTRFANGAHYGAYAPLGYVKDPDKKGHLLIDPETRWIVEKIFDLAVHGRGAASITRILVEEKVPTPGWLNYERYGTFANIYAGAPAEKAYAWTIAQVKSILKEETYIGHSVHNKQSNISFKNKKKVRKPQEEWYRVENTHEAIISEEVFQKVQELIASRRRKRRNGTTQIFAGLIKCADCGWSLAYGENKQNKNPYGYYHCSKNGQGLRQCSMHYIRYDVLYAYVLARLQYWSMLAQKDEDKLLKRLLNASDRERNSAKKKQAAELKKAEKRKAEVDGLFAKMYEDWSAGRITEYNFNMLSEKYQNEQKELETKIRQLHETMEAAVQTAADAEKWIALMKQYVNPVELTAELLNTLIEKITVHEAVKGEDGSREQEVEIYYRFIGKID

SEQ ID NO: 7357 - protein, 401 aa, synthetic construct
MKQIKTIQAQKVTIKRLKVAAYTRVSHTSLLQSLSNQVSHYSQMIQANPKWDYVGVYSDSAISGRSQAHRRDFQQLLEDCRKGKIDIILTKSISRFGRNTVELLETVRELKRLGISVRFEKEKIDTLTAEGELLLTLLASMAQEESQSISQNIRWRVKKRFEEGKSYIPQDIFGYRWNGEEYVIEPHEASIVRQVFEWYMEGLSAPKIAKKLDDRGERTRLGNRFTKRIIYNMFDQEAYCGRLILQKTFRDHFGSRSIPNDGQMAKYIVENAHEAIVTPEYFQQVNQEKKRRARRRVSKHDALAKLQGKVYCEHCGLDMILTLETKSNQEKRVRYYCRTRDAKGVEACLGRTVTEEQLFQAFGERINTEDIHHISFNSVTNEAKATYRNGEEKHVIIQKGR

SEQ ID NO: 7358 - protein, 612 aa, synthetic construct
MIEYATKITALYSRLSVGDEDRDGGESNSIVNQKAFLERYARDKKLINIRHYIDDDESGRFFDRSAYTQMISDVEQGKIGIVIMKDMTRWGRDYLQVGNAMEIFRRNNVRFIAINNGIDSIDQNTLEFAPFINIMSEWYARDISKKVTTGIKTKGASGKPVATEAPYGYIKDPENKDYWIVDKEAAEVVKLIFRLFMEGKNRNQIAVCLKEKEILTPTFYMKRQDRGTAKSKPLNEENRYNWNKATITRILKRQEYCGDVVNFKTEKHYRDKRNHYVDKSKWQITENVHEPIIDRTTFENVERMLKNAPVKRPNGDGEIHALSGLMYCKDCGTKMHIRTIHKNGRVQHVTYCSEYAKGKAKHPKCNSPHRIDVDEVMENIAEVLRKIAQYSLENKAEFEKLVKESLYKEQTEEVKKNKKRMPQITDRMEQIERVMNKLYEDNALGNMDTERYEQLSRKYAEEYYTLKAEKEEIKEHLSECENANKRAKRFIRLAESYSNFEELTPTIINEFISKIVVHERDVKRAKYAVQRIEIYFNYIGKFENELTKQIEPTKEGMLQMREEIEEAKKEKARAYRRAYYKEYRAKNLEKCREYEKLKAREYRAKKKLQRAT

SEQ ID NO: 7359 - protein, 585 aa, synthetic construct
MMLMTKAYSYTRMSTPDQLKGDSKRRQVEMARGYAERHALEIVDRYDDLGVSAYHGMNVAFGALSRFLAAVDEGKVERGSVLIVESIDRLSRQTVAEALTLLMALIRKGITVVTLQPEEVYSEKTIGEGISLIGALFVMARAHEESKTKAFRGREAWKAKRAKARASGQVATRRVPAWLYVGDGELKIHDGRAETVRQIFEWARDGWGAYSIAKTLNQRGEKPWGARPNAVWRDSYIKKILHSRTVLGEYQPHLIKMKEGKQVRIPDGDPIEGYYPQVVDLSVFQDVSRGLNIRRVVGAGRKGVKYANLFTGLLRCRCGAGYRYISKGSLPKGGEYLQCSVASSKGSCSMPLIRYQIMETLLLEAVDSIDARKILDPLTMNTRSIKARTRRSELIDERERAQRKATNYADAIGDSGKSKALLMGLTEQEAIIGRATAELAAVDRELLDLHVGDHGQRKAALSTLMVEINPQSEGAAGKRRALAAELASLIERVVVHPSIHVAEEIADGGALPPDGDVETRSEAADWKSKYGVKSIAGLRKLLRERCFEVHIIYRTGASERFDALTGPNFKAPPSLRMKEMRMVNG

SEQ ID NO: 7360 - protein, 502 aa, synthetic construct
MESKTIKHVAVYLRKSRDDGEFEDVLSKHRDTLLTLVENRNWTYRLYEEVASGEKIESRKEMQKLLRHVEDQLYNGVVVMDIDRLGRGENKDWALIKDTFLNSETVIITPNKIYDLEIDNDDVSFDFMSIFARIEYKTIKRRMKQGKEAGAKKGMWTNGKPPFPYYYDKNTRSLLVDETKRPIYRAIVEKYLNGTNLGHIAIWLTDNKIPTPYNIKPDGKNKGWSNITVQRLLASEIHLGYITYGKTRSKRGQVELVPEEERIKVMGTHEKLKTPEEHEVIMERLLKNRMLNPNSRRNIFPLSGLLYCEKCGSRMRFRVGENKKQGQHWSALCYHQYKDGSKCDQRGKVMDADFFNALFDRIIHVDPNILREIELHGSRYNDTQVIIEVKEQELKKQKRALDKLHESYEEDMITKQVFLERKAIRSRQIQKLEEELKDLRKVVVDEGNYPTVEQIYERIGEFKELWSGSVTSEEKNRALKKLVERIVYDREGNRVELTVCYR

SEQ ID NO: 7361 - protein, 528 aa, synthetic construct
MLDNSNVAPGKNKTLRCAIYTRKSHEEGLEQEFNSLDAQRESAEHYIEAQRMRGWTALPDRYDDGGFSGGNMERPGLRRLLADIDAGKIDVIVVYKVDRLSRSLLDFMKMIDLFNEKGVSFVSVTQHFSTTDPTGRMFLGILITFAQYEREVIAERIRDKVAAAKRRGKYCGGVPILGYDVDRNNKKLLVNPDEARTVQYIFRRFIQIGSAKKLGQELNEQGYRTKAWTTKKGKVREGSEWNTGHIYRLLNNRVYIGEIAHKDRSYPGEHEGIIDRATWDKVQAILEDNKPVKVSMARTKMVAPLKGVIRCGHCGCSMGPTYARKNGRHYTYYICQKDSKRTVSRCPLKRIPAGDIEQAVIEQLSAVFRTPTLVAKTYFAARDIEQAERERLFKQKAQLEMELSQAREQALELMKPGSDHPGKAEMLTTVNRQAVELSKQLTHVSERCRAYQGNSITEQDVSEAFQNVEGFWEDLFPVERNRLIRLLVDKVEIRETGIDMELRTNGLTTLIAELAGLACEVTERRASR

SEQ ID NO: 7362 - protein, 578 aa, synthetic construct
MAYIKTHVYTRISKTSQQEGSGIDEQLSRIESYIKSKPEQFHDEPQHWQDIGLSAFKNKNIIDGQLAEFIQQVEEGSIGEGHALVIYSLDRLSRRSSWDEDTIQKLVKAGVDIHDVSTPVVLKHDDPFSKIIMELIVQRGNNESKIKSERSTSGWAKRLKDTIENGKVFTKQLPRWLAADENNKYIVIPEQAEIIKRIFREYTNGMSSTMIARRLNDEGLKSFSGSKWWHNTITNLIKDERLRGCFIRTVDSTKIPDIYPAIIDGELFTIANRILQVNSVGIKGRPRENNKTREIKNIITGFVLCGKCGSKVTTSKNPRGVSYVKCRGRRNDEIFCGQKSIKLIELERLVINYTKQLDMSKIFSYEEVDISLEASLQSELLSLEADEKNCLAKIEQRKKEKKTASLHLADTLTDIQDRIDEIRSELLEISVRDPLVEIGQYNLEELMDTSNIELRMSLRKYLVQVVDKITFRNIDDNILLELTYNKDVFRHVLITDKKVSKVLNEINIVKEDGFVKYQTNNFSIIEDVDLGTCTFKGLNNVSVADYFLLANYIDAIAGKRWIIDLMHDPINVETVFNN

SEQ ID NO: 7363 - protein, 578 aa, synthetic construct
MKSYLYSRISTLQQVQGFGIARQIQTVTDFLENAVIDARLGYQLDPNDYEILESDIGKSAFKGDNWGSSSNLGRFYEDVINRRITRGVLIVENIDRLTRLSNYDASHKLTTLITSGIDIIEVESVTCFSVRIPDSLSVLAMSISRAHNESKRKSTMGQMTWTNRINQLKNEGKASAKICPRWLSIENDKYVLDEEQAKILLSIHQMFLDGHGNTAIVRRLNDEGKLNNGVLWNTLTLQKVLKDERLTGRGIIGKQRIIHDKNISKEEKDKIIKDKLVYIDNAFPVVVPMELFSRVQSKINSSKHGSKNPKTTKNMRNLFNGLSKCGGCGNQMIVCKNGHGNQFYTCLGRRSEKTCSNVGTNYYSFEQLLLKNLKEINWDTIYNGSKSNNANSIDEQRQKIIEVEQSIKAFNNELIGLDDDGLELRIIRKIKKNKEILKSLVTDLNGLMTKEISHVEFEPNLELVHDQSNVKLRQDTNVALRKVIRSIDITRNENLVISFVKYYTDTISHLFIYDIKKNNTISKTYMTDDLVFHFDAGSIDVKTGKVELTGKELKEEDQIAFDIWLETFESAVKKVIEI

SEQ ID NO: 7364 - protein, 490 aa, synthetic construct
MKRIAIYIRKSVKGDENSISLEAQTEVIKHYFKDKNEFIIYKDDGFSGGNTNRPAFQRLMADAMEGKFDTVACYKLDRIARNTLDFLTTFNTLKEYGIDLICVEDKYDPSTPAGRLMMTLLASLAEMERENIKQRVSDSMLNLAKQGRWTGGTPPFGYKVVTIDGGKYLELEDEKNIKYIFNEFINGKGIIKLGNEFNCDKKKISRILHNITYLQSSKDANIYLKQVLGYEVIGQPDGYGYLPYGKYKVLNGKKIKNTDGLKIACISRHEAVIDLDTFIKTQERLKTFEGKKAPRISTKSFLAQMVKCGICGANMLVTLGQKRKDGTRKLYFSCPNKCGNKFKDVSELENDILTTLKDVNFFDEIKKNTNIINKDNSKIKKSMLKELEEKRKILDGLMDKLALVDSSLANIIIEKMNSVNVDINDLQNKIDLLEKEEIASSYNKEDFKLKEENRKHFIEDFENMDMEEKQNSIRGVINKVVWDGKNIIIS

SEQ ID NO: 7365 - protein, 565 aa, synthetic construct
MATSKKTNSKVYSYLRFSDPKQAAGSSADRQMEYAARWAAEHGMLLDASLTLRDEGLSAFHQRHIKQGALGVFLRAVEDGRILSGSVLIVEGLDRLSRAEPIQAQAQLAQIINAGITVVTASDGREYNRERLKAQPMDLVYSLLVMIRAHEESDTKSKRVKAAIRRQCEGWVAGTWRGVVRNGKDPHWVQQRKDGAFELYPERALAIRTMIDLFLAGHGATQIAHLLSERKLYVSNAGNYSTHMYRIVRNRALIGEKPLTVDGDEFRLAGYYPALLTDEEFATLQDAMNERGRRQGKGEIPGILTGLTITSCGYCGMAIASNNAMHKRAKGPELVRRLTCTGTRFNVGCPVAGTCDAETIERALMRYCSDQFNLTRLLEGDDGSARRTAQLAIARQRAAEIEAQIHRVTDALLSDDGAAPAAFMRRARELETELTQQRREIEALEHQIAASNAHEIPAAAEAWAQLVDGVLALDYDARLKARQLVADTFRKIVLFQRGFMPLDHAPADRRKRSGTIGLLLVTKRGGMRLLNIDRKTGQWEAEDNLDLAPAHADEVPLPQCVSGAA

SEQ ID NO: 7366 - protein, 599 aa, synthetic construct
MSTNKELREGVADKAKTCFLYVRVSTKMQVENGESIEAQLYDLRDYAKRNNLRILHEYIDDGYSGKNITGRPHFQEMMEEIKSGVRADYVLVFKLSRFGRNAADALSSLQLMQDYGTNLVCIKDGINSEAQMGKMMIAFMSAFAEMERENILVQTMAGREQKAREGKWNGGQAPYGYKLVKDEKGKGHLEIDEDEAEIVRIIFREYTKNGKGVMALASWLNAQGYRKNVRGNGKYEHFVPTFLKNVLCNPVYIGKIAYGRRRTTPVKGKRNEYRMIKQSDYDVYDGEHEAIIDEATWNAAQERMAEESHPFPEAKTGEHVHLLTGMLICPVCGRKMIANVSHGKRKKDGTVGKSTYAYACKYSKKQFGPSCTFTRQFKQEYIDREVIEVIAHAAYSDVFEERVRDELDAAVDIEKLEADVERIGKALDNNKAARRMLSRKLDSLDVSDRSYERKYEDMQARLDKLYDEYADIETAFDDANSKLESAKEKQVTTARIYEMLDEFREHFDEYDPVRKKEILRQVVDSVEINPDANPKKGDTIVTRVRFKCPVSFYPTLPEEAYDALGVKEFNRLETTEYVSEKKSRVDEDTVETVAVLERR

SEQ ID NO: 7367 - protein, 507 aa, synthetic construct
MKRVISYIRFSSEKQSRGDSLRRQSKMVTDWLKAHPEYYLDESLTFRDLGVSGFTGKHLKGGLGDFLTAIEKGLVKAGDTLLIESLDRLSRQAVDRASELLRNILRSGVDVVTLSDGEHYTSESLKDPLALIKSILIMQRAHEESLRKSERIQAAWDAKKEAAKAGIKISKRCPAWLKLNDDRKSFSVIPEKVETVKRCFQLRLEGKSIWEIVRTLNDEGHQSMSQYKPGKFGQTSVQDLLKNRSVIGYFTPKGCEEIAGYYPAIIDETTFYKVQQLSHSRYGRKPVSAKPLSVNLFKGVIRCSECGHALIITGFSDTRNGIYRCPLRNENRCSAKGLSRKQTDGTLLALLSRLDRFDSDTTNNIDTLKLHREHISSNIEKLVQLSLEIEDLSAITSKLKQLKGELSQVDADIEKETQRLKSIDVGCLSDCDLTTKAGRIEAQLIIKSAVKEVVLNTAKRRCKVTFHNGRAITLPITENPSEDVTEAIQSLSEVTERGLIDVDEVII

SEQ ID NO: 7368 - protein, 516 aa, synthetic construct
MYRPESLDVCIYLRKSRKDVEEERRAIEEGSSYNALERHRKRLFAIAKAENHNIIDIFEEVASGESIQERPQMQQLLRKLEGNEIDGVLVIDLDRLGRGDMLDAGMIDRAFRYSSTKIITPTDVYDPDEESWELVFGIKSLISRQELKSITKRLQNGRIDSVKEGKHIGKKPPYGYLKDENLRLYPDPEKAWIVKKIFELMCDGKGRQMIAAELDRLGIDPPVTKRGAWDSSTITSIIKNEVYTGVIVWGKFKHKKRNGKYTRHKNPQEKWIMYENAHEPIISKELFDAANEAHSSRHKPAVITSKELTNPLAGILKCKLCGYTMLIQTRKDRPHNYLRCNNPACKGKQKQSVFNLVEEKLLYSLQQIVDEYQAQKVEEVEIDDSKLISFKEKAIISKEKELKELQAQKGNLHDLLEQGIYTVEIFLERQKNLVERITSIENDIEVLQKEIETEQIKEHNKTEFIPALKTVIESYHKTTNIELKNQLLKTILSTVTYYRHPDWKTNEFEIQVYFKI

SEQ ID NO: 7369 - protein, 547 aa, synthetic construct
MKLLVTYIRWSTREQDSGDSLRRQTNLIDAFYSKHKNDYYLLPAHRYVDKGKSGFHQQHKNQGSDFRRMFENVMSEAIPEGSLIVVENFDRFSRADIDTAIDDVRQILRKGVSILTLGDGELYDKSALTDPVKLIKHIIIAERAHQESLVKQKRIAQVWNHKTQLARELKKPMGKQAPGWLELSEDGSHYIVDEDKASLVNIIYDKRLSGMSMFAICKWLNEQGYPTINQRKVRISKTKKPDGNWSALSVKHILTSRSVLGYLPAKISTEDRKTVLREEIEGFYPQIVTDSKFYAVQQLLEETGKGKTSSGEHWLYVNILKGLIRCKCGLVMTPTGIRKPVYQGTYRCNGNKESRCSYGTVSRKLLDTQLCSRLFSKLSQLHDEATDTAKLDELQRRLNTVDSELEKLTETLIQLPNITQIQEALRVKQEEKDELIVQLSREKARVKSVSSLDLSGLDMESVEGRTEAQIIIKRLVKEIVVSGNEKLVDIYLHNGNMIRGFPLDGKDDHTLTLEEATDEMQSLDDMLIFGEPVTRIYPAGDMEEVDA

SEQ ID NO: 7370 - protein, 514 aa, synthetic construct
MKKVYSYIRFSSTKQAFGDSHRRQSKAIQDWLANHPDHILDESLSFEDLGRSAFHGDHLKEGGALRAFLEAVKQGLIPPDSVLLVESLDRVSRQSISHAQETIRGILEQGITVVTLSDGETYNRQSLDDSLALIRMIILQERSHNESVIKSDRIKKAWSHKRQQFEQDGTKITGNCPGWLKLNSDKKSFSLIPHHIETIHRIFDEKLSGKSLHAIARDLNLENIPTITNKRVDTGWTPTRVRDLLLKESLIGVAYGVSDYFPPAISKEKFHAVQMIRGQGKGKKPTSRQPSSIDILKGICKCAECGSTLRQRNTKKTPEGRYPRGYLECRNRQLGRCNSKAFNRSLIEDILIQKVFPTLQYLSLKSNGDNISVTTLKADITSLEKGINNLISLAEKGLGDLDTLAQRITNNRVELESKKKDLRQAEAILSLRSDNDIQDSDRKTVEGRIKLQLAIKSFVKEIIFDYDKQEITIRLLNGKSFSGISVAREDKDFDHSSMFEVLQKSLLDVDGVCL

SEQ ID NO: 7371 - protein, 506 aa, synthetic construct
MRSVITYLRYSSAIQGAEGADSTRRQNDLFKQWLKKNSDAQVVASFSDEGLSGYKGKHLTGQFGDMLARIESGEFPEGTLLLVESIDRIGRLEHLETEALMNRILGNGLEIHTLQDGLIYTKDALADDLGISIIQRVKAYIAHQESKQKSFRVSQKWEQRAKLALAGEQRLTKMVPGWIDPDTFKLNEHAETVRLIFKLLLDGESLHNIARHLQSNDIKSFSRRKDANGFSVHSVRTVLRSESVIGTLPASQRNDRPAIPNYYEAAIDAATFNKAQEILDKNRKGRTPASDNPLTINIFKGLFRCQCGASVHPTGTKNKYQGVYRCNNHLDGRCDVPPLKRKPFDRWMIDNFLGMIDVGNDGESERKIAALQHEVEIVTSRIKKATALLLEMDDITELKAQVKELNQKRTELQTTINTMKRKTSLSDKGLPQLKDIDLMTKAGRVECQLILSKHLKGLTLGKDSVTVTLQNDTEITIPTNPLPLNDGSPIFEIADKELLDVDAYQL

SEQ ID NO: 7372 - protein, 506 aa, synthetic construct
MRSVITYLRFSSAIQGAEGADSTRRQNDLFKQWLKKNSDAQVVASFSDEGLSGYKGKHLTGQFGDMLARIESGEFSEGTVLLVEAIDRIGRLEHLETEALMNRIIAHGIEIHTLQDGLIYTRDALSDDLGISIIQRVKSYVAHQESKQKSFRVSQKWEQRAKLALAGEQRLTKMVPGWIDPDTFKLNEHAETVRLIFKLLLDGESLHNIARHLQANNISSFSRRKDANGFSVHSVRTILRSETTIGTLPASQRNDRPAIPNYYEAAIDVSTFNKAQEILDKNRKGRTPASDNPLTINIFKGLFRCQCGASVHPTGTKNKYQGVYRCNNHLDGRCDVPPLKRKPFDRWMIDNFLGMIDVGNDGESERKIAALQHEVEIVTARIKKATALLLEMDDIDELKIQLKELNQKRTELQTTIDSMRRKTSLTDKELPQLKDIDLTTKAGRVECQLILSKHLKGLTLGKDSVIVTLQNDTEITIPTNPLPLNDGTSIFEIADKELLDIDAYQL

SEQ ID NO: 7373 - protein, 413 aa, synthetic construct
MSTIFELPRQVVKPAFIRVAAYARVSTESDKQLHSYSAQVSHYQELIRSRPGWQFAGIYTDHGISGTSTLKRDGFNNMMTAARTGEIDLILTKSISRFARNTVDLLAYVRELKALGVTVQFERENIDTSTMDGEILLTLLASFAQAESETNSESVKWAVRKKYQEGYGHSYYVLGYQTVGRELLVVPDEAEIVRRLYTSYLEGISPETVCRQLKAEGKLPTSRGMKVNEKNVRPILENPIYTGMIIGQKYFVPTVGGSAKLNEGEHPQYVVEGHHEPIIEQELFDAVQAEIKRRRKAGHLTLAPSLGTTALTHRVVCSKCGRCYHRRTKCRKNMSYKYWWCELATRGKGNPCKAHQIREVLLHEKILNTLELEKWDDAALLEVIDHIVISPEGQIRIHLKNGTVKHAEFGGAQ

SEQ ID NO: 7374 - protein, 567 aa, synthetic construct
MSRSPKAYSYVRFSTPKQAQGDSYRRQLKSAIDYCAEHNLQLDAKTIEDFGVSAFRGSNRTDGALGRFIDAVKGGEIEEGSYLLVESVDRLSRQAIEKALSQFLEILNAGVVIVTLSDNQVFRKGEVDFTKLIVSIVYMARANDESEMKSRRSRAAWSNGRKEARENNKVMKNSRLPSWLTREGDQIVPIPERAAIVNEMFEMAKSGCGYEQIAKAFLEKGYKTFGKEADWRPAGIQAVIKSQAVIGVFQPHVIDGGERVPDGEPILGYYPTIVSPTLFEEVQYLIGTRCKHSGSYRKGIYNNLFSGVLRCQCGEPLRFHNKGKAGSPRNYLVCPKQNITGCELPNMLYDKVEPQLLQAVSLLSAVMQQRRATTEKTLALKDELANLRKKLELEVKKRNKAAQSMLELDDDAVFRELFTQCKANCQALEGQISQLEDDLMSRELSEKTLGKMILPEDLNSTDQRQRFNSQLKAAIKEISVIKTDDSVAAVFTDLDGQFMLEQAFKPKLAGSSIRDRSGEELLRTTAEAPYIDANWVKGEIDEYESFQKQTDSDYDDDFEDFSSEESK

SEQ ID NO: 7375 - protein, 490 aa, synthetic construct
MRVSREPIADIYVRVSTDEQADKGYSQRNQEEMLRKYCESHSIEIRHVIYEDHSAKTFNRPEWKKLIANLKKNKNRIDLILFTKWDRFSRNAGDAYQMINILRDLNIEPQAIEQPLDLSIPENKMMLAFYLAAPEVENDRRALNVFYGMRRAKKEGRYMGLAPVGYKNKVDESGLKFITPKEPDASVLRWSFEQLAKGLYNTEQIWKKSREKGLKCSKNAFWQMIRNPLYCGKIFIPPFKDEEGYFVEGQHEAILEEKLFEEVQDILDGRGRKYRLKIDTRNEFPLRGFLICPKCGKLLTASRSKGRSRYYNYYHCYKGCSLRIGSDKLTELFEQELGRYKPRKELLEVYKEILKECYFEQTRDIQTAKKQIFTQLKDFENRISHIRDLLATDKIDASEYNEIKSQYGISIDQLNKKFSDVSGRIPDIEELLKNDISELLKLDGVLSQSSSEDLRAFLNILFPEKLIFDGESFTKSKFCPAVKKGYRYIV

SEQ ID NO: 7376 - protein, 521 aa, synthetic construct
MAINKNVMIIPAIKRVGNNRKEDETPKLRVAAYCRVSTDSDEQASSYEVQIEHYTEFIKKNSEWEFAGIFADDGISGTNTKNRDEFNRMIDECMAGKIDMVITKSISRFARNTLDCLQYIRKLKDKNVAVYFEKENINTLDAKGEIMLTIMASLAQQESQSLSQNVKLGYQYRYQQGEVMVNCSRFLGYTKDENKRLVIVPEEAEIVKRIYREYLEGSSMDKIKKGLEADGILTGAGKKRWHTSTIRKILSNEKYIGDALLQKTYTVDFLTKKRVVNNGIVPQYYVENNHEAIIPREFFMQVQEELVRRSRGHISTSGKKRNFSSNHVFSQIIFCGECGEIYRRVHWNNRGKKSIVWRCVSRLENTGLTCHSRTVLEDMIGLATVETINKLIGQKDGFLLTLKENIETVISETDNNVVSEIDKKLEELQKDLLRLANSKEDYNDIADEIYRLREERHKALAEEAGKKGSKQRLEEMEKFLNEQSTLLEEYDEQLVRRLIEKITVYDDKLTIEFKSGVEVDV

SEQ ID NO: 7377 - protein, 515 aa, synthetic construct
MKTAIYLRKSRADLEAEARGEGETLAKHRSTLLKIAKEMNLNVLAVREEIVSGESLVKRPEMLALLEDIEDNKYDVVLCMDMDRLGRGGMKEQGIILETFKRSNTKIMTPRKTYDLNDEWDEEYSEFEAFMARKELKIITRRMQRGRVASVEAGNYLGTHAPFGYDIHRLNKRERTLTINSDEASVVRMIFDWYVNEDMGANAIRSKLNDLGYKSKLGNEWNPYSILDILKNNVYIGKVTWQKRKEVKRPDAVKRSCARQDKSDWIIADGKHEPIIPESLFEQVQEKLNSRYHVPYNTNGIKNPLAGIIKCSKCGYSMVQRYPKNRKETMDCKHRGCENKSSYTELIEKRLLEALKEWYINYKADFEKHKQDDKLKETQVIQMNEAALRKLEKELVDVQKQKSNLHDLLERGVYTVDMFLERSNVVSDRITEITSTMENLKKEIKTEIKKEKVKKDTIPQVEHVLDLYFKTDDPKKKNSLLKSVLEKAVYKKEKWQRLDDFELVLYPKLPQDGDI

SEQ ID NO: 7378 - protein, 505 aa, synthetic construct
MKKAIAYLRFSSLQQAKGDSVRRQKKLIDEWLSHNPDYYLDPVTYEDMGLSAWRGHHAVRGAFAVFMVAVEQGLVGHGTVLLIESLDRLSREKIGEATGRLRAVLEAGIDVVTLSDNVRYTRGSLDDPFAIIRAILIAQRANEESEMKSRRMRAAWAEKRKAAAEGTIMTTKCPYWLKVNDARNGFDVLEERAEVIRSVFRMRLEGMSFVRISCALNAQGKENLKGKVSQWNSSSIERLVRKKAVIGYLVPSHQCTSTDAEEIPGYYPPIVSEEDFARAQLMYREPESRRDGNFNPYLINIFRGLMRCGVCGHAIILTGISVKGYGYYVCSMRRQNRCEAVTIRRDLTDRYLISGLVQEASATGGRVSAEDTLRPLTARHLQLTGSLHNVIRAIEIAPDVTELCERAKSLSGEIRKLESEMAGVRQMRDCAAVTTLNLQDISDRQTCQRTARSLIREIRLHTGAKTCDLFLNNGMKIHNYPLYRQVGWSSILDAMAFLGEEEIYL

SEQ ID NO: 7379 - protein, 514 aa, synthetic construct
MIVAIYARVSTDQQAEKGYSLQTQLEACRRKAGELPPAISVEEYVDDGYSGAYLDRPALERLREGLRSKRFGAVIVYDPDRLARNLTHQLILTDEVEDNEAQLLFVNFDWQNTPEGKLFYSIRGAVSAYEREKIRERSQRGKRGKALAGKVVRNNHPYGYNWDPTNSIYTISPEEADMIRQIFAWVVDEHMSMRSIARRLAELQYPTRTDRNSWNIGTVHDIVTRETYAGTHWVNKEYKTKVAQHKFARGVRDVSEWIPVSVPAIVSRETWEAAQRELKRHKRVTRRPQRYPYICRGLVVCALCGGHMRAMTCGTGSRPYYVCKTGRAISGKSSTGGDVKCPARQIPAQDLDHHVWMYISGLLQHPETVAEELARTGGPGQQRTTRQALERLQTRETKLNAERDKVTLLFRQELIDLSTAERQLTDIKQSLSDVRAARQRIEAELETTMAPRDNDALRAKLQSLLDMADTADPNMQRQVIVSVVRQIKAQRTDLGKASAISGPEIEVDITFALT

SEQ ID NO: 7380 - protein, 505 aa, synthetic construct
MELAFSYARFSTKSQSTGTSLERQLNASRLFCSERGLTLSPKGYHDLGVSGFKQVKRPELEQMLQAIQSGDIPSGSYILIEAIDRLSRKGISHTQDVLKQILQYKVKVAFVGEDAKTLAGQVLDENSLNDLSSVILVALAADLAHKESLRKSKLVKAAKSIIRKKATEGHKVRGHTMFWIDWSEQKQDFVLNDRVKDVHKIIELRQEGHGPRKIAKILNELNIPGPRGNPWNHMTVTVVLRSPVLYGAYQTHQIIDGQKVPDVLLENHYPAVITQEEFVTIQADSSKSNKGRPSKANPFSGVLRCECGQAMLFSKRTNLNKDGEPLEYEYHFCLGHAEGRCKNNKRIRDLVPLLVSLMDKLVINQAPKKNLNVELIKQKEQKIEQLNKMLIELDSPPLSVLKTIQTLEAELDILLNTHVEEPVQTDVQTLSTITDAQEYNQYLKRLVKKIVVYQKNGPKNLRIKVYKTDGHYQNFLVKNGMVLFKSDTKALKELIDGFKKERREG

SEQ ID NO: 7381 - protein, 638 aa, synthetic construct
MKPKLYSYVRFSSVKQREGNSLERQQDTALKIAARYNLELDTTAFHDLGMSAFKGKNAHEGKLSEFIKQIGVKVPVGSWLVVENLDRISRDDAWTALDIFKSILSKGIVVVTGMDEKVYKYADVKNNPTDLIISLLMFTRAHDESLTKKNRVEAQARSLIRHNLTREAGTPAKAIESVGQNVWWVDTKSGYVTPHSMYFAAAQKIIELKQNGETLLGIQRYLNEHYPAPKKRVYKDQTGKALTPKTEQWGKHLIRTFLNPTVYGQKVFTLDKRDESGVVIYDPDSEEPLKEIFVIPDYYPALISEIDYLTLSKLDRHRAVTRSSSKYPEGNPEPEIPLLSGIGILFCGKCGSFMFKSGSNENKYRYICGSKIVQGKPCGKNGFTAYQLEHTVLQLIADHVWNNHQEDKTAWYESEIEKTSESIDKLLKLATLTDSLEELAEQIKLNKHNKATLEREFHQYKINRSEIQTTGWQQFRQFDVHDTKNPNRKQIRLKVKQAIRRIDCYDIDGRHGHFEVTFADETKQRIVIKFNRNRSPGVSYVEAQTVNDHDLLKMQGLVLHSFIDVLISPDKFAQHIQEKHEVSLLNPTYITELEDGIRHDEVNGIAIRVDGTTSKSYATINGIKHVINSLEDLNKISN

SEQ ID NO: 7382 - protein, 449 aa, synthetic construct
MLKRAALYIRVSTDQQAKHGDSLDAQIATLKDYVSTQDNLTIIDTYIDDGISGQKLYRDEFQRLLEDIKKNRIDIILFTKLDRWFRNLRHYLNIQEILDNSGVTWLAVSQPFFNTDTAYGRSFVNQSMSFAELEAQMASERIKAVFENKIRKGEVVTGSVPFGYKICDKKLIPNENAPIAKDIFKHHSIHNSIRLTVEYLFNEYDITRSSRTIKHMLRNRKYIGEVSGNKNYCPPIVDKETFEKVQNLLDKNISSIAKRTYIFSGLVVCSCCGKKMTGRYRKRKYIKKDGTVMYYTKKVYRCNGNTYKRNKCPNKINIAEEILEEYLLNNIKADAENFEAKQKKIAVSAPEKNNNSKILKKIERLKKAYLNEVISLDEYKKDRKELEQMMIQVKPKETIVFKSNWFNKNIESTYRDFDEEEKRFVWRSVLKNLIVDPHSKITINFLTKN

SEQ ID NO: 7383 - protein, 545 aa, synthetic construct
METRQTKRVALYIRVSTQEQALEGHSIQAQEQNGRQFAERMGYEVVEVYADEGISGKSTKNRFAYQRMMNDARNHRFDLLVIWKLTRLGRNMLDVLQTVEELLRYDVGLHSISEQFDVTTSTGKLMLQLLGSFGEFERNQIAENVQMSMQSLVKDKKRYAGGRRLGYVSGIDTNGQKQLVIEPEEAKIVRLIYAKYLGGAGYRAIANFLNRQGYQTVKKNAFSTTAVKDILRNKIYAGYLEYARYINWETKRRKGKNPKPILVKGTHEPIISEEDYQKVQERLALEGKQPKWNHTGENVLTGLLRCPECGAPMAASNVTNTLKDGTKKRIRYYSCSVFRNKGASVCHANSIRAEQAETFVADRLKEIIQLPEVLPRLVAALNEEIARQSQPLEQELVVLLERKEELKTKIEKWEVALEDSPELFPMLKDRLDELTEKRRQLHIRENEILGIFQQQGEPIQVKDVQRILTSLDRFLAQSEKKQVKALYRTFIEKITFDPKQKEILEITMKFTPAVVQQLNEQYQIAVSKTKDTAIFVLKTPFTLTI

SEQ ID NO: 7384 - protein, 457 aa, synthetic construct
MRVACYDRTSVYEEAKISNDAQYDAVKEYVLEKYEQIPQRFSDKGESGGKADRPAFRQLRAWVCASEEEGVIYVWRYDRLARQAKIALEFIELCQQHQVQVCSISEPLPASFSHTSTNKLFVQLLFTFAEQQRNVIIENVRAGLAYKKQQRQYLSSAVPYGYRLVNGKIQQEAHEAKVVRHIFQLYLTKKYGYKKLCQRLTQQKFFFRERPFQPYHIYSILKNPLYYGEIKGGSLGKYLGTFEPILSKTIFFQAQEIRQSRCTAKKDTYPYLLRQKIRCPFCGRHLSSKYQWNTKKTKTLHYYHCTDRSCQGIFLRAERVESEVLEKIQAFFQHEGVYQALIAQLTQQLAEKRKDEKHKVIQQKKQEAQWLKAFEEGNCSLEELKQQLQALQKPRSTSSFLSLQQCEAKVKEWLQLKDLSSRQLLCDHVCRIEVTKEKTVCGIYFRQLTQNILEGNE

SEQ ID NO: 7385 - protein, 545 aa, synthetic construct
METIQTKRVALYIRVSTQEQAIDGHSIQAQEQNGRQFAERMGYEVVEVYADEGISGKSIKNRFAYQRMMNDARNHRFDLLVIWKLTRLGRNMLDVLQTVEELLRYDVGLHSISEQFDVTTSTGKLMLQLLGSFGEFERNQIAENVQMSMQSLVKDKKRYAGGRRLGYVSGIDTNGQKQLVIEPEEAKIVRLIYAKYLGGAGYRAIANFLNRQGYQTVKKNAFSTTAVKDILCNKIYAGYLEYARYINWETKRRKGKNPKPILVKGTHEPIISEEDYQKVQERLALEGKQPKWNHTGENVLTGLLRCPECGAPMAASNVTNTLKDGTKKRIRYYSCSVFRNKGASVCHANSIRAEQAETFVADRLKEIVQLPEVLPRLVAALNEEIVRQSQPLEQELVVLLERKEELKTKIEKWEAALEDSPELFPMLKDRLDELTEKRRQLHIRENEILGIFQQQGEPIQVKDVQRILTSLDRFLAQSEKKQVKALYRTFIEKITFDPKQKEILEITMKFTPAVVQQLNEQYQIAVSKTKDTAIFVLKTPFTLTI

SEQ ID NO: 7386 - protein, 559 aa, synthetic construct
MKTKLYSYIRFSSMRQNDGSSYERQIRMAREVAAKYDLELVNDYQDLGVSAFKGANSKTGALSRFLDAIGRSVPVGSWLFIENLDRLSRADIVSAQELFLSIIRRGITIVTGMDNKIYSLDTVTANPMDLMFSILLFIRGNEESQTKRNRTNSSALIKIKSHQENPQNPAVAIEEVGKNMWWTDTTSGYVLPHPTYFPVVQEIVELRKNGRSTAEILDHLNETYTPPPAVSNKKHSKWSRAMVERLFHTRALIGIKEVSVDGVNYELKDYYPRVIDDATFYHLKKNIGARAWNFGDKEEAKPIPLLSGIGLLKCDHCGCAMVKVKGTNKRSDQYRYTCDATRSRRLDCEHPNWSFRGDQLEKAVLQLLADKIWIAEDKANPVPALKVQVDEISRKIDNLIALSAMTGATKELADQITTLNSERETLYNQIKMAEEEMYSVDSQGWEKLAEFDLEDVYNEERLKVRFKIKQALKRIGCSRIDRNKNLFVLEYIDGKTQRVVIENSRGTRKGQIFVDLKTINDRQILESNGLVLHPCLDMLTDKNWKPEEEIPGPLQEFGI

SEQ ID NO: 7387 - protein, 536 aa, synthetic construct
MKAAIYARFSSDKQTDRSIEDQVALCRAICEREELIVVGVYDDRAISGASTVNRLGWQRLMRDAKAGKFDVVVAEALDRISRDQEDLAGIHKRLRFADVDIRTAQDGIAGDIHIGVKGLLGSLYLKDLAQKTRRGQAGVVRDGRHNGGRSYGYRAIPGKPGELEIDVAEAAVVRQIFADYLAANSPRDIAAALNQKSVAGPRGGVWNASTIAGSRKRLNGILQNELYAGRIIWNRQTFVKDPETGKRISRENPREQWMSADAEHLRIVDADTWARVRARREERGGPKGTYATRPKNLLSGLIKCGCCGSGYVVGGNDKRGPLLLCTRMKETGLCENRRTVAREAIEALVLKGIEENLASPELIAEYVREYHRMSRELHSSTAHRRRDLEKRLGNVNGAISKAVDALLGEAPSRALRERLATLEAERDEIEAAIADVVPPAVEFHPNAANAYRDKIRNLKQALAESDEDSRLAASEAIREIVEKVVVHPRGRYKPVRVEIYGQLAALLRISERAAEPLESREALVAGIGFEPMTFRL

SEQ ID NO: 7388 - protein, 506 aa, synthetic construct
MRTVITYLRFSSATQGAEGADSTRRQNELFKQWLRKNSDAQVVASFSDEGLSGYKGKHLTGQFGDMLARIEAGEFPASTILLVESIDRIGRLEHLETEALMNRILGNGIEIHTLQDGLIYTKDALADDLGISIIQRVKAYIAHQESKQKSFRVSQKWEQRAKLALAGEQRLTKMVPGWIDPDTFKCNEHAETVRLIFKLLLSGESLHNIARHLQANNISSFSRRKDANGFSVHSVRTVLRSESVIGTLPASQRNDRPAIPNYYEAAIDAATFNKAQEILDKNRKGRTPASDNPLTINIFKGLFRCQCGASVHPTGTKNKYAGVYRCNNHLDGRCDVPPLKRKPFDKWMIDNFLGMIDVGNDGEAEGKIASLQHEVEIVTTRIKKATALLLEMDDITELKTQVKELNQKRTELQTTIDNMRRKASLTDKELPQLKDIDLTTKAGRVECQLILSKHLKGLTLGKDSVTVTLQNDTEIIVPTDPLPLNDGSPIFEIADKELLDIDAFRL

SEQ ID NO: 7389 - protein, 577 aa, synthetic construct
MQTDGYGLQRQQDAIRAYLEDFDVPKELGYEIDRDNYVLLEDAGKSAYHGYHFSKGQLGQFRQKVLDGEITCGLFIIENVDRFCRMEEYLAIQEFTNLINNGIDILEVDTGEIFSRKVRKSLNKLTVSIERAYAESERKSRISTRSWKNRKRKSLEEGIAINNNTPDWLSLSEDKQSYIVNKERVEILNEIFKMYAEGFGGTAIVNKLNKEKRYYNKTSWSTNKFYHLLRNRRLIGYLGDERHYPAVIDSILFEQVQSLLNGNVRKGKKAGTMIRSIFNGIAKCGFCSNGMICQTMTSSASYLRCIAERSKTTKCTHAKLIRYKESEQIILEHLCNINWGELKKGNSTHRDDIDVLKTQMSIITDKLQKLDLLIQETEDDDDKISLINIKNKNRKELAVIDEKVSALTTNLETPDLEVLASLKEIQDLDNVELRQKVYSLLSKTVSSIECTRTDTPDPFYTFIINYIGASEKHQLIVELKNNCKVTRFVEKISDDIVTYYTPSFVVAYSNNWESGLPEIRGLQDCDGITIKAELMDCMHLFSILDRTNRGEAKVIRDWLEIPKVQEFFFHTSAYEGE

SEQ ID NO: 7390 - protein, 597 aa, synthetic construct
MKRKLYSYQRWSSAVQSDGTTKARQTFAAEEYAKRNDLEVVEIVDAGISGFKSDNSKSGALSKFLAAVDEGLIPNNAYLFVESLDRITRDEIDVALELFMGILRRGITIVTGMDNKVYTRAGIKGNPIDLLTSILLFTRAHEESKTKQNRTNGNALAMIRRFQSGLPTTIKAVGSHPWWIDCSTDKFEAVRRHPTLWQPAQDAINMFMEGVSVFKVVQYLNEKYPHAYKSKAWKTANIRKLRFNKAVYGVREITVDGTDYALPNYFPSLITEGQFLRLEKIRETTKYIGKVGEGKTITDEEGNSKVIAERNNINLLAGMKLFRCGHCGGTMMAMRHGDTIRYLCEKGRGHQNDCKTWSLPGILVEHTLMLVTTIAYINMQRKGGVDKEDYTAQISSTEKLIEDISKKISNGTSLVLGGLGDVEEVIAQLQELKDSRSNLVLELEVLQRKQLLAEDHTFEGLMMDFFTYAQYGVLQDPIHEYRSKLRDIVYSSIGDVRAWKVDRRLMISFQIKGDDEYYTFSAGDEQYNYIFYYGSPVQLNEGLSPQGNYELPEEIKQRIREHRGVYEATMALMNTAHELLATVNYPQLDGRLFWPRK

SEQ ID NO: 7391 - protein, 540 aa, synthetic construct
MKTIAIYARKSLFTGKGDSIGAQVDTCKRFIDYKFANENYEIKIFKDEGWSGKTTDRPDFTNMVNLIQSKKIDYVITYKLDRVGRTARDLHNFLYELDNLGIVYLSATEPYDTTTSAGRFMISILAAMAQMERERLAERVKSGMMQIAKKGRWLGGQCPLGFDSKREIYIDDMGKERQMMKLTPNKEEIKIVKLIYDKYLEMGSMSQVRKYCLENSIRGKNGGDFSTNTLKQLLTSPIYVKSSDNIFKYLESQNINVFGTPNGNGMLTFNKTKEIRIERDKSEWIAAVGKHKGIIDDNKWLQIQQQLQQQSEKQIKSSGRQGTTSTGLLSGIIKCEKCGSNLLIKTGHKSKKNPGTTYSYYVCGKKDNSYGHKCDNKNVRTDEADSAVITQLKLYNKKLLIKNLKEALIKNEKADTDNIEILESKLKEKEKAVSNLVKKLSLVDDENISNIILNEITNINKEINDIKLQLSNETLKINEVTQATLDTEIYIKILENFNKKIDDITDPIEKRNLLKSALENVEWNGESGEFRINLIGSKKK

SEQ ID NO: 7392 - protein, 504 aa, synthetic construct
MRICMYLRKSRADEELEKTLGEGETLSKHRKALLKFAKEKNLNIVEIKEEIVSGESLFFRPKMLELLKEIENKQYSGVLVMDMQRLGRGNMQDQGIILETFKKSNTKIITPMKTYDLSNDFDEEYSEFEAFMSRKELKMINRRMQGGRVRSVEDGNYIATNAPYGYDIHWINKARTLKPNQKESEIVKLIFKLYIEGNGAGTIAKHLNSLGYKTKFGNSFNNSSIIFILKNPVYIGKITWKKKDIRKSKDPNKVKDTRTRDKSEWIIVDGKHDPIIDQITWKQAQEILNNRYHVPYKLVNGPANPLAGLIICTTCKSKMVMRKLRGTDRILCKNNKCNNISNRFDAVEKSVVESLENYLKAYKVNLPELNKTSNLKLYEQQISTLKKELKILNEQKLKLFDFLERGIYDEDTFLKRSKNLDERIEITNESLSNLNQIIAKENKAIKKEDIIKFEKVLDSYKSTADIRLKNELMKTLIFKIEYTKNKKGNDFKIKVFPKLKPLNI

SEQ ID NO: 7393 - protein, 553 aa, synthetic construct
MKKSAIYVRVSTNHQIDKDSLPLQKQDMINYSKYVLGIDNYEIFQDAGYSGKNTDRPDFQEMFKRIKEGEFSHLLVWKIDRISRNLLDFCSMYDDLKKYGCTFISKNEQFDTSSAMGEAMLKIILVFAELERKLTGERVTSVMLDRASKGLWNGAPIPLGYKWDKEIKFPVIDDEEKNTIELIFSEYKENKSTSYIRNLLNSNNIKTKRKGSWTTKTISDIIRNPFYKGTYRYNYREPARGKKKKENEWIVLESNHPYIIPTDLWEECNKIMDENAKRNNAKFRDNSKVHIFSGLVKCGECNNNLYAKQDKANQDGFRPSLYVCKSRYNGLGCTQKTISENIVGTFVLTLISNMINLSNINKKKLSLDLLENELLKGKCFDNVIGIKEIEDILASLLYAPKNLFTPQNKNEKSNNGAIGLNSLSSNLKKYERALEKLDDLYLFDEADMSKKDYFLKKQKIENNITEIRKKIDETAITDSSSHNYNFILNAATLEFSRKLISEKINMKSLIQDVGRDLIKEFVNILINKIIVKDRQIISLEFKNGLVTTFIYNS

SEQ ID NO: 7394 - protein, 545 aa, synthetic construct
MIAAIYSRKSKFTGKGESVENQIEMCKEYLKRNFNNIDDIEIYEDEGFSGKDTNRPKFKKMIKAAKNKKFNILICYRLDRISRNVADFSNTIEELQKYNIDFISIKEQFDTSTPMGRAMMNIAAVFAQLERETIAERIKDNMVELAKTGRWLGGTSPLGYKSEPIEYSNEDGKSKKMYKLTEVENEMNIVKLIYKLYLEKRGFSSVATYLCKNKYKGKNGGEFSRETARQIVINPVYCISDKTIFKWFKSKGATTYGTPDGIHGLMVYNKREGGKKDKPINEWIIAVGKHRGVISSDIWLKCQNLIQQNNAKSSPRSGTGEKFLLSGMVVCKECGSGMSSWSHFNKKTNFMERYYRCNLRNRASNRCSTKMLNAYKAEEYVANYLKELDINAIKKMYHSNKKNIIDYDAKYEVNKLNKSIEENKKIIQGIIKKIALFDDLDILGMLKNELERLKKENDEMKIKLKELKSILELEDEEEIFLSTMEENISNFKKFYDFVNITQKRILIKGLVESIVWDTGGEEKILEINLIGSNTKLPSGKVKRRE

SEQ ID NO: 7395 - protein, 540 aa, synthetic construct
MKAIAIYARKSLFTGKGDSIGAQVDTCKRFIDYKFANEDYEIRTFKDEGWSGKTTDRPDFTNMVNLIKSKKIDYVITYKLDRIGRTARDLHNFLYELDNLGIVYLSATEPYDTTTSAGRFMISILAAMAQMERERLAERVKSGMIQIAKKGRWLGGQCPLGFDSKREIYIDDMGKERQMMRLTPNKEEIKIVKLIYDKYLEMGSMSQVRKYCLENSIRGKNGGDFSTNTLKQLLTSPIYVKSSDNIFKYLESQNINVFGTPNGNGMLTFNKTKEIRIERDKSEWIAAVGKHKGIIDDNKWLQIQQQLQQQSEKQIKSSGRQGTTSTGLLSGIIKCSKCGNNLLIKTGHKSKKNPGTTYSYYVCGKKDNSYGHKCDNKNVRTDEADSAVITQLKLYNKELLIKNLKEALIQNEKTDTDNIEILESKLKEKEKAVSNLVKKLSLIDDESISNIILNEVTNINKEINDIKLQLSNETLKINEVTKATLDTEIYIKILENFNKKIDDITDPIEKMNLLKSALESVEWNGDSGEFKINLIGSKKK

SEQ ID NO: 7396 - protein, 540 aa, synthetic construct
MKTIAIYARKSLFTGKGDSIGAQVDTCKRFIDYKFANENYEIKIFKDEGWSGKTTDRPDFTNMVNLIQSKKIDYVITYKLDRVGRTARDLHNFLYELDNLGIVYLSATEPYDTTTSAGRFMISILAAMAQMERERLAERVKSGMIQIAKKGRWLGGQCPLGFDSKREIYIDDMGKERQMMKLTPNKEEIKIVKLIYDKYLEMGSMSQVRKYCLENNIRGKNGGDFSTNTLKQLLTSPIYVKSSDNIFKHLESQNINVFGTPNGNGMLTFNKTKEIRIERDKSEWIAAVGKHKGIIDDNKWLQIQQQLQQQSEKQIKSSGRQGTTSTGLLSGIIKCEKCGSNLLIKTGHKSKKNPRTTYSYYVCSKKDSSYGNRCSNKNVRTDEADSAVITQLKLYNKELLIKNLKKALVQNKKADTDNIEILESKLKEKEKAVSNLVKKLSLVDDENISNIILNEVTNINKEINDIKLQLSNETLKINEVTQATLDTEIYIKILENFNKKIDDITDPIEKRNLLKSALESVEWNGDSGEFKINLIGSKKK

SEQ ID NO: 7397 - protein, 483 aa, synthetic construct
MRTALYIRVSTEEQAKEGYSIRAQTERLKAYCLSQGWEIVDFYIDDGQSAKDMERTNLKRMIQHIEQGLIECVLVYKLDRLTRSVLDLYKLLEIFDAHGCKFKSATEVYDTTTAMGRMFITIVAALAQWERENLSERVRMGMEQKAREGQWVINMAPFGYELDKKNKSLIINDKEAAIVTRIFNMYLSGKGMKKIATELNAVNIPTKTGNTWSDNKIGYILKNPTYIGTIRYNYRVHNDQYFEVENAVPAIIDRVTFEKVQSVATARKKVHPKAATSEFIFSGTIKCAKCGAPFSGKYGYSKRGEKIHRPRSYYCSKQILGLCTQRNISERFIEHHFLKYLQDIEIDQDQIKNVEPTNEQKDIQEQIMLLEKDLRAIEQRRKKWQYAWVNNMIDDDDFAARMEEENQTEVKTQEELNNIQPVTNAMDPVEFKTILKDIRTNWNSLTAIEKKMMLQMLVKKIVVDKISPKPKVDSVEIIEIEFN

SEQ ID NO: 7398 - protein, 559 aa, synthetic construct
MKIAIYSRKSIFTGKGESIENQIELCKEYCTLHYKDENIEYTIYEDEGFSGKNLNRPKFKELINEIKKNKYDVLICYRLDRISRNVADFSSTLELLQKYNTNFVSIKEQFDTSTPMGRAMIYIASVFAQLERETIAERVRDNMLQLAKMGKWSGGQLPLGFKSEKITYINDEMKEKSYVKLVPIDEELKTIKFIYNNYLLKGSILNVVKELNELGYKTKTGTNFELTGVKRILKSSLYVKSNELTHEYLKSKDYNVYGKANGNGYLTYNKKTDINNIIIAVAAHKGIISAIDWITAQKKLDINREKAKIISNRSGTGKNDSLFSGLLKCGKCGANMVIKYNSKNKNGENYIYYVCSNKHRKFNENKCYFPNFRTDIVDEKIINQLKIYNRNIIIKIYNDKLDDLTENSNKEIINELKKQINDKKTQINNIVMELSLASEESVKTILRDNMNSVAKEIEKLNLKINNTNLIETDINKTILEIKHLIKSFKDFDEMFDSTNDIDIKRNLLKNIIQEIKIDLLNKNFDVKFFNIDSMQLDSASKPLDCNLYPSKRRRNCRFT

SEQ ID NO: 7399 - protein, 521 aa, synthetic construct
MNKSITFIPARKRIGNTVKMEDKPKLRVAAYCRVSTDSDEQATSYEAQIEHYANFIQKNEKWQLSGVFADDGISGTNTKKRDEFNRMIEECMVGNIDMIITKSISRFSRNTLDCLKYIRLLKEKNISVYFEKENINSLDSKGEILLTIMASLAQQESESLSKNVKLGLQFRYQNGEVQVNHNRFMGYTKDDEGHLIIEPAEAEVVKRIYLEYLQGASLKQIGESLESDGILTAAGKEKWRPETIKKILKNEKYIGDALLQKTYTVDVLTKKRVKNNGIVPQYYIENNHEAIIPRDLYMQVQEEMLRRANLHSGADRKKRVYSSKYALSSIVYCPKCGDIYRRIAWNNRGKRSFVWRCVTRVEHGPERCDAPTVGETELQEAVIKAINMALGGKDDMLVALEQNIASVLALEDENSIESINVKLEELQKELLKRANAKKDYNDLADEIDRLRELKQNAMAENAEREGLKQRIAEMQEFLAQQMDQIEEYDESLVRRMVEKVTVYEEKFSVEFKSGTSVEVER

SEQ ID NO: 7400 - protein, 519 aa, synthetic construct
MKKITKIIDTKVLSVKKKIRVAAYCRVSTASDEQLISLDAQKVHYENYIKANDEWKYAGLYFDEGVTGTKKEVRSGLLSLIADCEKGMIDLVITKSISRFCRNTTDCLEIVRKLLDLNVYINFEKENLNTGSMESELMLSILSSLAESESVSISENEKWSIKKRFQNGTYIISYPPYGYANINGEMVIVPEQAEVVKQIFTNTLAGKSTHTIAKELNELGVKSKKGSKWTSGTINAIIRNEKYTGDVIFQKTYTDSSFNRHTNYGEQDQYLCTSHHEAIISHEVFNKANEAMSQRGKEKGNGENTQRYQNRYGFSGKIRCGECGSVFKRRIHNKPSGKYVAWCCTHHIEDKDACSMKYITDDSIKVAFLTMMNKLIFAHQLVLRPLFRSMKGLDDKDRLLQIQEYETKLENNMEQRQVLTSLMASGILEPALFNSENNTLIQEKEMLETEKNKLVHSVSGDRTKFDALEKLIKYVSRSEMLKEYEDEIFLAHVDKITVVSREKIIFLLKCGLELRERMA

SEQ ID NO: 7401 - protein, 553 aa, synthetic construct
MKKSAIYVRVSTNHQIDKDSLPLQKQDMINYSKYVLGIDNYEIFQDAGYSGKNTDRPDFQEMFKRIKEGEFSHLLVWKIDRISRNLLDFCSMYDDLKKYGCTFISKNEQFDTSSAMGEAMLKIILVFAELERKLTGERVTSVMLDRASKGLWNGAPIPLGYKWDKEIKFPVIDDEEKNTIELIFSEYKENKSTSYIRNLLNSNNIKTKRKGSWTTKTISDIIRNPFYKGTYRYNYREPARGKKKKENEWIVLESNHPYIIPTDLWEECNKIMDENAKRNNAKFRDNSKVHIFSGLVKCGECNNNLYAKQDKANQDGFRPSLYVCKSRYNGLGCTQKTISENIVGTFVLTLISNMINLSNINKKKLSLDLLEHELLKGKCFDNVIGIKEIEDILASLLYAPKNLFTPQNKNEKSNNGAIGLNSLSSNLKKYERALEKLDDLYLFDEADMSKKDYFLKKQKIENNITEIRKKIDETAITDSSYHNYNFILNAATLEFSRKLISEKINMKSLIQDVGRDLIKEFVNILINKIIVKDRQIISLEFKNGLVTTFIYNS

SEQ ID NO: 7402 - protein, 540 aa, synthetic construct
MKTIAIYARKSLFTGKGDSIGAQVDTCKRFIDYKFANEDYEIRTFKDEGWSGKTTDRPDFTNMVNLIKSKKIDYVITYKLDRIGRTARDLHNFLYELDNLGIVYLSATEPYDTTTSAGRFMISILAAMAQMERERLAERVKSGMIQIAKKGRWLGGQCPLGFDSKREIYIDDMGKERQMMKLTPNKEEIKIVKLIYDKYLEMGSMNQVRKYCLENSLRGKNGGDFSTNTLKQLLTSPIYVKSSDNIFKYLESQNINVFGIPNGNGMLTFNKTKEIRIERDKSEWIAAVGKHKGIIDDNKWLQIQQQLQQQSEKQIKSSGRQGTTSTGLLSGIIKCAKCGSNLLIKTGHKSKKNPGTTYSYYVCGKKDNSYGHKCDNKNVRTDEADSAVITQLKLYNKELLIKNLKEALIKNEKADTDNIEILESKLKEKEKAVSNLVKKLSLVDDENVSNIILSEVTNINKEINDIKLQLSNETLKINEVTKATLDTEIYIKILENFNKKIDDITDPIEKRNLLKSALESVEWNGDSGEFKINLIGSKKK

SEQ ID NO: 7403 - protein, 531 aa, synthetic construct
MTTTNVRRKRVTAIPATKTPGHNATAQGVQRRRRVAAYARVSTEAEEQASSYEAQIDYYTRHIQSRSEWEFAGMYADEGITGTTTKHRTGFKTMIADALAGRIDLILTKSVSRFARNTVDTLTHVRQLKDAGVEVYFEKENIWTLDSKGELLITIMSSLAQEESRSISENVTWGHRKRFADGKIMVPYASLLGYKKGEDGNLAIDETEAPIVRRIYARFLQGATPQTIAAELTADQIPTPRGKTVWPPSTVRSILANEKYKGDALLQKSFTTDFLTKTMKINEGEVPQYYVTGNHEAIINPATWDAVQAELARRAGKGTSSTHPFANKIKCSDCGGWFGRKVWHSTSKYRRHIWRCNNKYNKTHCCATPHVTEDKIKNAFVAALTERVTDNNALDDTMRLLDETVYNTRELETQQAELGERIEETITLMNQLITTAASTAHDPDDYDRRYHELENRHQQLENEHQHITSQIDDLRNRRAQAIKVRDYLATQPPLAYSDQAWNTLVDHATITPDGTIKLTLKDGTTVSPMGS

SEQ ID NO: 7404 - protein, 417 aa, synthetic construct
MHVGEMRVIPAKPARPQRLKIAAYARVSTEHERQLSSIAAQVSYYSRLIQSTPGWDYAGVFIDEGITGTSTKHRDGFNDLMDTARAGGIDVILTKSISRLARNTVDLLDTVRELKALGVAVRFEREQIDTATADGELLLTLLASFAQEESRSTSKNVKWGIRKKYADGAMHSRQPYGYQYINGDLVILEAEAVIVRRVFTQFLEGVSPEATAAQLNTEGIKPRRGAKFHGQTIRKWLENETYTGDAILQKYYRPGVADTNTQPNTGQLPRYLVDESHPPIIDRVTFDAVQQELARRRRLGRAATPTGGTNAFTSRIQCQTCGKNYQRRTRKLRHSTYKFWWCETATKGKGNPCQAPQIRETRLIQMCCQVLGFEDWDDDAALTSLAKIVVNPDRTLTIHTTHDRPAATVSLDEGSAK

SEQ ID NO: 7405 - protein, 529 aa, synthetic construct
MRKVYSYMRFSRPEQAKGTSIERQSNFAEQYALEHGLELDKSLTMMDKGLSAFHGVHKTKGAFGQFLAAVTAGKVPSGSVLVVESLDRLSREDPLIAQAALTDLILSGITVVTAADNQVYSREEIQQNPFKLIMSLVVMIRANEESETKQRRSNAFLKSALNQYQANGKIRRLGSDPSWLDFNKDNDTYSFNERVEVIRRILNLYNQGIGSLKIARQLTEESIPTLSGKRSAWGQTTVANIVKSHALYGMKRINVQGVEYDLEDFYPALITKSKWLTLQQHRTKRSKSMHGRGEVVHLITGHGKGFTTCGYCGGGLGAQTQKQYKRSGEYSRTVTRLHCLTHKETSSCCSSVFLEPIESAVLFAACIGVEPQSLIPTVNNVNYSALIDEVENKVKHIVEQVTAGAPWELFKDAHDKLKLEKQKLIKERDSQKPDVNQSDVQKWVNKLVKLADKARVNDKEARLKCRTLINSICKSIVIKLRGHDLKSEPVVTITFVTDEQFEFKVGKNGAVQFVDNGMAVNRRLKPLLA

SEQ ID NO: 7406 - protein, 529 aa, synthetic construct
MRKVYSYMRFSRPEQAKGTSIERQSNFAEQYAIEHGLELDKSLTMMDKGLSAFHGVHKTKGAFGQFLAAVTAGKVPSGSVLVVESLDRLSREDPLIAQAALTDLILSGITVVTAADNQVYSREEIQQNPFKLIMSLVVMIRANEESETKQRRSNAFLKSALNQYQANGKIRRLGSDPSWLDFNKDNDTYSFNERVEVIRRILNLYNQGIGSLKIARQLTEENIPTLSGKRSAWGQTTVANIVKSHALYGMKRINVQGVEYDLEDFYPALITTSKWLALQQHRTKRSKSMHGRGEVVHLITGHGKGFTTCGYCGGGLGAQTQKQYKRSGEYSRTVTRLHCLTHKETSSCCSSVFLEPIESAVLFAACIGVEPQSLVPTVNNVNYSALIDEVENKVKHIVEQVTAGAPWDLFKDAHDKLKLEKKKLIKERDSQKPDVNQSDVQKWVNKLVELADKARANDKEARLKCRTLINSICKSIVIKLRGHDLKSEPVVTITFVTDEQFEFKVGKNGAVQFVDNGMTVNRRLKPLLA

SEQ ID NO: 7407 - protein, 522 aa, synthetic construct
MNHSKRKVAIYIRVSTEEQANEGFSLGAQEDCLKQYANAKGYEVYDIYVDDGYSGKDYNRPEIQRLFKDLYQEKFTGILVKSVDRISRRVSDVTKLIDDVLAPRKCCVLVSDNNLDSSTTGGTAFIQLLATFAEYERSMIVQRVKSGMSKRAELGYWNGGRVLGYDVKNKELKINKEEAEIVRKVFDLRVEGKGYKSIAVILNQQGFKTKRGRLFSIGTIKTILENPLYIGYCRWGRHKNWNVERRKGKTDEYKFVKGKHEPIVSEDLWKRVQSVNYAHKKSISKNRNFNGEFVLSGILRCPSCGAGMVMCKTKKRDKSGYHLYYMCQAFHSKGKLACKSNLIRKEDIEEKVLQCINKIILIPSIVDKTFERIQEKKENGIKRIKNDLSYINEELKRKKQFIKKLNKDYFDEKIRVETYTELSEPLREEMVELEREKSKLDRKIESSEIPITKEMVIKALENFTNLYENATYEQKKSLLRAIIKKIEVQPNRKEIKGITYWFDCDNGQDDALLVSKEGRTVS

SEQ ID NO: 7408 - protein, 529 aa, synthetic construct
MNKKVKAGIYIRVSTEEQKQGHSLEAQESMLKEFADRKGYEIYDVYNDGGYSGKNFNRPEIQRLLRDLKDDKIDVILVWKVDRLSRNNTDVMSLIDTELTPRKKNLIITSIDMDSSSPTGHMFISLLSTFARYERATIIDRVKAGMQKRAEKGYWNGGLILGYDSVDKKLIINENESEIVREIFQLRAEGKGYKFIVNILNDKGIKTKTGKNFSIPAIKVIVNNYIYNGKMVWKKHQDWNTRRRTGKSEPIIVEGIHDAIIDEGLWTRVQKVNELQKNSFSSNRNFNGNFLLTGILKCPKCGAGTVMSKTKKRNSDDYHLYYMCQAYHNKGSSVCSANLIRKDQVEQQVLNIISLLVNENDIINALIDELNSDNNKTNESHIAHIKMLKKQLGKAYDKRKKLDNDYFEGNIEGSTYNRLMNELQLDINKLKRNVRESESEIIKNDSTINKEEVIYALGNFNKLFKIVNDEEKKLLIRSLIREVQMEANRKDVKEITFWFLPSSVLPSNKVRRTVSQVIVKRKWEIEICY

SEQ ID NO: 7409 - protein, 490 aa, synthetic construct
MKNIAIYIRKSVKGDDNSISLEAQTEVIKHYFKNENKFTIYKDDGFSGGNTNRPAFQKLMHDATQNKFEAVACYKLDRIARNTLDFLTTFNTLKEYGIDLICVEDKYDPSTPAGRLMMTLLASLAEMERENIKQRVTDSMLNLARSGRWTGGTPPFGYKVITIDGGKYLELEDKNNILYIFDEFINGKGILKLSNEFNCDKKKISRILHNITYLKSSTEANTYLKQTLKYEIVGTPNGCGYLPYGKNKVINGKKIKNVEGLKIAAVSKHKAIIELETFIKAQEKLKTFEGRKAPRISNKSFLAQMVQCTCGSNMLIVLGHKKKDGTRKLYFSCPSKCGNTFGDVKEIEEDTLLTLKDVNFFEKINKNKPTINNKDSSRIKASLLKELENKKKLLDGLVQKLALVDSDLANILIDKMETLNENIKELQSKIDLLEKEEISLSYNKEDLNLKEKNRKHFIKEFENMNMQEKQTSIRKVINKITWTGENIIIS

SEQ ID NO: 7410 - protein, 597 aa, synthetic construct
MTSLDETPDISLPPLPLSGVDEAVLYLRVSDKKQMNTDADYDPEGNSIPTQRRFTNTKAGDLGVQVIREYVEPGRSATSTAKRPEFQRMMREVKNFKRQGRPIKYVIVYTMSRVFRNALEELTTKAQLAQLDITLISAKENFGEGYMGEAMQAIMAVFNQLQVQISGDDISTKMENKARNGGTPGKAPLGYLNTRALIDGREVRVVRLDPERAPLIRLAFELYATNDYTLADLQDELYDRGLRTRATQRFPSQAVSISKLSRILRDRYYIGYVTYKGEEYAGRHEPLVDVELFDRVQAIADSRSAAEERRRKHHHYLKGSLLCGDCRRTRGVDSRMIIQKSTNRHGTEYTYFFCIANQTSRCHTPHVNVARLEEAVEAHYATVGFTPAFIEEVRGHLEQSIAEQQEATRLLHDQLRKQLQEVDVAEDNLLALAGDAEINRDKVREQLRNLQARRRRLNSRLEHTEEDLSGAARLVEVALRLLENPRALYLRCDEEQRRMLNQAIFHALYVEEDKVTGQDLKPPFDGLHALQDGRTRLVTTEGTDTPPSSSEAPSDGGEGFLALSSVDELLESLALGKGSSKPSKVGAKGLEPLTYCL

SEQ ID NO: 7411 - protein, 486 aa, synthetic construct
MAKDYAVYARISTDKDEQISSIENQIDICRNWLERSGYEWDDNCIYKDEGISGTLFLERPAIQLILEKARKKEINMVVFKSISRLARDLKDSLEIREVLQGHHVRIISVEEGYDSEKAGKNDMAFELWSLFAAQYSRTLSAGVSAALAAKVRRGEHIGKTPYGYDKEDGKLLINPDEAKTISQIFEWYNQGWGYKRIVKELNSMGISPKSARVWQITSIHRIIHNPLYCGDFVMNQYSNVKIGGHKKQVRNPEEQWIIFRNHHPEIVDRATWEKANNKVEKAERTKITPWNEFRGLAKCAVCGSNMVIVQSWKKKKDGSRSSWQYLKCSQYRRAAQDGCVNHAPIRYGEFRALIINQLQQEGKDLHLNFSSDFEKRRSEDLAVLQKQLQQQKTKKSGLLDLYLEQLIEKNEFEEKRREIDHAINNLEDRIYLLENQHSAESSIRSAKEAFKALDNQEQDLYTAFRNLIKQIVICENGTVDLDLTFR

SEQ ID NO: 7412 - protein, 490 aa, synthetic construct
MRLSVLTDETTSPVRQELDLYRFSVERGSRVVGVARDLGVSATKVPPWERPQLGEWIGNKQPEFDEILFWKLDRFVRRISDLHLMISWCKEYGKTLAAKMDPIDLSTEMGQFLVTIIAGMARIEAANTGVRIESLWNFSRTATRWVIGKPVYGYTTEKVSDNERKLVIDPIKSRVLHWVYRMLKRDYSLYRICRILNRTDFLPPNKGEWSSGNLKRILINPALMGYRVYRGKKHAKQDPPNISYDTEGKPIILADPIFTPEEFNEIQDILKGRSLNKRKPMNKRTRFLDILKCGRCGMNWYNVQSTWFRKDGSKTVVHKLRCSSHKHGQSCGISQIRPPEKAYQLVMDTAFDELGDYEVVHREYATGHDNLQKKVDLEKRITHYMEELEPGGMYGSPGFMRDNAMETLKALNAQLSQIDPETTQDRWVYVSRGVTYREHWEKYGVDQMEEDLRRGGITFVIHDDYAELNVPEDIKERLVHREDFFANKRV

SEQ ID NO: 7413 - protein, 504 aa, synthetic construct
MRAVIYTRVSTREQAENSSLASQERDCQAYAQRHGWHVVQVYQDAGKSGRNADRPAFMQLRADAARKPRCFDVVLVWKLDRCARNTSLQLRVVDEFHALGIQLISITEPIEMDTAAGRFNLTMLGAGAELYSRLTGERVARARRAAAESGKLPGPVPTGYQRNEHGVLVPSADAEHQRMLFTLYATGLYSFSTIADAMNQRGARVWNTQQGRYVPYTKDNVASMLRNQIYIGKVSYKGQNYVGQHEALIDQKTWDAVQALLDRRGQKRGWTPVSQGRGLLSEILYCEQCGSRMWQHYKRTTNVVYYECSQRRYNQCPMAMVRNDVIDQHMIAVLDALAFPSDWKRDILRVAQQQWAARQQPEPEAPNIEAELAALKRLFLNDHIRADEYEQRKSALLAQAQAPRQKPAASFNMEQALDLLESISWTFKQKGALAEKRVALQSLIAAVWGTKKGIVAYQPREPFLELVASLQQSRLVSRVGIEPTTSGLKVRCSTTELPAQRVRV

SEQ ID NO: 7414 - protein, 567 aa, synthetic construct
MKTAHYIRYSSDQQTRGASLQSQLDALRRASDQHGETVTKLYIDQAESGTTTRRSEYQQMLADAAAGFFQRIRCESLDRSHRDVMAWKQFEHDMQRLGVDIVFNDESPGMTDDSRSFMRDIKAALAADEIRRTSQRTYARQKTRIERGHRYGGAAPYGLAFDGTGYKPNPDTYPILLWILEQRGLGMGYLRITRLLNTAQTPYGRPDTPGMLQWIAKPTQERVDPTTGAIIDVVKPQPTNIWNMSTIRHICRQAIDGIYAGQLQWGREHNRTNKVSDGQAKTVLKVALPSGPLIPTDLIERVRVAEFAIPNYALNARGIFLMKLHCGECGLLIHGNTSGTHRKGKRYYYRIYACNGRGAYAGQCTMPRVRAYRLEGAVVKAVVQYATAQHAAFDQQLTAAADRTRATLVHGIEALERQRAVVQAEFTSLTQRVLHHALTASLVQAINAQAEALEAKLATMDDQRTTLTRAIETLDEQARSLRAAFFDGMLTTRILAQLDDPTVIERLRNPITKLVKHAELRRVDGELRVALTMRTVAFCENEQDTDKGSWLLLAQSLPGMPRCLRRD

SEQ ID NO: 7415 - protein, 539 aa, synthetic construct
MAKIGARVYSYLRFSDPRQGAGGSADRQLLYAQRWAADKGLELDESLSMRDEGLSAYHQRHVTQGALGVFLRAIEDGRIASGSVLVVEGLDRLSRAEPIQAQAQLAQIINAGITVVTASDGKEYNRAGLKAQPMDLVYSLLVMIRAHEESDTKSKRVKASILRLCQAWQSGTYRGLIRNGKDPQWLRWTGCAWEMIPERVLAVRRALALYQEGMGAARATKILHAEGLDYSASGISKQQIYRLIKLQALRGAKCLSVDGEDFILEDYYPRLLSESEWADLQHLAGQRLRRRGHGEIPGIITGIGLTYCGYCGTALVGQNMMTRQRADGTIADGHRRLHCVSYGVNGGCTAGGSCSVVPVERALLTFCSDQLNLQRLLKVGDDGQGIRQQLAVARSTAEKLSVQLGRITAALLADDSGAAPTAFIRRARELEAEQADAHKKVQQLEYELATVSGSGKPAQAERWVELADLVRSGDYSAREKVRQLVMDTFERIVVFMRGMSAEDRSGKFIDVQLLSRTGQQRLLQINRKTGAWVASEDWD

SEQ ID NO: 7416 - protein, 586 aa, synthetic construct
MPKIWPYIRFSSEEQKRGDSLRRQKELIARFSARPEIVAEGAQIDESLNLNDLGVSGYTGKNLLKGRFKAFLDAVDSGVVKAGDYLAVEALNRITRLNPLESLPIILRLVQEKGVRIAITSSSQIYQRGDDISALYIAIGELQRGYKESQEKGMRVKEAWNSKKRRAADFGEIATSRVPLWLSVDSIKLESGGIKRVIKEIDTRVAVVKEIFRLSDSNIGAVATARILTERGVPTFTRENARKNSNYGDFWQVTYVRKILANRAVLGNYQPMQWLEVGGKRTRVKHGSEIEGYFPQIIARELFDRVQIKKDARKIEGQGNKGLRFSNLFTKIAFCSACGAVAHHVNKGKDTKKGGRYLVCYRAKYGSCSYKSWKYEKVEAMILSYLAEADIKSIMRDEDKVELLVNERYKVESEQVAIGEMLDNFKRDFKELKGRVSNVERELAIENEARLADIKSQLHALDARILEAIEQQKADLKNEVRALQELDGVADENKVFEIRSKINARLKLIVESIILNFDLQVAEVRFKSGIVRHVHERGVFANILPPATPEQSAEDMREIEEWASLSNEEKKAKWANDEFKIVPLKI

SEQ ID NO: 7417 - protein, 546 aa, synthetic construct
MPKVSVIPAKPMQVIKGLPKGTKKRVCAYCRVSTDTEEQLTSYETQVTYYENYIKSKPEYEFAGIFADEGITATNTKRRNEFKRMIDAGLAGQFDMIITKSISRFARNTLDCLKYVRLLKDKGIGVYFEKENIDTLDSKGEVLLTILSSLAQDESRNISENSRWGIVRRFQQGKIRVNHTRFLGYDKDENGELIINEEQAKVVRRIYNEFLSGKGIRSIGKGLQKDNILTGAGGRKWYDSTVQKILRNEKYSGDALLQKTITTDFLTHKRVKNKGEVQQYYVEDSHPAIIPKEIFQRVREEIKRRASLAGYSEKTKSRYSNKYAFSGKIICGNCGSKCTRKRWGPGEKYRKYVWLCANHIDNGVKACSMKAVSEEKLKAAFVRSINKIIENKETFLKTMMDNINRVLESETNSDDVRAVNERLEELKEQMMNLVRLDVRKGLDHEIYDEEYGRLEEEIKQLKAKKQRFDNVEVIRKNGIEKVKEIENILRGRQNTIKEFDEELFGQMVKEVKVVSLVEVDICYKNGAVVKGYGGSWSLWSRYKKYY

SEQ ID NO: 7418 - protein, 587 aa, synthetic construct
MADVQVIKANTSRVNRKNAKVIERLRVAAYCRVSTDSEEQLSSYNSQVEHYRNMVENKLDWALVDIYADEAISGTQTDKRLDFQRMINDAVDGKIDLIITKSISRFARNTLDTLKYVRLLKEHNVAILFEKENINTLTMNGEMLLVILSSLAQQESESISANVKMGLKMKMKRGEMVGFNGCLGYDYDPINKVITINEEEAKTVRYIFQRYVEGAGCFVIAKELTKLKYKTKKGSTNWNDGSVRGIIKNEKYKGDLLLGKTFTVDPISHRRLDNMGEEEKYYINSHHEAIISEEMFNEAQKILNKRSSGSSNMGRKEKYSRQFAFSSKIECGFCGGTATRRRWHSNTSHEKTIWHCVVSTKKGKKYCPDSKGIDEKIIENAFLEAFNMFCLQNKEIVEEFMETVENTINATNSIKELKKLQREVSSIENKIRKLVDMRIDEMIDKDTYELKYTELSTELEKLKAQRDEAELVNEDNIDVKKRIESFRKVFDSNKPIREFDRVVFESAVNKIILGGTDEEGNKDPYMLTFIFNSGMSHSLKGKDVVKFNGDSKDEKVCSYTEHDTRGDGSKARKKTQLETLIKLSLES

SEQ ID NO: 7419 - protein, 507 aa, synthetic construct
MKRVISYIRFSSERQAKGDSLRRQSKMVNDWLKAHPEYYLDQDLSFRDLGVSGFTGKHLKGGLGDFLTAIEKGLVKAGDTLLIESLDRLSRQDVGQASELLRNILRSGVDVVTLSDGEHYTRESLKDPLALIKSILIMQRSHEESLRKSERIQAAWDAKKEAAKAGIKVSKRCPAWLKLNDDRKSFSVIPEKVETVKRCFQLRLEGKSIWEIVRTLNDEGHQTLNQYKAGKFGQTSVQDLLKNRSVIGYFTPKGCEEIAGYFPPIIPETDFYKVQQLSYSRYGRKPASDKPLSVNLFKGVIRCSECGHALIITGFSDTRSGIYRCPSRNENRCNAKGLSRKQTDGTLLALLSRIDRFDSDMTNTIDTLKLHREHISSNIEKLVQLSLEIEDLSAITSKLKQLKGELSQVDADIEKETQRLKSIDVGCLSDCDLTTKAGRIEAQLIIKSAVKEVVLNTAKRRCKVTFHNGKVIDLPITETPSEDVTEAIQSLSEVTERGLIDVDEVII

SEQ ID NO: 7420 - protein, 506 aa, synthetic construct
MRSVITYLRFSSATQGAEGADSTRRQNELFKQWLRKNSDAQVVASFNDEGLSGYKGKHLSGQFGDMLSRIESGEFSEGTILLVEAIDRIGRLEHLETEALMNRILGNGIEIHTLQDGLIYTKDALADDLGISIIQRVKAYIAHQESKQKSFRVSQKWGQRAKLALAGKQRLTKMVPGWIDPETFEVNEHAETVRLIFKLLLDGESLHNIARHLQANNISSFSRRKDANGFSVHSVRTILRSETTIGTLPASQRNDRPAIPNYYEAAIDAATFNKAQEILDKNRKGRTPASDNPLTINIFKGLFRCQCGASVHPTGTKNKYQGVYRCNNHLDGRCDVPPLKRKPFDRWMIDNFLGMIDVGNDGESERKIAALQHEVEIVTARIKKATALLLEMDDITELKTQVKGLNQKRTELQTTIDNMRRKASLTDKELPQLKDIDLTTKAGRVECQLILSKHLKGLTLGKDSVTVTLQNDTEITIPTNPLPLNDGTSIFEIAEKELLEIDAYQL

SEQ ID NO: 7421 - protein, 544 aa, synthetic construct
MDNLTLFKQFAPKAPKKFQEGNNAVIYTRVSSSDQEDNTSLASQKKHCDLYAQRRNLNVVGYFGGTYESAKTDDRKEFNQLLKFVKRSKNINYIIVYSYERFSRSGINGASIAEELLKKYGVITLAITQELDPTTPSGSFQQKIFFLFGQMDNELRRDKTVTGMKELLLKGYWVWAVPRGYEDLNKGKATERKLVVNEEGKLLKKAFEWKAYSQLPNVEIVRRLKKMGINLSEKRLNDLFSNPFYCGLITSKMIPDQVIQGNHEAMISKELFLKVHNIRKEKRIHGFVHNKDNDNLPLKIFTKCEKCGKGMTGYLVKNKNLYYYKCRTKGCKVNRSAKAMHELFNKALASFKIEKEELEIIKVQLEEQMGVFFKSKTENEKILKTNLNTLKKKLENIEERFVIGEIDRQLYDKYSSKYKKEYFEIEQEVEKTSGYSSNLKKVINFVTKTSTNVLPLWESSTLENKKVFQQMLFPDGIFYNHELDQVRTTRVNSFFSLIPEMTSNIGNKKSGNFIQFDKKSALVSPEGFEPSTASLEGRCSIQLS

SEQ ID NO: 7422 - protein, 605 aa, synthetic construct
MLAIYTRLSIEDDENNSIENQINEGTHYAVNNGFKDNFKIYNEGEGVKGSTTIKKRPKLSLLIEDIKKGDISIIYVRYQSRISRKLKILGEFLEIIEEYNINLFVGDKGLIDMNLPSNKLMIQFFGAIDEFTPNNQSYQTKKTQRLKAEQGYVWGVIPYGYQADSITKKAIINEEESSVIKRIFKLSKEGYGCEKIAKTLNADGVETKMKKMVTNQYSNKEYKDEKKYFSKSQNKIVKVDRTTSIWLSKTIYDMLKNTWYIGQRKWGGVVYPVPPIISKELFNEVNNKLTNSNHKKGKSVNYRFLLKGIIFCEKCGRAYNGNRKYNNKNHNKTSKYSANYYQCASKRLMKHNCDNFGINITNLESFIICHLFKNKELLSHLENLEKKDTALIENKEELNRLTEQIIEQENIRDNVEKSLFVEGINDTTRTRFIKKLNNVEEHVKGLNTKIEHARLRINEIENDRLLNITNQINSYNKNWEFQEYKEAVNNIIDRIIVLGERNEKTFNNKKYHLIQVKYKGYDDYSVFLSKKPHTKWIWLNSVRKMTEEEINEEIAMQEELIKYETGKEIKVTKKEIENIYDGKLLVNENINKIIQLKTEDIIDFD

SEQ ID NO: 7423 - protein, 646 aa, synthetic construct
MLRPICYERVSSFDQVVTGAGLDDQRSIIEQYLDDNADKFTRDRIYITDEGVSAFKNANISPESNLGKFLQDVRNRKYGKGDALIVTSLDRLSRRSSWTENTIQFIVVSGIVIYDISTGLVLRDDDSFSKILMEIILQRSHNESLMKSVRAKVAWQNKVMRAAANGEVVSNRMPFWLENIDNKYSVIEEQAALVVQCFEWYKAGFSTGEIVKRIGDPKWQMVKVSRLIRDRRLLGEHKRYNDEVISNVYPKIIDDELFITANRMMDTVMADKKKPAEDLLLEPDVVKQIFELSESGLGSGAIVKRLPVGWSTVNVLRVLRDKKVVEQKIIDNLTFERVNEKLTKSGVANRIRKDVTIAQNDYITNLFPRILKCGFCGGNIAIHYNHVRAKYVICRTREEKKRCDAKSIQYTRIEKNILNTVMQVDFSKLMNDGAADNNDGLETLKLELLALKSQEKQYLEKITKRKDEGKKTSMPLMEGLTDVQDSIDELQDRINSYSHKKEIPIFDYDIDAVLDPMNVELRAKVRKELKLVLSRVSYWVFDKLIFVDLKYFTDVLSHALLIDNKRGGGELLQEIAITQQGKERTYRVQEKGNTVFKVVSDGDVWTLEASRSKTIDELYSFMRLLEGREPETFESGINEDQIDWID

SEQ ID NO: 7424 - protein, 507 aa, synthetic construct
MKRVISYIRFSSERQAKGDSLRRQSKMVNDWLKVHPEYYLDQDLSFRDLGVSGFTGKHLKGGLGDFLTAIEKGLVKAGDTLLIESLDRLSRQDVDQASELLRNILRSGVDVVTLSDGEHYTRESLKDPLALIKSILIMQRSHEESLRKSERIQAAWNRKKELISEGIKISKRCPAWLKLNDDRKSFSVIPEKVETVKRCFQLRLEGKSIWEIVRTLNDEGHQTLNQYKAGSFGQTSVQDLLKNRSVIGYFTPKGCEEIADYYPAIIDETTFYKVQQLSYARYGRKPASDKPMAVNLFKGVIRCSECGHALIITGFSDTRNGIYRCPLRNENRCSAKGLSRKQTDGTLLTLLSRLDRFDSDTTNTIDTLKLHREHISSNIEKLVQLSLEIEDLSAITSKLKQLKNELSQVDADIEKETQRLKSIDVGCLSDCDLTTKAGRIEAQLIIKSAVKEVVLNTAKRRCKVTFHNGKVIDLPITEDPSENVTEAIQSLSEVTERGLIDVDEVII

SEQ ID NO: 7425 - protein, 547 aa, synthetic construct
MKLLVTYIRWSTKEQDSGDSLRRQTNLIDAFYSKHKEEYYLLPAHRYVDKGKSGFHQQHKAQGSDFRRMFENVMSGAIPEGSLIVVENFDRFSRADIDTAIDDVRQILRKGVSILTLGDGELYDKSALTDPVKLIKHIIIAERAHQESLVKQKRIAQVWNHKTQLARELKKPMGKQAPGWLELSEDGSHYIVDEDKASLVNIIYDKRLSGMSMFAICKWLNEQGYPTINQRKVRISKTKKPDGNWSALSVKHILTSRSVLGYLPAKISTEDRKTVLREEIESFYPQIVTDSKFYAVQQLLEETGKGKTSSGDHWLYVNILKGLIRCKCGLVMTPTGIRKPVYQGTYRCNGNKESRCSYGTVSRKLLDTQLCSRLFSKLSQLHDEATDTAKLDELQRRLNTVDSELEKLTETLIQLPNITQIQEALRVKQEEKDELIVQLSREKARVKSVSSLDLSGLDMESVEGRTEAQIIIKRLVKEIVVSGNEKLVDIHLHNGNMIRGFPLDGKDDHTLTLEEATDEMQSLDDMLIFGEPVTRIYPAGDMEEVDA

SEQ ID NO: 7426 - protein, 507 aa, synthetic construct
MKRVISYIRFSSEKQAKGDSLRRQSKMVTDWLKAHPEYYLDQDLSFRDLGVSGFTGKHLKGGLGDFLTAIEKGLVKAGDTLLIESLDRLSRQDVDQASELLRNILRSGVDVVTLSDGEHYTRESLRDPLALIKSILIMQRSHEESLRKSERIQAAWNRKKELISEGIKISKRCPAWLKLNDDRKSFSVIPDKVETVKRCFQLRLEGKSIWEIVRTMNAEGHQTLHQHKPGSFGQSSVQDLLKNRSVIGYFTPKGCEEISSYYPSVIDETTFYKVQQLSHSRYGRKPVSDKPLSVNLFKGVIRCSECGHALIITGFSDTRSGIYRCPLRNENRCSAKGLSRKQTDGTLLTLLSRLDRFDSDTTNVIDMLRLHREHISSNIEKLVQLSLEIEDLSAITNKLKQLKNELSQVDADIEKETQRLKSIDVGCLSDCDLTTKAGRIEAQLIIKSAVKEVVLNTAKRRCKVTFHNGRAITLPITENPSEDVTEAIQSLSEVTERGLLDVDEVII

SEQ ID NO: 7427 - protein, 506 aa, synthetic construct
MRTVITYLRFSSATQGAEGADSTRRQNELFKQWLRKNSDAQVVASFSDEGLSGYKGKHLTGQFGDMLARIESGEFSEGTVLLVEAIDRIGRLEHLETEALMNRIIAHGIEIHTLQDGLIYTRDALSDDLGISIIQRVKSYVAHQESKQKSFRVSQKWKQRAKLALAGEQRLTKMVPGWIDPDTFKCNEHAETVRLIFKLLLDGESLHNIARHLQSNDIKSFSRRKDANGFSVHSVRTILRSETTIGTLPASQRNDRPAIPNYYEAAIDAATFNKAQEILDKNRKGRTPASDNPLTINIFKGLFRCQCGASVHPTGTKNKYAGVYRCNNNPDGRCDVPPLKRKPFDKWMIDNFLGMIDVGNDGEAEGKIASLQHEVEIVTARIKKATALLLEMDDIDELKIQLKELNQKRTELQTTIDNMKRKTSLSDKGLPQLKDIDLMTKAGRVECQLILSKHLKGLTLGKDSVTVTLQNDTEITIPTDPLPLNDGTSIFEIADKELLDIDAYRL

SEQ ID NO: 7428 - protein, 507 aa, synthetic construct
MKRVISYIRFSSEKQSRGDSLRRQSKMVTDWLKAHPEYYLDQDLSFRDLGVSGFTGKHLKGGLGDFLTAIEKGLVKAGDTLLIESLDRLSRQDIDIASELLRNILRSGVDVVTLSDGEHYTRESLRDPLALIKSILIMQRAHEESLRKSERIQAAWNRKKELISEGIKVSRRCPAWLRLNDDRKSFSVIPEKVETVKRCFQLRLEGKSIWEIVRTLNDEGHQSMSQYKPGKFGQTSVQDLLKNRSVIGYFTPKGCEEISGYYPAIIDETTFYKVQQLSYARYGRKPASDKPLSVNLFKGVIRCSECGHALIITGFSDTRNGIYRCPLRNENRCSAKGLSRKQTDGTLLALLSRLDRFDSDMTNTVDTLKLHREHISSNIEKLVQLSLEIEDLSAITSKLKQLKGELSQVDADIEKETQRLKSIDVGCLSDCDLTTKAGRIEAQLIIKSAVKEVVLNTAKRRCKVTFHNGKVIGLSITETPSEDVTEAIQSLSEVTERGLIDVDEVII

SEQ ID NO: 7429 - protein, 506 aa, synthetic construct
MRTVITYLRFSSATQGAEGADSTRRQNELFKQWLRKNSDAQVVASFSDEGLSGYKGKHLTGQFGDMLARIEAGEFPAGTILLVESIDRIGRLEHLETEALMNRILGNGIEIHTLQDGLIYTKDALADDLGISIIQRVKAYIAHQESKQKSFRVSQKWEQRAKLALAGEQRLTKMVPGWIDPDTFKCNEHAETVRLIFKLLLSGESLHNIARHLQSNGIKSFSRRKDANGFSVHSVRTILRSETTIGTLPASQRNDRPAIPNYYEAAIDAATFNKAQEILDKNRKGRTPASDNPLTINIFKGLFRCQCGASVHPTGTKNKYAGVYRCNNHLDGRCDVPPLKRKPFDKWMLENFLGMIDVGNDGEAEGKIASLQYEVEIVTTRIKKATALLLEMDDIDELKIQLKELNQRRTELQTTIDNMRRKASLTDKELPQLKDIDLTTKAGRVECQLILSKHLKGLTLGKDSVIVTLQNDTEITIPTNPLPLNDGTSIFEIAEKELLEIDAYQL

SEQ ID NO: 7430 - protein, 506 aa, synthetic construct
MRSVITYLRFSSAIQGAEGADSTRRQNDLFKQWLKKNSDAQVVASFSDEGLSGYKGKHLTGQFGDMLARIEAGEFPASTILLVESIDRIGRLEHLETEALMNRILGNGIEIHTLQDGLIYTKDALADDLGISIIQRVKAYIAHQESKQKSFRVSQKWEQRAKLALAGEQRLTKMVPGWIDPDTFKCNEHAETVRLIFKLLLDGESLHNIARHLQANNISSFSRRKDANGFSVHSVRTILRSETTIGTLPASQRNDRPAIPNYYESAIDAATFNKAQEILGKNRIGRTPASDNPLTINIFKGLFRCQCGASVHPTGTKNKYQGVYRCNNHLDGRCDVPPLKRKPFDKWMIDNFLGMIDVGNDGEAEGKIASLQHEVEIVTTRIKKATALLLEMDDIDELKIQLKELNQKRTELQTTIDNMRRKASLTDKELPQLKDIDLTTKAGRVECQLILSKHLKGLTLGKDSVTVTLQNDTEITIPTNPLPLNDGTSIFEIADKELLEIDAYQL

SEQ ID NO: 7431 - protein, 559 aa, synthetic construct
MKTKLYSYIRFSSMRQNDGSSYERQIRMAREVAAKYDLELVNDYQDLGVSAFKGANSKTGALSRFLDAIGRSVPVGSWLFIENLDRLSRADIVSAQELFLSIIRRGITIVTGMDNKIYSLDTVTANPMDLMFSILLFIRGNEESQTKRNRTNSSALIKIKAHQENPQNPAVAIEEVGKNMWWTDTTSGYVLPHPVFFPIVQEVVELRKNGRSTAEILDHLNETYTPPPAVSNKKHSKWSRAMVERLFHTRALIGIKEISVDGVNYELNNYYPRVIDDPTFYHLKKNIGARAWNFGDKEEVKPIPLLSGIGLLKCDHCGCAMVKVKGTNKRSDQYRYTCDAIRSRRLDCEHPNWSFRGDQLEKAVLQLLADKIWIAEDKANPVPALKVQIDEISRKIDNLITLSAMTGATKELADQITTLNSERETLYNQIKMAEEEMYSVDSQGWEKLAEFDLEDVYNEERLKVRFKIKQALKRIGCSRIDRNKNLFVLEYIDGKTQRVVIENSRGTRKGRIFVDLKTINDRQILESNGLVLHPCLDMLTDKNWKPEEEIPGPLQEFGI

SEQ ID NO: 7432 - protein, 506 aa, synthetic construct
MRHVITYLRYSSATQGAEGADSTRRQNELFKQWLRKNSDAQVVASFNDEGLSGYKGKHLSGQFGDMLSRIESGEFSKGTILLVEAIDRIGRLEHLETEALMNRIIAHGIEIHTLQDGLIYTRDALSDDLGISIIQRVKSYLAHQESKQKSFRVSQKWKQRAKLALAGEQRLTRNVPGWIDPETFKLNEHAETVRLIFKLLLDGESLHNIARHLQSNGIRSFSRRKDANGFSVHSVRTILRSETTIGTLPASQRNDRPAIPNYYEAAIDASTFNKAQEILDKNRKGRTPASDNPLTINIFKGLFRCQCGASVHPTGTKNKYQGVYRCNNHLDGRCDVPPLKRKPFDKWMIDNFLGMIDVGNDGEAEGKIAALQHEVEIVTARIKKATALLLEMDDIDELKIQLKELNQKRTELQTTIDNMRRKASLTDKELPQLKDIDLTTKAGRVECQLILSKHLKGLTLGKDSVIVTLQNDTEITIPTDPLPLNDGTSIFEIAEKNLLNIDTFQL

SEQ ID NO: 7433 - protein, 509 aa, synthetic construct
MRRAISYIRFSSERQLKGDSVRRQSKLVTDWLDKNPEFYLDSSLSFKDLGKSAFSGKHLKGGLGDFLTAIEKGLVKAGDTLLIESLDRLSRQDIDIASELLRRILRAGVDVVTLSDGEHYTKESLKDPLSLIKSILIMQRAHEESLRKSERVQAAWNRKKELISEGIKVSRRCPAWLRLNDDRRTFTIIPDKVEVVKRAFDLRLQGLSFWAITRTLNDEGHLSLNQYTPKQKGWSDTAVKKLLRNRAVIGCFTPAGREEVQGYYPAIISESLFYRVQQLNTGQYGRASVSSNPLSVNLFRGIIKCSECGATIVLGGYALKRFGMYRCPNRSANRCSAKAISRKQTDATILYMLALCDRFETENTDTIDSLRLQREDLQRKISKMAELAIELDDMTIITEKLRDMKNALSKLNHDIEEETQRIKAITTGSLKDIDRTTKEGMIETQLLIKGVLKEIVIDAAKRRCKVTFHNGKSITLPITENPSEDVTEAIQSLSEVTERGLIDVDEVII

SEQ ID NO: 7434 - protein, 507 aa, synthetic construct
MKRVISYIRFSSEKQAKGDSLRRQSKMVTDWLKAHPEYYLDQDLSFRDLGVSGFTGKHLKGGLGDFLTAIEKGLVKAGDTLLIESLDRLSRQAVDRASELLRNILRSGVDVVTLSDGEHYTSESLKDPLALIKSILIMQRAHEESLRKSERIQAAWNRKKELISEGIKVSRRCPAWLRLNDDRKSFSVIPDKVETVKRCFQLRLEGKSIWEIVRTLNAEGHRSMNQYKPGKFGQTSVQDLLKNRSVIGYFTPKGCEEIAGYYPAIIDETTFYKVQQLSHSRYGKRSVSDKPLSVNLFKGVIRCSECGHALIITGFSDTRNGIYRCPLRNENRCSAKGLSRKQTDGTLLTLLSRLDRFDSDTTNTIDMLRLHREHISSNIEKLVQLSLEIEDLSAITIKLKQLKGELSQVDADIEKETQRLKSIDVGCLSDCDLTTKAGRIEAQLIIKSAVKEVVLNTAKRRCKVTFHNSKSITLSITENPSEDVTEAIQSLSEVTERGLIDVDEVII

SEQ ID NO: 7435 - protein, 547 aa, synthetic construct
MKLLVTYIRWSTREQDSGDSLRRQTNLIDAFYSKHKNDYYLLPAHRYVDKGKSGFHQQHKNQGSDFRRMFENVMSGAIPEGSLIVVENFDRFSRADIDTAIDDVRQILRKGVSILTLGDGELYDKSALTDPVKLIKHIIIAERAYQESLVKQKRIAQVWNHKTQLARELKKPMGKQAPGWLELSEDGSHYIVDEDKASLVNIIYDKRLSGMSMFAICKWLNEQGYPTINQRKVRISKTKKPDGNWSALSVKHILTSRSVLGYLPAKISTEDRKTVLREEIEGFYPQIVTDSKFYAVQQLLEETGKGKTSSGDHWLYVNILKGLIRCKCGLVMTPTGIRKPVYQGTYRCNGNKESRCSYGTVSRKLLDTQLCSRLFSKLSQLHDEATDTAKLDELQRRLNTVDSELEKLTETLIQLPNITQIQEALRVKQGEKDELIVQLSREKARVKSVSSLNLSGLDMESVEGRTEAQIIIKRLVKEIVVSGNEKLVDIYLHNGNMIRGFPLDGKDDHTLTLEEATDEMQSLDDMLIFGEPVTRIYPAGDMEEVDA

SEQ ID NO: 7436 - protein, 507 aa, synthetic construct
MKRAISYIRFSSEKQSRGDSLRRQAKMVTDWLKAHPEYYLDESLTFRDLGVSGFTGKHLQGGLGDFLTAIEKGLVKAGDTLLIESLDRLSRQDVDQASELLRNILRSGVDVVTLSDGAHYTKESLKDPLALIKSILIMQRAHEESLRKSERIQAAWDVKKEAAKAGIKISKRCPAWLKLNDDRKTFSVIPEKVETVRRCFQLRLEGKSIWEIVRTLNDEGHQTLNQYKAGKFGQTSVQDLLKNRSVIGYFTPKGCEEIAGYYPAIIDETTFYKVQQLSHSRYGRKPASDKPLSVNLFKGVIRCSECGHALIITGFSDTRSGIYRCPLRNESRCNAKGLSRKQTDGTLLALLSRIDRFDSDMTNTIDTLKLHREHISNNIEKLVQLSLEIEDLSAITSKLKQLKGELSQVDADIEKETQRLKSIDVGCLSDCDLTTKAGRIEAQLIIRSAVKEVVLNTAKRRCKVTFHNGKAITLPITENPSEDVTDAIQSLSEVTERGLIDVDEVII

SEQ ID NO: 7437 - protein, 506 aa, synthetic construct
MRTVITYLRFSSAIQGAEGADSTRRQNDLFKQWLKKNSDAQVVASFSDEGLSGYKGKHLTGQFGDMLARIESGEFPEGTILLVEAIDRIGRLEHLETEALMNRIIAHGIEIHTLQDGLIYTRDALSDDLGISIIQRVKSYVAHQESKQKSFRVSQKWKQRAKLALAGEQRLTKMVPGWIDPDTFKCNEHAETVRLIFKLLLDGESLHNIARHLQANNISSFSRRKDANGFSVHSVRTILRSETTRGTLPASQRNDRPAIPNYYEAAIDAATFNKAQEILDKNRKGRTPASDNPLTINIFKGLFRCQCGASVHPTGTKNKYQGVYRCNNHLDGRCDVPPLKRKPFDKWMIDNFLGMIDVGNDGESERKIAALQHEVEIVTARIKKATALLLEMDDITELKAQVKGLNQKRTEIQTTIDTLKRKTSLTDKELPQLKDIDMTTKAGRVECQLILSKHLKGLTLGKDSVTVTLQNDTEITIPTNPLPLNDGSPIFEIADKELLDIDAYQL

SEQ ID NO: 7438 - protein, 507 aa, synthetic construct
MKRVISYIRFSSEKQSRGDSLRRQSKMVNDWLKAHPEYYLDQDLSFRDLGVSGFTGKHLKGGLGDFLTAIEKGLVKAGDTLLIESLDRLSRQAVDQASELLRNILRSGVDIVTLSDGEHYTRESLRDPLALIKSILIMQRAHEESLRKSERIQAAWNRKKELISEGIKISKRCPAWLKLNDDRKSFSVIPDKVETVKRCFQLRLEGKSIWEIVRTLNAEGHRSMNQYKAGKFGQTSVQDLLKNRSVIGYFTPKGCEEIAGYYPSVIDETTFYKVQQLSHSRYGRKPASDKPLSVNLFKGVIRCSECGHALIITGFSDTRSGIYRCPSRNENRCNAKGLSRKQTDGTLLTLLSRLDRFDSDTTNVIDMLRLHREHISSNIEKLVQLSLEIEDLSAITIKLKQLKGELSQVDADIEKETQRLKSIDVGCLSDCDLTTKAGRIEAQLIIKSAVKEVVLNTAKRRCKVTFHNSKSITLPITENPSEDVTEAIQSLSEATERGLIDVDVVEI

SEQ ID NO: 7439 - protein, 547 aa, synthetic construct
MKLLVPYIRWSTKEQDSGDSLRRQTNLIDAFYSKHKNDYYLLPAHRYVDKGKSGFHQQHKAQGSDFRRMFENVMSGAIPEGSLIVVENFDRFSRADIDTAIDDVRQILRKGVSILTLGDGELYDKSALTDPVKLIKHIIIAERAHQESLVKQKRIAQVWNHKTQLARELKKPMGKQAPGWLELSEDGSHYIVDEDKASLVNIIYDKRLSGMSMFAICKWLNEQGYPTINQRKVRISKTKKPDGNWSALSVKHILTSRSVLGYLPAKISSEDRKTVLREEIEGFYPQIVTDSKFYAVQQLLEETGKGKTSSGEHWLYVNILKGLIRCKCGLVMTPTGIRKPVYQGTYRCNGNKESRCSYGTVSRKLLDTQLCSRLFSKLSQLHDEATDTAKLDELQRRLNTVDGELEKLTETLIQLPNITQIQEALRVKQEEKDELIVQLSREKARVKSVSSLDLSGLDMESVEGRTEAQIIIKRLVKEIVVSGNEKLVDIYLHNGNMIRGFPLDGKDDHTLTLEEATDEMQSLDDMLIFGEPVTRIYPAGDMEEVDA

SEQ ID NO: 7440 - protein, 523 aa, synthetic construct
MAKTVRVIPASPKIFRSEVTAEPRRRRTAGYARVSTDHEEQASSYEMQMAHYKNYIESRADWDFVGMYSDEGISGTNTKKRDGFNQMIEDALAGKIDLIITKSVSRFARNTVDSLQNVRKLKENGVEIYFEKENIWTFDTRGELLITIMSSLAQEESRSISENTTWGKRKQFAEGKTSVGYSAFLGYDKDFEINEEQAKIVRLIYKLFLGGRSFYAITKELETRCIKSPSGKDKWYISTVRSILTNEKYRGDALIQKEYTADFLDKTRRKNTGEIPQYYVEEHHEAIIPPDLFDFVQLEIKRREQNGKHSGVSIFANKIKCGCCGGYYGAKVWHSTDKYRRVIYRCNKKYAHKGKPCSTRHLTEEEIKQIFVKALNSLMEVKENVIAELRALIDSVCQTGELVEEHGRVEQELTLLTERLEKLIRENARVAQDQTTYLKQENEIRALYLEKQGALEKLDKQIAERESKRNILEGMIQVVCGINGEQVAFDEELWGGLLDHIVVKEDGAVVVVFKGGIETAIEG

SEQ ID NO: 7441 - protein, 497 aa, synthetic construct
MKIRRVQPSPILQKKLRVAAYARVSVDTLHHSLAAQVSYYSNRIQNNPAWEYAGVYADEGITGTSTTHRTEFKRLIADCNAGKIDLVLVKSISRFARDTVDCLHTVRCLKEKGIAVRFERENIDSTSEDGELLLTLLASFAQEESRSIGDNIRWGVRRRFAEGIPNGHKAPYGYTWDGEMFRIIPAESEIVKEIFRRYLTGESAYAIAKTLAGRGITGRQGRPIEQTTVKDILSNISYTGTMALQKNYISEGHIRKRNKGELPMYLVEGMFEQLVSKVDFDKAQEIRKRRAAQSSNRNPVLMPFSGVVKCGCCGGGFSRRTAGKYRRWGCNTRERKGRESCDSRPIKEEELVAAVRAVMEKNNFDATELRRKVSKIVIHADCVEFHLTNGRIKKTARIYSGQRGSNPFTNKVYCASCGSKCERDTWTKGTKVWSCSQPRTKCRLKRLPESELKEAAESFFGDGYEGKIVQNVKRIVISDDEVIFQLKEGGAYRWQRQ

SEQ ID NO: 7442 - protein, 529 aa, synthetic construct
MSTARSVTVIPPIVSKFTSGTTRAITLKRVAAYARVSTDNDEQLSSYEAQVDYYTRQIKSNPTWDFVNVYSDEGISATSTKKREGFNRMITDALKGKIDLIITKSVSRFARNTVDTLTTVRKLKEKGVEVYFEKENIYTLDSKGELLITIMSSLAQEESRSISENVTWGQRKRFADGKVSLPYKQFLGYEKGEDGLPKIVEKEAKVVRLIYKLFLEGKTPSGIARYLTENKIPTPAGKEVWQPTTVKSILQNEKYKGDAILQKSFTVDFLTKKKKKNEGEIPQYYVENSHPAIISSEVFDLAQQEMKKRKKVKGYKTSGSCFSSKIVCGECGSFYGSKVWHSNSKYRRAIWQCNSKFKNHKKCNTPHLYEDKIKQVFVEVFNSLIENKEEILKDYEDIIQALTDTSELDKERVKLQNELEIVTEMLKKCVEENAHTVLNQEEYEEKYKVLAERYESINNEIEGIDEKRLERSAKKENITVFIKEFEQRKDLITEFDEGLWKSTIEKIVVNKEDKITFIFKDGMEIEWDI

SEQ ID NO: 7443 - protein, 413 aa, synthetic construct
MSRKIIKIQPLVVKVPNKKRVAAYARVSTGKEAMIHSLSAQVSYYSEFIQKNRGWKYAGVYADEALTGTKDTRPEFQRLLKDCKSGKIDMVITKSISRLARNTVTMLEVVRELKELNVDIYFEKENTHSLSGDGELMLTILASFAQEESRSVSENCKWRIRNNFKDGIPNTFQVYGYTIHKGKIEINPKEAEVVTIIFNAYLEGMGRLAIAKKLNSMGIRTKNNKLWDSSKIKEILNNEKYAGDLLLQKKYIEDHLEKKTCLNDGTLPQYYVSSNHDAIIDRDIFNKVQEEIQKRKEKYKGGRITTNKYPFTSIIRCCECDKCYQRKINNAGTKYQKEVWICATYNSFGKEKCSSKQIPENILISIATEVLGLKQFDEGIFKNKIKEIQVLKEKLVMFVFYDGTKVKKEWSYK

SEQ ID NO: 7444 - protein, 499 aa, synthetic construct
MNIAIYTRKSVYIENSESIDTQINLCKSYFSNIKCNFEIFEDEGFSGKNTNRPAFTRMMKLCKLGKFDIVAVYKIDRIARNIIDFVNIYDSLEKDKIKLVSITEGFDPSTPGGKIQMILLASLADMERMNIAQRVKDNMLQLAKKGYWTGGPAPKGYEIIKDANIGKSYLQLEDKNLILNLFNWYLNNQSLYKVMQLMKENYPPNKVYSIRENIRSFLRNPLYAQSDPSVSEYLKLKGYTIVGTENKKGYLTYGKTNGTPMAIVSKHKAVITPSLFLKVNRILDEKREGYFNKNSKTYWLSGIMKCPFCNSYYILCNSGRRSYYVCSNRLKRTSTGLDISSEKCINNKYVNAEIIETKVESYVNALKDIDKDEFLKMHNECNASFNISLDLEKQIKDNEKLIDNLVEKLMILSNEASKPVTKKLEEITEFNSMLKIKLENEKLKNLELESSKFNIENVFDTICNFSNIKDNNQKRIALRNVFKFIIYNPFDDSLEVEFL

SEQ ID NO: 7445 - protein, 491 aa, synthetic construct
MRDEGLSAYHQRHVTQGALGVFLRAIEDGRIASGSVLVVEGLDRLSRAEPIQAQAQLAQIINAGITVVTASDGKEYNRAGLKAQPMDLVYSLLVMIRAHEESDTKSKRVKASILRLCQAWQSGTYRGLIRNGKDPQWLRWTGSAWEMIPERVLAVRRALALYQEGMGAARATKILHAEGLDYSASGISKQQIYRLIKLQALRGAKCLSVDGEDFILEDYYPRLLSESEWADLQHLAGQRLRRRGHGEIPGIITGIGLTYCGYCGTALVGQNMMTRQRADGTIADGHRRLHCVSYGVNGGCTAGGSCSVVPVERALLTFCSDQLNLQRLLKVGDDGQGIRQQLAVARSTAEKLSVQLGRITDALLADDSGTAPTAFIRRARELEAEQAEAHKKVQQLEYELATVSGSGKPAQAERWVELAELVRSGDYSAREKVRQLVMDTFERIVVFMRGMSAEDRAGRFIDVQLLSRTGQQRLLQINRKTGAWVASEDWD

SEQ ID NO: 7446 - protein, 508 aa, synthetic construct
MIAKWLLDHQDYELSKLNYSDLGKSGFHGEHVKEGGNFGKLLKAVMDGYIKRDDVVLVEAIDRTGRLPALQMLSDVIAPILRAGVSIITLDDNTTYTEASVGGPHLFMLVAKIQAAHEYSRTLSRRVEDSYKKRRKDAKEKGVAPKRMTPVWLNSDGTVREDVAPWIKTAFELYVSGVGKSTIAKRLRESGVERLAKASGPGVEGWLRNKAVIGKWETLIGTPEHHVIDDVYPLIIEPSLFYKAQVHAEKMKTQRPIKTAKHFLVGLVHCGECGKNYIMQNLHGKPHSMRCRTRQSQNNCSNSYVVPKAVLDAIYRYTSVTAALEAVQLQQLGVNEKEIVTREAELLTITKRVEGFVQAVNEAGPMPELLVALKQARIERESAENALVILRATVVTPPANQWREMGKVWSLEAEDAQRLAAMLRQVGYNITVGEGAIIKSSHSDVVYQYLGVDRVKDMYRVLANGEMKLIHKSQVDDYPYYEPFQGVVGEATMDEADKENLLLQYQGS

SEQ ID NO: 7447 - protein, 541 aa, synthetic construct
MKKTIAIYARKSLFTGKGDSIGAQVDTCKRFIDYKFANEDYEIRTFKDEGWSGKTTDRPDFTNMVNLIKSKKIDYVITYKLDRIGRTARDLHNFLYELDNLGIVYLSATEPYDTTTSAGRFMISILAAMAQMERERLAERVKSGMIQIAKKGRWLGGQCPLGFDSKREIYIDDMGKERQMMKLIPNKEEIKIVKLVYDKYLEIGSMSQVRKYCLENSIRGKNGGDFSTNTLKQLLTSPIYVKSSDNIFKYLESQNINVFGTPNGNGMLTFNKTKEIRIERDKSEWIAAVGKHKGIIDDNKWLQIQQQLQQQSEKQIKSSGRQGTTSTGLLSGIIKCSKCGSNLLIKTGHKSKKNPGTTYSYYVCGKKDNSYGHKCDNKNVRTDEADSAVITQLKLYNKELLIKNLKRALVQNKKADTDNIEILESKLKEKEKAVSNLVKKLSLVDDENISNIILNEVTNINKEANDIKLQLSNETLKINEVTKATLDTEIYIKILENFNKKIDDITDPIEKRNLLKSALESVEWNGNSGEFKINLIGSKKK

SEQ ID NO: 7448 - protein, 520 aa, synthetic construct
MAGISKTRPSKAVIYCRVSGAKQVREGDGLASQENRCREYATYKDYDVVEVFQDDMSGKFERRPAMDRMLAFLRLHPKDSVVVIIDDISRFARNVQAHIKLRETLADAGGILESPSIEFGEDSDSRLVEHMLASVAQHQREKNAEQTSNRMKGRMMNGYSVFSAPVGYKYKKTGSHGKLLTCDEPIASIVKEALEGYASGRFSGQADIKRFLEAQPEFPKDLPNGQIRQQKVTDMLNRVIYAGYIEHEPWGITRRKGHHEALISLETYETIQARRNSKGVAAKRPDISEDFPLRGAVVCACCDKPMTANWSRSATGKRYPYFNCQTRDCSEYRKSIRAEKIDTGFEAILRSLKPSKQILDIAMSMLKDAWDQRGEQAKQAKAEIKRQHKELDKQQDALVERMVETSNPKVMAALENKIAKLEEDKILLTDKLSQNTKPKSTLGEIIELLRAYLANPWNIYENGTLEVRKTILKTAFASPLAYDRKNGYRTPQVSVIFEFFEKITSKCEMVPPHGLEPRTY

SEQ ID NO: 7449 - protein, 512 aa, synthetic construct
MILAAAYCRFSSDNQREESIDAQIRAIKEYAKHNDIEITKIYIDEAKSATTDDRPQFLKMVEDSKLRTFNAVIVHKLDRFSRNRYDSAVYKKRLKDNGVTLISVLEHLDGSPESIILESLLEGMAEYYSKNLAREVMKGMKETALQCKHTGGSPPLGYDVNPDKTYVINETEAQIVKLIFKMYVNGCSYTKIINKLNIEGYRTKKGKPFGKNSIYSILTNEKYSGTYVFNRSSKKINGKRNNNKSKSDDEIIRIKGGMPRIISDEVWNTVKNKMIVNKRKSASYSAKEIYLLSGIIFCGNCGGAMVGNRRYAGRNKTLYCAYECSTRKRNHTCNAKSINKEFVEDAVINQLIHDLFTPKAMDNIIDKILNYAGTQSTQIKSDIKQFENELNSIQLQIDNIVNAIANGMFHPSMKEKMDNLEFRKSKISMELEEAKRQEKTNLPSRELIKAYIQKDADIKEKSPGEQKHIIQTYVKKVIVYEDTIETNTIVDLKSCPSPPPYIMTVLESSTVF

SEQ ID NO: 7450 - protein, 514 aa, synthetic construct
MLRVAIYSRKSVETDTGESIKNQIAICKQYFKRQNEECKFEIFEDEGFSGSNINRPSFQRMMELAKIRQFDVIAVYKIDRIARNIVDFVNVYDELDKLNIKLISITEGFDPSTPVGKMMMMLLASFAEMERMNIAQRVKDNMKELAKMGHWSGGTPPKGYKANRIKENSKKITHLELIEDDAKDIKEIFEQYALGLSMYKISKSFKAKGKNYPNKTISNILINPTYLKATNESVKYLESQGYTVYGEPNNCGFLPYNRRPKSNGKKTWNNIDKFVSISIHKPIIDLELWVRVQEKLKEKTIAPHPHESSYSFLSGGLIRCKCGGHMLLKPGAPRKKVPQKYYFVCANKWNGIGCPSKHLRVDYAEDDFLSFLEKFLDKNYLKEYLNQSNDIKGIDQEIKSINKKIKSNDILINNLIDKLALMSNDASKLLMKKIEDLTQNNNSLKEYLLKSQREKLLNDLNKNNIDVIYDTIKKILNTSNNDLRRIYIKNLVKEIIYDYDTNSLNIIISKLGVI

SEQ ID NO: 7451 - protein, 540 aa, synthetic construct
MIAAVYSRKSKFTCKGESIESQVQICKEYAKNNLKISSFIIYEDEGFSGGNTNRPRFQELLKDARKEKFNFLICYRLDRISRNVADFSTTLELLQKHNISFVSVKEQFDTSTPMGKAMVYIASVFAQLERETIAERVRDNMLELAKSGRWLGGQTPLGFNSKKVTYYNSEMKQKFMHKLSPIQKELDKVKLIYGKYMEFGSISLVLKYLLTNNIKGKNGGDFSSMSINDTLRNPVYVKSNDLVFKYLKDLGITTCGIPNGNGIITYNKRNSKYITRSTSEWIAAVAKHKGIIESTTWLEVQFQLDKNKRKSSPRQGTSKKSLLSGILKCALCGSPMRVSYGRSKKSENKRTYYYVCTMKAHSGKTRCVNPNANGPKIEKAIAENIKKLNINKLLKELQYRKNESTSSIKNNFVEMLKREIEDKSTQMNTLLQQLSNINADDSPASEFILNKIENLAKTIKDLNLKLDKSKNIEEENVDLDIIEKALENFNSSFALIKNVSIKRHILENIIDKIYWNGNTGDIDVYLWGSEKVHKFHPSIP

SEQ ID NO: 7452 - protein, 554 aa, synthetic construct
MAPIIKFIHGVIIVKKTLRAVAYPRYSSDNQREESIDAQMQAIQEYCDRKGYTLVGSYPDEARSATTDNRPNFQRMIADSEKDLFDVVLVHKLDRFARDRYDSAYYKRQLRKNGVRLESVLEHLDNSPESIILESVLEGMAEYYSKNLARESRKGMLQNASKAIHAGGRPPYGYRINPETLKLEVDAQAAKAVLIYFQGVAEGRSTTAIADTLNELGYRTQTGRRFTRNSFDGWARNKKYIGIYTWDIKSSKDEDGRRNNHRYKPEEEQIQVPGAVPAIIPVELFEKVNELMETRKLKPGRLKAKQVYLLAGKIVCGQCGMLYRGESYRNSKSSQGTILKFYKCGGRCGNTNLRKSTIEESIIQNLVANVFSEDAIKNIVVKVKELYQKERESDGLDLQPIRNELNEINRKLENWVDALGEGDVVKDLISQRIREATNRKKVLESELERISMMATTLDINEELILEVLTSKKNALFSLNEEEQKQVVQEFVDRIVILPSKSIDDFEAEVTYKFFEGKNGSTTGKNPSPVGDRFFNGGGEGTPTVTLLEEFSFVI

SEQ ID NO: 7453 - protein, 478 aa, synthetic construct
MRVAAYIRVSTDEQAERGNSLNEQQERLEAYCKAMGWPKPNIYPDDGYSAGTLKRPFLEKLLKDIEENKIDVLLTTKLDRLTRSLFDLLQLIKFMESNKCNFVSATENFDTTTAAGRMVLQLLGVFAEFERGRTSERVQDNMISLAKNTDIALSRPCFGYDVIDRRYEINEEEAKHVRHMFDLAENGHGTRTIAKELNANNVLTKQGKLWDSTNVRRILTNETIAGMRIHNKRKKVNGKTVIRPKDEWIIKKDNHPTIIELERFERIQSILDSRKRNKRHAESETYLLTGLLKCGHCGTNMKGSTSRINRADKHYIYHRYICASYTLNYSCKHHFAHRDELESDVINMIKQIADTSSSELTIRITSKSKTDEIKETELLLDRLNKQMQRQIEAHSKGLIEDEDLKASTDRVKEERQLLRSKLEKLKSDKGDTDTVKKNIQDLIDDITSVDRLKAKTGIMKLIDSLVLKDNNIDVIWRA

SEQ ID NO: 7454 - protein, 531 aa, synthetic construct
MTPLVAAETFIESDLEPYIGYIRVSTWKEEKISPEIQQAAILEWASRNRKRIVRWITDLDMTGRNFKRKIMQGIEAIERAEAKGIAVWKFSRFGRSRDGVAVNLKRVENTGGELVSATEPIDARTAIGRLYRGIIFEFSAYESDRAGEQWAETHDLRRSMGLPATGRERFGYTWHRRYDPKTEKVQQEFYEPKLDIGPIVVDLYLMYVAGSKGFAKLCGWLNAQGFRTTRGSLWSTPTLTRYMDSGFAAGLLRVHNRDCKCNGSCPNYQFVEGAHEELIGPDIWQQYVERRKLIKDTAPRSRQGSYMLTGTMNCGGCRRSAGVNAAQRKGKNIRGYAYRCGTRAQRGQLACAGCYILRSEVEGEVTAFLRQHADGIDESPSVQVRQTRDFEAAQKRTSLARKELEKQHKRLTTALTNLAVDKSLNPENYEDDVYEKAKAKLTDERARITKQLEAATVEAAQPTFTELRPIVVGLMAEWETLLVSERNAIIRKLIRRVALTKNESGEVVVEIHPLWMPDPWASKAAGHELAA

SEQ ID NO: 7455 - protein, 501 aa, synthetic construct
MKPNIKDVAIYLRKSRDDSDGQEDVLAKHESLLLEYAKSHNFKYKIYKEIGSSEYIDWRPEMVRLLTDVEQELYDAVLVVDLDRLSRGDLEEMGRISRVFRNSKTLVLTPSKTYDFNNEDQALINNFEMVFANHEFRMINKRMIRGKKQGAKSGRWTNGTPPFPYVYNRLTRELDVDPDKVKVYDLMKKMFLEDMRATYEIAWKLNELGFKTNRNGYWYENTVRRILINEVHLGKVVYGKTSGSVSKKRPNANGVQIKDRSEWIIAEGSHRSLKTEEEHQRILAILESRRFTPKGTRKNVQVLSKLIYCGKCKRVMSFTGKASGKRYVKTCLTTDRFGNRCHNRSLNVEVIYAQLFLDLEQYEQQLLNHEPKEEQGDSSTLQLALHNKQEELERLGKGINRIKDLFIDEVIDKSEMKKRIEKQQQLMQTKKEEIRSIEQSLAVMDNVRTDDDRLYAIREFKKAWNTEGISKKELNILSKQLIDRVEYIREGNNVQINIKFY

SEQ ID NO: 7456 - protein, 539 aa, synthetic construct
MKLDNAKVFSYLRFSDPRQATGSSADRQLAYAASWALKRGMALDATLTLKDEGLSAYHQRHVTQGALGVFLRAIEDGRIASGSVLVVEGLDRLSRAEPIQAQAQLAQIINAGITVVTASDGREYNRAGLKAQPMDLVYSLLVMIRAHEESDTKSKRVKAAIRRQCEGWVAGSFRGLIRNGKDPQWVRLTNDGWELIPERVAAVKRALELYRQGLGAGRAAAVMHEEGFQLTDGGISGLQIYRTIKLPALRGVKRLSLDGEDYELEEYYPRILSDAEWSDLQHLAGQRLRRRGAGEIPGIITGVGLAYCGYCGTALVAQNIMKRRRSDGSIADGNRRLQCTSYSKNGGCSAGGSCSVVPIERALLSFCSDQLNLQRLLQVGDDGKGVRQKLLVARAALDKITTQLGKVTDALLADESGASPIAFIRKARELEEQQGVAEQNVKRLEFELVAMSRAVRPAQADRWEELAAQVFAGDYGAREKVRQLIMDTFERIVIYMRGMSAQDRKGQAIDVQLLSRTGQHRLIQIDRRTGEWVASEDWG

SEQ ID NO: 7457 - protein, 536 aa, synthetic construct
MNGARNIRSVTVIPATPELFMQIDEKPSRKKRVAAYARVSTNLEEQQSSFEAQLDYYTKYIKDKPEWEFVEVYTDEGISATSTKKRDGFNRMIKDALDGKIDLIVTKSVSRFARNTVDTLTNVRLLKEKNIEIYFEKENIYTLDSKGELLIAIMSSLAQDESRSISENVTWGKRKSFSDGNISLPYKSFLGYVKGENGLPQIVEEEATTIRLIYKLFLEGHTPSSIAKQLMALKILSPTKRQKWPVSTVISILKNEKYKGDAVLQKRYTTDFLTKKMKTNEGEVPQYYVENSHPAIIPPETFGLVQEEFARRKSKGGYTACQSCFSSRIICGDCGSAYGSKVWHSGSKYQHTVWQCNNKFKEKDKCNTPHLYDETIKKLFVEVMNHLIKNKAEIFENYRLMLDKLTDCQDLKEELKQVDEECSSIEIMVDAFVSENTRVAMDQEEYQRRYNTYAESYDKLRNRHMALTEEIRKREAQKNQIHAFLDILEKRDQLLTEFDETLWRRTVLEMVVLSKDEVNFRFKDGAEIKWPMKGNI

SEQ ID NO: 7458 - protein, 435 aa, synthetic construct
MMRKVIKIDPVAIKLPVKKRVAAYARVSSGKDAMLHSLSAQISHYSETIQSRLDWQYAGVYADEAATGTKDNRAEFQKMLTDCRNKKIDLIITKSISRFARNTVTLLEVVRELSSLNIEVYFEKENIYSLSGDGELMLTILASFAQAESLSVSENCKWRIRKGFLEGELVNLRFMYGYRISRGLIEIDEEQAQIVRMIFDDYLGGMGCTQIAKKLRELNVKRIRDGIWTAERVGEILKNEKYAGNSLAQKKYVSDHLTKKLITNWGQLPKYYAENTHPAIIDQETFDKAQVLLASKRKTSGKKEKAVYAFTEKIVCDKCGKHYNRKPTHGYVYWNCRTFLHFGKSVCHTKQIPEVILMQVSAEVLGLDPFDEEIFHQQIKEIRVPDDFKLKFVFHNGDTVEKGWHNKSRKDSWDEKKRQEARKRQSLIMERGLAN

SEQ ID NO: 7459 - protein, 472 aa, synthetic construct
MCEKNVIVGLYVRVSTTEQAKEGYSLGEQEDRLRKYADAHGWVVYRCYADPGFSGAKMERPALQMMLDDVRSGRLNKVLVYKLDRLSRRQRDTLYMIEDVFNACGCDFVSMTEQLDTGTPLGRAMIGILSSFAQLEREQIKERMRLGREARAKSGRWSGSWQPPYGYACDENRNLVVDPYSASIVRKIFDMYIAGMSFFAIAEKLNKEGYRTNYGHKFYYHFVERVLSSYELTGGVSYSGEHYEGNHEAIISRDTFDKVQGMLEKRDRHPHSFRTIHLLSGGIMVCGECGASYRFLGSNGHRYYMCGNRLDRRDNKCYNTNIKADDIEGEIISRIKSLAFDDEYFQSIVDGRSEERDVSVDVAAINEKISNIERRRKRLMDLYEVDGIDFDDLNRRIGDLAKQQKGLADERDAIIASGNSSRLSVEEALSVISTVNDVFESGTIDEKRSVISALIDAIVVYPESIEIHWSFG

SEQ ID NO: 7460 - protein, 485 aa, synthetic construct
MSKKVAIYTRVSTTNQAEEGYSIDEQIDKLKMYCEAMDWKVSEIYTDAGFSGSKLTRPAMEKMITDIGLKKFDTVIVYKLDRLSRSVRDTLYLVKDVFTKNQIDFISLSESIDTSSAMGSLFLTILSAINEFERENIKERMTMGKIGRAKSGKSMMWAKTAFGYSHNQETGILEINPLEASIVEQIFNEYLKGTSITKLRDKLNEDGHIAKELPWSYRTIRQTLDNPVYCGYIKYKNNTFEGLHKPIISHETYLSVQKELEARQQQTYEKNNNPRPFQAKYLLSGIARCGYCGAPLRIVLGHRRKDGSRTMKYQCVNRFPRKTKGVTTYNDNKKCDSGAYDMQWIEDIVLKTLNGFQKSDKKLRKILNIKEESKVDTSGFQKQLKSINNKIQKNSDLYLNDFITMDDLKKRTEMLQGEKKLIQARINEVDKPSTSEIFDLVKSELGETTISKISYEDKKKIVNNLISKVDVTADNIDIIFKFQLA

SEQ ID NO: 7461 - protein, 496 aa, synthetic construct
MYGYNLKPCLTRRNTLKRMEQITPPPISTSPLVKVAAYARISMETERTPLSLSTQVSYYQQLIHDTPGWTFAGVFADSGISGTTTHRPQFQEMLALAREGAIDLILTKSISRFARNTVDLLETVRELKDLGVEVRFEKENISSTSADGELMLTLLASFAQAESEQISQNVKWRIWKGFEEGKANGFHLYGYTDSADGTDVQIIEEEAAVVRWIFAQYMKKTSCEKMAAQLIADGRVPHLADNKMPGEWVRHILKNPHYTGDLLLGRWSTPEGRPGRAVRNTGQLPQYLVENAIPAIIDRDTFTAVQTEIARRRELGARANWSIETVALTSKIKCVSCDCSFVRNVRNPKTQNSISTEHWICTERKKGRKTGCGTCEISDTALKGFIARVLGIDTFDQEVFNERIDHIEVQGKDHYTFHYTDGTSSSHTWRPNLKKSSWTPARKAAWGELLRARWAEAKRLGLNNPRQAPTPPEALAKYRAVAKAEAERLRAERGER

SEQ ID NO: 7462 - protein, 528 aa, synthetic construct
MARTVTAIPATRALHTGAPLGQTTLRRVAGYARVSTDHDDQVTSYEAQVDYYTRYISDHAGWQFVKVYTDEGITGTSTKHRAGFQQMVTDALDGKIDLIITKSVSRFARNTVDSLTTVRALKDKGVEVFFEKEGIWTFDAKGELLITIMSSLAQEEARSISENVTWGHRKRFADGKVTVPYSRFLGYDKGEDGSLVINPEQAKLVRRIYNMYLGGMSIGTIARTLTDEPETFTAAGNKTWYYRSIRAILTNEKYKGDALLQKSYVADYLTKRQVINQGEVPQYYVTASHEAIISPAVWDFVQAEIAKGARDQRTQHRTRPFSSTLECSQCGHFFGSKTWHAGSKYEKVIWRCGHKYAGQEKCATGHISDQRLKDMFLKAIRLRFGSSTDTGVNQAVLDALDTSDLEVEAAGLLAQINEVAKKLQSMIAHNARVAQDQQTYEKAFNASHEQHQALLADHAAVVAEIQNKNNRLAAYHYYMQETANLDLERLVFSPYLCVALLDKGTVDVDGNVTFQFRDGSTQVVAIKQ

SEQ ID NO: 7463 - protein, 543 aa, synthetic construct
MGKNGARVYSYLRFSDPRQATGSSADRQLAYASAWASKHGMELDATLTLRDEGLSAYHETHVKQGALGAFLRAVDEGRIPAGSVLIVEGLDRLSRAEPLLAQAQLGQIVNAGITVVTASDGREYNREGLKAEPMNLVYSLLVMIRAHEESDTKSKRVKAAVRRQCEGWVTGSYRGRIVSGKDPQWLAWDGDSWQFIPERVEAVRFALDAYRSGIGAARLVRLMHEKGMVLSDWGIAAQQVYRLVRLPALRGAKRISIDGEDFMLEDYYPRLLSDEEFSELETLVGQRYRRRGKDEIVGIVTGIGITRCGYCGTALVAQNLMQRVKSDGSLEDGHRRLHCVSYSKNGGCNGGSCSSVPIERAVLAYCSDQMNLQRLLEPSSAGEDLRPRLVEAKKGVAEIERQLERVTDALLADDTGAAPMAFVRKARELEEDLERRRSAVRALEQELVTKSASTPAAGASKWAELAERAKSMTDVEAREQARQLVMDTFETLVVYMRGVMPTPKGRYIDLMMRSRAGQTRWLRVDRRSGVWRESGDSSRRLEG

SEQ ID NO: 7464 - protein, 537 aa, synthetic construct
MARTVTAIPATRALHTGAPLGQTTLRRVAGYARVSTDHDDQVTSYEAQVDYYTRYISDHAGWQFVKVYTDEGITGTSTKHRAGFQQMVTDALDGKIDLIITKSVSRFARNTVDSLTTVRALKDKGVEVFFEKEGIWTFDAKGELLITIMSSLAQEEARSISENVTWGHRKRFADGKVTVPYSRFLGYDKGEDGSLVINTEQAKLVRRIYNMYLEGHSIRHIAHTLTDEPATYTAAGNKTWHYQSVRSILTNEKYKGDALLQKSYTADFLTKKQVINEGEVPQYYVTASHEAIISPAVWDFVQAEIAKGARDQRTQHRTRPFSSTFECSQCGHFFGSKTWHAGSKYEKVIWRCGHKYAGQEKCATGHISDQRLKDMFLKAIRLRFGSSTDTGVNQAVLDALDTSDLEVEAAGLLAQINEVAKKLQSMIAHNARVAQDQQTYEKAFNASHEQHQALLADHAAVVAEIQNKNNRLAAYHYYMQETANLDLDQLVFSPYLCVALLEKGTVDVDGNVTFQFRDGSTQVVAIKADIGQAPGCD

SEQ ID NO: 7465 - protein, 481 aa, synthetic construct
MKRMEQITPPPISTSPLVKVAAYARISMETERTPLSLSTQVSYYQQLIHDTPGWTFAGVFADSGISGTTINRPQFQEMLALAREGAIDLILTKSISRFARNTVDLLETVRELKDLGVEVRFEKENISSTSADGELMLTLLASFAQAESEQISQNVKWRIWKGFEEGKANGFHLYGYTDSADGTDVQIIEEEAAVVRWIFAQYMKKTSCEKMAAQLIADGRVPHLADNKMPGEWVRHILKNPHYTGDLLLGRWSTPEGRPGRAVRNTGQLPQYLVENAIPAIIDRDTFTAVQTEIARRRELGARANWSIETVALTSKIKCVSCDCSFVRNVRNPKTQNSISTEHWICTERKKGRKTGCGTCEISDTALKGFIARVLGIEAFDEDVFTERIDHIEVQGKDHYTFHYTDGTSSSHTWRPNLKKSSWAPARKAAWGELLRARWAEAKRLGLNNPRQAPTPPEALAKYRAVAKAEAERLRAERGER

SEQ ID NO: 7466 - protein, 528 aa, synthetic construct
MARTVTAIPATRALHTGAPLGQTTLRRVAGYARVSTDHDDQVTSYEAQVDYYTRYISDHAGWQFVKVYTDEGITGTSTKHRAGFQQMVTDALDGKIDLIITKSVSRFARNTVDSLTTVRALKDKGVEVFFEKEGIWTFDAKGELLITIMSSLAQEEARSISENVTWGHRKRFADGKVTVPYSRFLGYDKGEDGSLVINTKQAKLVRRIYNMYLGGMSIGTIARTLTDEPKTFTAAGNKTWYYQSIRAILTNEKYKGDALLQKSYIADYLTKRQVINQGEVPQYYVTASHEAIISPAVWDFVQAEIAKGARDQRTQHRTRPFSSTLECSQCGHFFGSKTWHAGSKYEKVIWRCGHKYAGQEKCATGHISDQRLKDMFLKAIRLRFGSSTDTGVNQAVLDALDTSDLEVEAAGFLAQINEVAKKLQSMIAHNARVAQDQQAYEKAFNASHEQHQALLAEHTAVVAEIQNKNNRLAAYHYYRQETANLELDQLVFSPYLCVALLEKGTVDVGGNVTFQFRDGSTQVVAIKP

SEQ ID NO: 7467 - protein, 481 aa, synthetic construct
MKRMEQITPPPISASPLVKVAAYARISMETERTPLSLSTQVSYYQQLIHDTPGWTFAGVFADSGISGTTTHRPQFQEMLALAREGAIDLILTKSISRFARNTVDLLETVRELKDLGVEVRFEKENISSTSADGELMLTLLASFAQAESEQISQNVKWRIWKGFEEGKANGFHLYGYTDSADGTDVQIIEEEAAVVRWIFAQYMKKTSCEKMAAQLIADGRVPHLADNKMPGEWVRHILKNPHYTGDLLLGRWSTPEGRPGRAVRNTGQLPQYLVENAIPAIIDRDTFTAVQTEIARRRELGARANWSIETVALTSKIKCVSCNCSFVRNVRNPKTQNSISTEHWICTERKKGRKTGCGTCEISDTALKGFIAQVLGIDAFDQEVFNERIDHIEVQGKDHYTFHYTDGTSSSHTWRPNLKKSSWTPARKAAWGELLRARWAEAKRLGLNNPRQAPTPPEALAKYRAVAKAEAERLRAERGER

SEQ ID NO: 7468 - protein, 528 aa, synthetic construct
MARTVTAIPATRALHTGAPLGQTTLRRVAGYARVSTDHDDQVTSYEAQVDYYTRYISDHAGWQFVKVYTDEGITGTSTKHRAGFQQMVTDALDGKIDLIITKSVSRFARNTVDSLTTVRALKDKGVEVFFEKEGIWTFDAKGELLITIMSSLAQEEARSISENVTWGHRKRFADGKVTVPYSRFLGYDKGEDGSLVINPEQAKTVRRIYNMYLGGMSIGTIARTLTDEPETFTAAGNKTWYYQSIRAILTNEKYKGDALLQKSYIADYLTKRQVINQGEVPQYYVTASHEAIISPAVWDFVQAEIAKGARDQRTQHRTRPFSSTFECSQCGHFFGSKTWHAGSKYEKVIWRCGHKYAGQEKCATGHISDQRLKDMFLKAIRLRFGSPTDTDVNQAVLDALDTSDLEVEAAGLLAQINEVAKKLQSMIAHNARVAQDQQAYEKAFNASHEQHQTLLAEHAAVVAEIQNKNNRLAAYHYYRQETANLELEQLVFSPYLCVAVLDKGTVDVDGNVTFQFRDGSTQVVAIKQ

SEQ ID NO: 7469 - protein, 481 aa, synthetic construct
MKRMEQITPPPISTSPLVKVAAYARISMETERTPLSLSTQVSYYQQLIHDTPGWMFAGVFADSGISGTTTHRPQFQEMLALAREGAIDLILTKSISRFARNTVDLLETVRELKDLGVEVRFEKENISSTSADGELMLTLLASFAQAESEQISQNVKWRIWKGFEEGKANGFHLYGYTDSADGTDVQIIEEEAAVVRWIFAQYMKKTSCEKMAAQLIADGRVPHLADNKLPGEWVRHILKNPHYTGDLLLGRWSTPEGRPGRAVRNTGQLPQYLVENAIPAIIDRDTFTAVQTEIARRRELGARANWSIETVALTSKIKCVSCNCSFVRNVRNPKTQNSISTEHWICTERKKGRKTGCGTCEISDTALKGFIAQVLGIEAFDEDVFTECIDHIDVQGKDHYTFHYTDGTSSTHTWRPNLKKSSWTPARKAAWGELVRARWAEAKRLGLDNPRQAPTPPEALAKYRAVAKAEAERLRAERGER

SEQ ID NO: 7470 - protein, 538 aa, synthetic construct
MKDVTEKIAVIYCRVSSLKQAVQGDGLTSQETRCREYAKYKGYDVVNVFKDDMSGGLIDRPGMKSMLGYLHKNRSLPHVVIIDDISRLARGLEAHLQLRSAISSVGASLESPSIEFGEDSDSILVENLLASVSQHQRQKNGEQTKNRMRSRLINGYWVFQAPVGYRYARSTGNGKILVRNEPCASIVQEALEGFASGRFQIQAEVKRFLESFPEFPRTNHGYVRNQQVTDILTNPVYAGYVEAPNWNVSLRQGHHEPLITFQTFKKIEERLNSKAKAPARKNINEDFPLRGSVLCGDCGSALTSCWSSGRHSRYPYYLCHKRGCESYGKSIKRDVLESEFEALLRAVQPTPGLFKIAQKMFEELWNHRLAMSEARVRNLKSEMAKIERQVGQFLDRITDTDMPSVIRTYEDRIRKLEEQRIVIGEQMARCGRPVRSFDQTLRTAFDFLGNPCKLWASERFEDKRTVLKLVFLDRLAYVRGSGFRTADLSLPFKTLSDFSKGNLKMAQRTGLEPATPGVTGRYSNRLNYRCASAGQDAR

SEQ ID NO: 7471 - protein, 559 aa, synthetic construct
MKTKLYSYIRFSSMKQADGSSYERQKRTAAEIAAKYDLELVTSYQDFGVSAFKGANSRTGALSRFLDEIGRSIPVGSWLVVENLDRISRQSIIEAQELFLSIIRRGITIVTGMDGKVYSKESVNANPIDLLLSVMLFARANEESQTKRNRTNSSALIKIKAHQENPQNPAVAIEEIGKNMWWTDTTSGYVLPHPVFFPIVQEVVELRRNGRSTAEILDHLNATYTPPPAASHKRHSNWSRAMIERLFHTRALIGIKEISVDGVKYELKDYYPRVLDDAEFYHLKKSIGVRACNYGDKEEAKPIPLLSGVNLLKCEHCGSAMVKVKGTNKRPNQYRYSCDAMRSSRIACVHTNWSFRGDQLEKAVLQLLADKIWIAEDKANPVPALKVQIDEISRKIDNLITLSAMTGATKELADQITTLNSERETLYNQIKMAEEEMYSVDSQGWEKLAEFDLEDVYNEDRIKVRFKIKQALKRIGCSRIDKYKNLFVLEYIDGKTQRVVIENSRGPRKGRIFVDLKTINDRQILESNGLVLHPCLDMLTDKNWKPEEEIPGPLQEFGI

SEQ ID NO: 7472 - protein, 616 aa, synthetic construct
MPTAYSYIRFSTPEQKKGDSLRRQKELSERYAHDHGLTLDTSLHLHDLGVSAFDGSNITRGALGGFLAAVDEGRVVPGSYLLVESLDRLSRDRVMEALNLFLSIVNRGITIVTLSDGRVYNAATDNTADLIVSITIMSRAHEESLTKSKRLKAAWTNKRSRLHEKKLTARCPLWMRLSDDRSQFEFVPERVSVVREVISLAKNGMGQTIIAKTLNSRSVPSFSGNPKGWHPSYIQKILTSPALYGEYQPGIFEGGRAIPHGEPVADYYPALISKEEFYSLQAYRSQNAVGGGKARKGETIPNLLSGLLRCGYCGSPMVIAGAAARRIRSADGKEMQRPPKKVLVCDGGRRGLGCYAVQWAHKDFETSFLSFCRGIEFEKVLADVRSGHNESRELTLDEKIRSTQAEILAKDARIKNLMVAIEEGNAPASLVERIRLLEEEVSDLRRTETELATELNLHRAAHQELTSTAKTARSMIDTMESIASDELFRVRAALAAQFRRTIATVTLYPAGRLFTHEQVERQRASLIDAGLVADQVDRYVAETYPIEPRRQGRGNRGRYASRKDIGRFFAIETVNGGFRVVYPDFDDPATARIVAGLDETPVFAVDPEGQPSLATP

SEQ ID NO: 7473 - protein, 627 aa, synthetic construct
MPTAYSYIRFSTPEQKKGDSLRRQKELSERYARDHGLTLDTSLHLHDLGVSAFDGSNVTRGALGGFLRAVDEGRVVPGSYLLVESLDRLSRDRVMEALNLFLSIVNRGITIVTLSDGRVYNSDTDNTADLIVSITIMARAHEESLTKSQRLKAAWKNKRSRLDETKLTARCPLWMKLNHDRTRFEFVPERASVVREIISLAKNGMGQTIIAKTLNTRSVPSFSGNPKGWHPSYIQKILTSTALYGEYQPGIFESGRVIPHGEPVADYYPALITREEFYSLQAYRSQNAVGGGKARKGETIPNLLSGLLRCGYCGNPMVIAGAAAKRIRSADGKEVKRPPKKVLVCDGGRRGLGCYAVQWGHKDFETSFLSFCRGIEFERILTNVRSGHEENRDLTLDERIRSIDAELSTKDARIKNLVIAIEEGNAPASLVQRIRSLEEEVTELTRTKVQLSSELSLHRAAHQELTSTAKIARSLIDTMESMTNDELFRVRAALAAQFRRTIASITLHPAGRLFTHEQVEKQRASLIDAGFVADQVDRYVAETHPTEPRRQGRGNRGRYASRKDIGRFFSIETVNGGFRVVYPDFDDPSTARIVAGVEETSFFNQLVGTTTALKAKDQSEDRSSTAI

SEQ ID NO: 7474 - protein, 511 aa, synthetic construct
MKPTRPRAYSYLRFSTPEQLKGDSYRRQTTMALEYAARHGLALDQDLTFEDLGVSAYRGANAEAGRLGEFLEAVRVGLVPRGSYLLVEALDRLSRLSPRKAVRVLEDIVEEGITVVTLNDGREYTEGNLDDDPTSLLIAIVLFMRANEESATKSRRLKAAWEGKRQSIDDRPLTAVTPAWVSLNEATGKLELIPDRAAIVRRIFEMYVAGVGYASIAEAFNREGIACFGRAKHWHRTYVRKILTNDAVIGTFTPHRIVHEGGKKVRVPLERVPGYFPPVVSNEVFARAQAQLGGGSRPAPKHRGTGVSNLIAGLARCPLCGSTMTRVTKGSGPKGGKPKLICTKAKAGAGCQYHAVPLENVETAIVENASFIAGTVPSGREGLDADLDAAEVRIAATQDEIENLLQALAAAPSTAIAERVRDLELSLDALRTERDGLADQLVAANGPLLAKRVEDLRATLAADPMDRAKANAALRLLLSSVTVDYEHGKLMLEWKHGGETGVVYAMPRDVR

SEQ ID NO: 7475 - protein, 559 aa, synthetic construct
MAAKARVYSYLRFSDPKQAAGGSIDRQLEYAARWAADHELELDASLSLRDEGLSAYHQRHVRQGALGVFLRAVEDGQVPTGSVLVVEGLDRLSRAEPLQAQAQLAQIVNAGITVVTASDGREYNRERLKAQPMDLVYSLLVMIRAHEESDTKSKRVKAAIRRQCQGWIAGTWRTPIRVGKDPHWVRECDGGTFELIPERAEAVRHVIAMFRQGHGAVRIVRDLAERGLQITESGRTQSSNLYRLLANRMLLGEKSIEVDGETFRLEGYYPALLTPAEFADLRYLAEQRGRRKGKGEIPGVVTGLGITYCGYCGAAVVAQNLMGRRRMPDGRPTPGHRRLHCVTYSTSSGCKISGSCSVAPVERALMLYCSDQINLTRLLEGDAGTASLAAQLASSRQRVADLEAQVQRVTDALLLDDGEAPAAVLRRVRELESQLASERRDVDSFEHRLAASASNVAPAAAEAWRDLVSSVEHLDYDARMLARQLVADTFSRIVIYQSGFRPDVDDGSIGLLLTAKRGTTRMLHVDRRTGEWRSAEELGTSCPEHVPIPTASADVGAPE

SEQ ID NO: 7476 - protein, 615 aa, synthetic construct
MLQAKTPKAYSYIRFSTPEQQFGDSERRQTELSQKYAEAHGLTLDENLKYRDLGVSAFDKSNIRNGELGTFLRAIDSGAVEPGSYLLVESLDRLSRAKVTDALEVFMSIINRGIRLVTLMDGREYSKERINEQFTDLIISIVVMSRAHEESQTKSKRLKEAWKAKRGRIGDAKLTEMAPAWLKLNDERTAYSLVPDRVELVQRMFQWSKDGIGSETIARRLNQQGLPTWGTRKADQWHASYIKKVLDNRAVLGEFQPHVLVNGKRVPEGDPAPDYFPRIVSDEDFVLAKTARQSRRTNSAGRKGQTFSNVFSGILRCGYCNGSMVYVNKGHNGPRARLLVCARAKAGKGCHYVPWEYSPFERSVLTYCKGLDFDAFLQTRDTVKSELAALSARIAVLESSITDNEHKQANILEAIESGAKFQQFEARMVELEQSRMKFNAELDAMRQQHDLRANAKVDVTAVRASIEGLLQRISELEGDELYDMRARLSQHLKRLIVRIAMYPGGHIEQPFFVEKLRAHLVSRGTDAKAADEYIAGRLKLTPNVNERFFTMISRSDAVRTIRPDLDNPEILHLQSIGGEQGLAAHAETIGAILAKFTELARKSSGVAKSTPDTGS

SEQ ID NO: 7477 - protein, 616 aa, synthetic construct
MPTAYSYIRFSTPEQKKGDSLRRQKELSERYAHDHGLTLDTSLHLHDLGVSAFDGSNITRGALGGFLAAVDEGRVVPGSYLLVESLDRLSRDRVMEALNLFLSIVNRGITIVTLSDGRVYNAATDNTADLIVSITIMSRAHEESLTKSKRLKAAWTNKRSRLHEKKLTARCPLWMRLSDDRSQFEFVPERVSVVREVISLAKNGMGQTIIAKTLNSRSVPSFSGNPKGWHPSYIQKILTSPALYGEYQPGIFEGGRAIPHGEPVADYYPALISKEEFYSLQAYRSQNAVGGGKARKGETIPNLLSGLLRCGYCGSPMVIAGAAARRIRSADGKEMQRPPKKVLVCDGGRRGLGCYAVQWAHRDFETSFLSFCRGIEFEKVLADVRSGHNESRELTLDEKIRSTQAEILAKDARIKNLMVAIEEGNAPASLVERIRLLEEEVSDLRRTETELATELNLHRAAHQELTSTAKTARSMIDTMKSIASDELFRVRAALAAQFRRTIATVTLYPAGRLFTHEQVERQRASLIDAGLVADQVDRYVAETYPIEPRRQGRGNRGRYASRKDIGRFFAIETVNGGFRVVYPDFDDPATARIVAGLDETPVFAVDPEGQPSLATP

SEQ ID NO: 7478 - protein, 556 aa, synthetic construct
MAKQSPSRVYSYLRFSDPKQAAGSSADRQLEYAARWAAERGMQLDSSLTLRDEGLSAFHQRHIKQGALGVFLRAVEDGRIPPGSVLIVEGLDRLSRAEPIQAQAQLAQIVNAGITVVTASDGREYNRERLKAQPMDLVYSLLVMIRAHEESDTKSKRVKAAIRRQCEGWVAGTWHGVVRNGKDPHWVKLGDSGKFELVPERVLAIRTMIDLFTEGYGSVEITRILTERQLFISNAGNYSTHMYRIIRNRALVGEKEISVDGEDFRLTEYYPSLLSKDEFAELQVTMSERGRRKGKGEIPSVLTGLGITTCGYCGAAIVTANSARRLTDPARRLSCASYKYNSGCPIAGTCDSELVERALMHYCSDQFNLSRLLSGDDGIERRTAQLALAKQRLAEIESQIERITDALLSDDGAPPAAFMRRARDLESDLEREKLDVETLEQQIAASSTHELPAAAEAWAELVDGVLALEHSSRMKARQLVADTFRHIVLFQRGFSPIDEVENDKWKRGGTIGLMLVTKRGGTRLLNIDRRTGGWRAEEDIDPTRGPSGSLPLTIEP

SEQ ID NO: 7479 - protein, 525 aa, synthetic construct
MPSAFSYVRFSSGKQAKGSSEQRQRSMLGQWLEQHPSFTLSDLRFEDLGRSGFSGEHLDHGLGQLLAAIDSGAIKSGDVILVEAVDRIGRLEPLEMLPLFSRIVRAGVSVITLEDGHIYSKDSVNETSLFLLVAKVQQAHDYSNRLSRRINASYTARREKARAGLGVKRETPVWLTTDGQLVSHVAPHIAQAFQDYADGLGERRICRKLRESGLEEFSKTNATTVRRWLKNKTAIGYWNDIPDVYPHVVDPALFYRVQQRLDAPKVDRAKPSTHYLTGLVKCAVCGRNYNFKQRKHTDPAMLCTSRARLAGEGCSNSKTYPVIVLDQVRKLTSLPFLQHAMESASSQADPSSQRLAVIDGEIGELSRKISEATKALLVLGFTPEIQESLEQLKTAREALEEERAALLLPQAEKLTAAQLEAFSNGLLDDEPMKLNHVLQTAGYSMVVHPDGSIDVDGKRFVYEGASRKEKVYKLRLIGEDKQWSLPILTPQMATYKSLFMASVRLPGDPSEEELRRFEEAKHSER

SEQ ID NO: 7480 - protein, 509 aa, synthetic construct
MSKPRAYSYLRFSTPEQLKGDSYRRQTTMALEYATRKGLALDQDLTFEDLGVSAFRGTNAEAGRLAEFLEAVRAGLVPRGSYLLVEALDRLSRLSPRKAVRVLEDIVEEGITVVTLNDGREYTSANLDDDPTSLLIAIVLFMRANEESATKSRRLSAAWEGKRQRVEDRPLTAITPAWVSLNEASGKLELVPERAAIVQRIFDMYAAGIGYALIAETFNREGIPCFGRARHWHRTYIRKILVNDAVIGIFTPHRIVHEGGKKIRLPLEKVPGYFPSVISEDLFTKAQSQLNGNAGPAPKHRGAVISNLIAGLARCPICGSTMTRVMKGAGPKSGKPKLVCTKAKAGAGCQYHAVPLDSVETAVISNASYVTGTVPSGRDGLDSDLDAAEVRIEATQDEIENLLRALAVTPSTAIAERIKDLEVSLEALRTERDGLADQLMAANGPLLAKRVEELRQALEAAPLDRAKANAALRVLLSSVTVDYDSGKLLFQWKHGGETEVIYSMPREVR

SEQ ID NO: 7481 - protein, 509 aa, synthetic construct
MSKPRAYSYLRFSTPEQLKGDSYRRQTTMALEYATRKGLALDQDLTFEDLGVSAFRGTNAETGRLGEFLEAVRAGLVPRGSYLLVEALDRLSRLSPRKAVRVLEDIVEEGITVVTLNDGREYTSANLDDDPTSLLIAFVLFMRANEESATKSRRLSAAWEGKRQRVEDRPLTAITPAWVSLNEASGKLELVPERAAIVQRIFDMYAAGIGYALIAETFNREGIPCFARARHWHRTYIRKILVNDAVIGIFTPHRIVHEGGKKIRLPLEKVPGYFPPVISEDLFTKAQSQLNGNAGPAPKHRGAVISNLIAGLARCPICGSTMTRVMKGAGPKSGKPKLVCTKAKAGAGCQYHAVPLDSVETAVISNASYVTGTVPSGRDGLDSDLDAAEVRIEATQDEIENLLRALAVTPSTAIAERIKDLEISLEALRTERDGLADQLMAANGPLLAKRVEELRQALEAAPLDRAKANAALRVLLSSVTVDYDSGKLLFQWKHGGETEVIYSMPREVR

SEQ ID NO: 7482 - protein, 583 aa, synthetic construct
MAKRKNVEAPAAIEQPAGPPRLFIYGRFSSKKQASGNSYERQIKFAHAWASDHGYEIDDKKTMFDYATSAFRGKHRTAGALAAFFKAMKAGDVRPGDVLLVESLDRLSREEEFKAFDQFSQIVQAGVTIMSMQDGEFSITKVRETHGGILHQALGVMTRAHNESLSKSDRVQKAAHAICRAWRDDDWGKKKHRKPIPIGKDPSWVRWNEATESFDAIPAQVDAIRALIGFFRLGYSPMRCFDKMRAAGIALPDGISDHSRVHRVLQDRALVGEKFIQFDLAKKRPDIVETEYTIPGYYPAILSEDEFSALQHIRAQRGRRAGKAEVVSIMTGMRLTKCAKCGQSMAIQNVLTRVRREDGLPHDGHRRLKCIGARSAKNRCTETSCSVVPVERALMEFCSDQMNLAALFTDSDERAKLLATEHVRARRLAEEARAALDTFMQVGALASGDSAAIIATRIAQLTNEHREWSEKAARFEHDLATMNRHSTPEVAHEWAKLRDGVARLDNEARTKARQLVADTFVRIEIGLAHADLIELRLVSKRDVVRVLTIDRKTGERRDQMTVENTRHAALARRTKKQKLVKAA

SEQ ID NO: 7483 - protein, 544 aa, synthetic construct
MANLQCGSERAVAYSYVRFSTAKQELGDSLRRQVSMAEDYCAKYGLELHPLSFRDLGVSAFKRKNLERGALAAFIDAVKTGKIQKGSYLVIEQFDRLTRAEIDFALKLLLDLVHSGITVVTLVDERIWNSETVKDLQNLMLAIVFMSRANNESATKADRLSRVWGEKKKAAAESGKIMSRECPRWLAVNEDKSAFLVLEDRVESVRKVFAMRIAGHGVVSIVNRANKEKWPVPGKGETWHISLVGRLLRNRALLGEYQPHSSGLDEDGRVAIGDPVAGYYPAILDEQTFLRAQATRERKAQFPGRRDVNYRNWLQGLLKCTCGQSFVRKNKTSAKQPGYARYYCAARSRGASDCASVGAKEVETAVIYAVSQIAPQFWNGSDRLAELVSLVDVQQVNLTAAQQRRDRFLEAIGMSEEAIPSLLQRLTAAEAEVVAAESVLAATRAEISEMNVNGHDVFENIVKAVANVESLDARAQLREDLSRVLLKCVIDAEAGVVHVHVRGESRPIVIPLRLDANLPGAVMGQMSEEQYVAEYGRSLEQVEQ

SEQ ID NO: 7484 - protein, 507 aa, synthetic construct
MKRAISYIRFSSEKQSRGDSLRRQAKMVTDWLKAHPEYYLDESLTFRDLGVSGFTGKHLKGGLGDFLTAIEKGLVKAGDTLLIESLDRLSRQDVDQASELLRNILRSGVDVVTLSDGEHYTRESLKDPLALIKSILIMQRAHEESLRKAERIQAAWDAKKEAAKAGIKISRRCPAWLKLNDDRKSFSVIPEKVETVKRCFQLRLEGKSIWEIVRTLNAEGHQTLNQYKAGKFGQTSVQDLLKNRSVIGYFTPKGCEEISGYYPAIIDETTFYKVQQLSYARYGRKPASDKPMAVNLFKGVIRCSECGHALIITGFSDTRNGIYRCPLRNENRCSAKGLSRKQTDGTLLALLSRLDRFDSDMTNTIDTLKLHREHISSNIEKLVQLSLEIEDLSAITSKLRQLKNELSQVDADIEKETQRLKSIDVGCLSDCDLTTKAGRIEAQLIIKSAVKEVVLNTAKRRCKVTFHNGKAITLPITENPSDNVTEAIQSLSEVTERGLIDVDVVEI

SEQ ID NO: 7485 - protein, 506 aa, synthetic construct
MRSVITYLRFSSATQGAEGADSTRRQNELFKQWLRKNSDAQVVASFNDEGLSGYKGKHLSGQFGDMLSRIESGEFPEGTILLVEAIDRIGRLEHLETEALMNRIIAHGIEIHTLQDGLIYTRDALSDDLGISIIQRVKSYIAHQESKQKSFRVSQKWEQRAKLALAGEQRLTRNVPGWIDPETFKLNEHAETVRLIFKLLLDGESLHNIARHLQSNGIRSFSRRKDANGFSVHSVRTILRSETAIGTLPASQRNDRPAIPNYYEAAIDASTFNKAQEILGKNRIGRTPASDNPLTINIFKGLFRCQCGASVHPTGTKNKYQGVYRCNNHLDGRCDVPPLKRKPFDRWMIDNFLGMIDVVSDGETERRIAALQHEVETVTARIKKATALLLEMDDITELKAQVKELNQKRTELQTTIDTLKRKTSLTDKELPQLKDIDLMTKTGRVECQLILSKHLKGLTLGKDSVTVTLQNDTEITIPTNPLPLNDGTSIFEIADKELLEIDAYQL

SEQ ID NO: 7486 - protein, 506 aa, synthetic construct
MRSVITYLRFSSATQGAEGADSTRRQNDLFKQWLKKNSDAQVVASFSDEGLSGYKGKHLTGQFGDMLARIESGEFPEGTLLLVEAIDRIGRLEHLETEALMNRIIAHGIEIHTLQDGLIYTRDALSDDLGISIIQRVKSYIAHQESKQKSFRVSQKWEQRAKLALAGEQRLTKMVPGWIDPDTFKLNEHAETVRLIFKLLLDGESLHNIARHLQSNDIKSFSRRKDANGFSVHSVRTVLRSVSAIGTLPASQRNDRPAIPNYYEAAIDAATFNKAQEILDKNRKGRTPASDNPLTINIFKGLFRCQCGASVHPTGTKRTYQGVYRCNNHLDGRCDVPPLKRKPFDKWMIDNFLGMIDVGNDGEAEGKIAALQHEVEIVTARIKKATALLLEMDDITELKTQVKGLNQKRTELQTTIDNMRRKASLTDKELPQLKDIDLTTKAGRVECQLILSKHLKGLTLGKDSVIVTLQNDTEITIPTNPLPLNDGSPIFEIADKELLDIDAYQL

SEQ ID NO: 7487 - protein, 547 aa, synthetic construct
MKLLVTYIRWSTKEQDSGDSLRRQTNLIDAFYSKHKNDYYLLPAHRYVDKGKSGFHQQHKNQGSDFRRMFENVMSGAIPEGSLIVVENFDRFSRADIDTAIDDVRQILRKGVSILTLGDGELYDKSALTDPVKLIKHIIIAERAHQESLVKQKRIAQVWNHKTQLARELKKPMGKQAPGWLELSEDGSHYIVDEDKASLVNIIYDKRLSGMSMFAICKWLNEQGCPTINQRKVRISKTKKPDGNWSALSVKHILTSRSVLGYLPAKISTEDRKTVLREEIEGFYPQIVTDSKFYAVQQLLEETGKGKTSSGEHWLYVNILKGLIRCKCGLVMTPTGIRKPVYQGTYRCNGNKESRCSYGTVSRKLLDTQLCSRLFSKLSQLHDEATDTAKLDELQRRLNTVDGELEKLTETLIQLPNITQIQEALRVKQEEKDELIVQLSREKARVKSVSSLDLSGLDMESVEGRTEAQIIIKRLVKEIVVSGNEKLVDIYLHNGNMIRGFPLDGKDDHTLTLEEATDEMQSLDDMLIFGEPVTRIYPAGDMEEVDA

SEQ ID NO: 7488 - protein, 506 aa, synthetic construct
MRSVITYLRYSSAIQGAEGADSTRRQNDLFKQWLKKNSDAQVVASFSDEGLSGYKGKHLTGQFGDMLARIESGEFPEGTILLVESIDRIGRLEHLETEALMNRILGNGLEIHTLQDGLIYTKDALADDLGISIIQRVKAYIAHQESKQKSFRVSQKWEQRAKLALAGEQRLTKMVPGWIDPDTFKLNEHAETVRLIFKLLLSGESLHNIARHLQSNGIKSFSRRKDANGFSVHSVRTILRSETTIGTLPASQRNDRPAIPNYYEAAIDASTFNKAQEILGKNRIGRTPASDNPLTINIFKGLFRCQCGASVHPTGTKNKYQGVYRCNNHLDGRCDVPPLKRKPFDKWMIDNFLGMIDVGKDGEAEGKIASLQHEVEIVTTRIKKATALLLEMDDIDELKIQLKELNQKRTELQTTIDNMRRKASLTDKELPQLKDIDLTTKAGRVECQLILSKHLKGLTLGKDSVTVTLQNDTEITIPTNPLPLNDGSPIFEIADKELLDIDAYQL

SEQ ID NO: 7489 - protein, 507 aa, synthetic construct
MKRVISYIRFSSEKQAKGDSLRRQSKMVNDWLKAHPEYYLDQDLSFRDLGVSGFTGKHLKGGLGDFLTAIEKGLVKAGDTLLIESLDRLSRQDIDIASELLRNILRSGVDVVTLSDGEHYTRESLKDPLSLIKSILIMQRAHEESLRKSERIQAAWNRKKELISEGIKVSRRCPAWLRLNDDRKSFSVIPEKVETVKRCFQLRLEGKSIWAIVKALNDEGHQSMSQYKPGKFGQTSVQDLLKNRSVIGYFTPKGCEEISGYYPAIIDETTFYKVQQLSHYRYGRKPVSDKPLSVNLFKGVIRCSECGHALIITGFSDTRNGIYRCPLRNENRCSAKGLSRKQTDGTLLTLLSRLDRFDSDTTNIIDTLKLHREHISSNIEKLVQLSLEIEDLSAITSKLKQLKGELSQVDADIEKETQRLKSIDVGCLSDCDLTTKAGRIEAQLIIKSAVKEVVLNTAKRRCKVTFHNGKVIDLPITENPSEDVTEAIQSLSEVTERGLIDVDVVEI

SEQ ID NO: 7490 - protein, 507 aa, synthetic construct
MKRVISYIRFSSERQAKGDSLRRQSKMVNDWLKAHPEYYLDESLTFRDLGVSGFTGKHLKGGLGDFLTAIEKGLVKAGDTLLIESLDRLSRQAVDRASELLRNILRSGVDVVTLSDGEHYTRESLRDPLSLIKSILIMQRAHEESLRKSERIQAAWNRKKELISEGIKVSKRCPAWLKLNDDRKSFSVIPEKVETVKRCFQLRLEGKSIWEIVRTLNDECHQSMNQYKPGKFGQTSVQDLLKNRSVIGYFTPKGCEEISGYYPAIIDETTFYKVQQLSHYRYGRKPVSDKPLSVNLFKGVIRCSECGHALIITGFSDTRNGIYRCPLRNENRCSAKGLSRKQTDGTLLALLSRLDRFDSDTTNTIDTLKLHREHISSNIEKLVQLSLEIEDLSAITSKLRQLKGELSQVDADIEKETQRLKSIDVGCLSDCDLTTKAGRIEAQLIIKSAVKEVVLNTAKRRCKVTFHNSKSITLPITENPSEDVTEAIQSLSEVTERGLIDVDEVII

SEQ ID NO: 7491 - protein, 506 aa, synthetic construct
MRTVITYLRYSSAIQGAEGADSTRRQNDLFKQWLKKNSDAQVVASFSDEGLSGYKGKHLTGQFGDMLARIESGEFPEGTILLVESIDRIGRLEHLETEALMNRILGNGLEIHTLQDGLIYTKDALADDLGISIIQRVKAYIAHQESKQKSFRVSQKWEQRAKLALAGEQRLTKMVPGWIDPDTFKCNEHAETVRLIFKLLLDGESLHNIARHLQSNDIKSFSRRKDANGFSVHSVRTILRSETTIGTLPASQRNDRPAIPNYYEAAIDAATFNKAQEILDKNRKGRTPASDNPLTINIFKGLFRCQCGASVHPTGTKNKYQGVYRCNSHLDGRCDVPPLKRKPFDRWMIDNFLGMIDVGNDGEAEKEIASLQHEVETVTARIKKATALLLEMDDITELKTQVKELNQKRTELQTTINTMKRKTSLSDKGLPQLKDIDLMTKAGRVECQLILSKHLKGLTLGKDSVTVTLQNDTEITIPTNPLPLNDGTSIFEIAEKNLLNIDTFQL

SEQ ID NO: 7492 - protein, 507 aa, synthetic construct
MKRAISYIRFSSEKQSRGDSLRRQSKMVNDWLKAHPEYYLDQDLSFRDLGVSGFTGKHLKGGLGDFLTAIEKGLVKAGDTLLIESLDRLSRQDVDRASELLRNILRSGVDVVTLSDGEHYTSESLKDPLALIKSILIMQRAHEESLRKSERIQAAWNRKKELISEGIKISKRCPAWLKLNDDRKSFSIIPEKVETVKRCFQLRLEGKSIWEIVRTLNDEGHQTLNQYKAGKFGQTSVQDLLKNRSVIGYFTPKGREEIAGYFPPIIPETDFYKVQQLSYSRYGRKPASDKPMAVNLFKGVIRCSECGHALIITGFSDTRNGIYRCPLRNENRCSAKGLSRKQTDGTLLALLSRLDRFDSDTTNTIDTLKLHREHISSNIEKLVQLSLEIEDLSAITSKLKQLKGELSQVDADIEKETQRLKSIDVGCLSDCDLTTKAGRIEAQLIIKSAVKEVVLNTAKRRCKVTFHNGKLIDLPITETPSDNVTEAIQSLSEVTERGLIDVDEVII

SEQ ID NO: 7493 - protein, 506 aa, synthetic construct
MRSVITYLRFSSATQGAEGADSTRRQNELFKQWLRKNSDAQVVASFNDEGLSGYKGKHLSGQFGDMLSRIESGEFPEGTILLVEAIDRIGRLEHLETEALMNRIIAHGIEIHTLQDGLIYTRDALSDDLGISIIQRVKSYIAHQESKQKSFRVSQKWEQRAKLALAGEQRLTRNVPGWIDPETFKLNEHAETVRLIFKLLLDGESLHNIARHLQSNGIRSFSRRKDANGFSVHSVRTILRSETAIGTLPASQRNDRPAIPNYYEAAIDASTFNKAQEILGKNRIGRTPASDNPLTINIFKGLFRCQCGASVHPTGTKNKYQGVYRCNNHLDGRCDVPPLKRKPFDRWMIDNFLGMIDVVSDGETERRIAALQHEVETVTARIKKATALLLEMDDITELKAQVKELNQKRTELQTTIDTLKRKTSLTDKELTQLKDIDLMTKAGRVECQLILSKHLKGLTLGKDSVTVTLQNDTEITIPTNPLPLNDGTSIFEIADKELLEIDAYQL

SEQ ID NO: 7494 - protein, 506 aa, synthetic construct
MRTVITYLRFSSAIQGAEGADSTRRQNDLFKQWLKKNSDAQVVASFSDEGLSGYKGKHLTGQFGDMLARIESGEFPEGTILLVESIDRIGRLEHLETEALMNRILGNGLEIHTLQDGLIYTKDALADDLGISIIQRVKAYIAHQESKQKSFRVSQKWEQRAKLALAGEQRLTKMVPGWIDPDTFKLNEHAETVRLIFKLLLSGESLHNIARHLQSNGIKSFSRRKDANGFSVHSVRTILRSETTIGTLPASQRNDRPAIPNYYEAAIDASTFNKAQEILGKNRIGRTPASDNPLTINIFKGLFRCQCGASVHPTGTKNKYQGVYRCNNHLDGRCDVPPLKRKPFDKWMLENFLGMIDVGNDGEAEGKIASLQHEVEIVTTRIKKATALLLEMDDIDELKIQIKELNQRRTELQTTIDNMRRKASLTDKELPQLKDIDLTTKAGRVECQLILSKHLKGLTLGKDSVTVTLQNDTEITIPTNPLPLNDGSPIFEIADKELLDIDAYQL

SEQ ID NO: 7495 - protein, 506 aa, synthetic construct
MRSVITYLRYSSAIQGAEGADSTRRQNDLFKQWLKKNSDAQVVASFSDEGLSGYKGKHLTGQFGDMLARIESGEFPEGTILLVESIDRIGRLEHLETEALMNRILGNGLEIHTLQDGLIYTKDALADDLGISIIQRVKAYIAHQESKQKSFRVSQKWEQRAKLALAGEQRLTKMVPGWIDPDTFKLNEHAETVRLIFKLLLSGESLHNIARHLQSNGIKSFSRRKDANGFSVHSVRTILRSETTIGTLPASQRNDRPAIPNYYEAAIDASTFNKAQEILDKNRKGRTPASDNPLTINIFKGLFRCQCGASVHPTGTKNKYAGVYRCNNHLDGRCDVQPLKRKPFDRWMIDNFLGMIDVGNDGKSKRKIASLQHEVEIVTARIKKATALLLEMDDITELKAQVKELNQKRTELQTTIDTLKRKTSLTDKELPQLKDIDLMTKAGRVECQLILSKHLKGLTLGKDSVTVTLQNDTEITIPTNPLPLNDGSPIFEIADKELLDIDAYQL

SEQ ID NO: 7496 - protein, 509 aa, synthetic construct
MRRAISYIRFSSERQLKGDSVRRQSKLVTDWLDKNPEFYLDSSLSFKDLGKSAFSGKHLKGGLGDFLTAIEKGLVKAGDTLLIESLDRLSRQDIDIASELLRRILRAGVDVVTLSDGEHYTKESLKDPLSLIKSILIMQRAHEESLRKSERVQAAWNRKKELISEGIKVSRRCPAWLRLNDDRRTFTIIPDKVEVVKRAFDLRLQGLSFWAITRTLNDEGHLSLNQYTPKQKGWSDTAVKKLLRNRAVIGCFTPAGREEVQGYYPAIISESLFYRVQQLNTGQYGRASVSSNPLSVNLFRGIIKCSECGATIVLGGYALKRFGMYRCPNRSANRCSAKAISRKQTDATILYMLALCDRFETENTDTIDSLKLQREDLQRKISKMAELAIELDDMTIITEKLRDMKNALSKLNHDIEEETKRIKAITTGSLKDIDRTTKEGMIETQLLIKGVLKEIVIDAAKRRCKVTFHNGRIIDLPITENPSEDVTEAIQSLSEVTEKGLIDVDVVAI

SEQ ID NO: 7497 - protein, 547 aa, synthetic construct
MKLLVTYIRWSTKEQDSGDSLRRQTNLIDAFYAKHKDDYYLLPAHRYVDKGKSGFHQQHKAQGSDFRRMFENVMSGAIPEGSLIVVENFDRFSRADIDTAIDDVRQILRKGVSILTLGDGELYDKSALTDPVKLIKHIIIAERAHQESLVKQKRIAQVWNHKTQLARELKKPMGKQAPGWLELSEDGSHYIVDEDKASLVNIIYDKRLSGMSMFAICKWLNEQGYPTINQRKVRISKTKKPDGNWSALSVKHILTSRSVLGYLPAKISTEDRKTVLREEIEGFYPQIVTDSKFYAVQQLLEETGKGKTSSGEHWLYVNILKGLIRCKCGLVMTPTGIRKPVYQGTYRCNGNKESRCSYGTVSRKLLDTQLCSRLFSKLSQLHDEATDTAKLDELQRRLNTVDGELEKLTETLIQLPNITQIQEALRVKQEEKDELIVQLSREKARVKSVSSLDLSGLDMESVEGRTEAQIIIKRLVKEIVVSGNEKLVDIYLHNGNMIRGFPLDGKDDHTLTLEEATDEMQSLDDMLIFGEPVTRIYPAGDMEEVDA

SEQ ID NO: 7498 - protein, 547 aa, synthetic construct
MKLLVTYIRWSTKEQDSGDSLRRQTNLIDAFYAKHKNDYYLLPAHRYVDKGKSGFHQQHKAQGSDFRRMFENVMSGAIPEGSLIVVENFDRFSRADIDTAIDDVRQILRKGVSILTLGDGELYDKSALTDPVKLIKHIIIAERAHQESLVKQKRIAQVWNHKTQLARELKKPMGKQAPGWLELSEDGSHYIVDEDKASLVNIIYDKRLSGMSMFAICKWLNEQGYPTINQRKVRISKTKKPDGNWSALSVKHILTSRSVLGYLPAKISTEDRKTVLREEIEGFYPQIVTDSKFYAVQQLLEETGKGKTSSGEHWLYVNILKGLIRCKCGLVMTPTGIRKPVYQGTYRCNGNKESRCSYGTVSRKLLDTQLCSRLFSKLSQLHDEATDTAKLDELQRRLNTVDGELEKLTETLIQLPNITQIQEALRVKQEEKDELIVQLSREKARVKSVSSLDLSGLDMESVEGRTEAQIIIKRLVKEIVVSGNEKLVDIYLHNGNMIRGFPLDGKDDHTLTLEEATDEMQSLDDMLIFGEPVTRIYPAGDMEEVDA

SEQ ID NO: 7499 - protein, 596 aa, synthetic construct
MKKAFAYCRYSSDHQRNESIDAQLRAIRKYADNNDILIVQTYIDEARSATTDNRPDFLRMFEDIEKVEVDTVLVHKLDRFSRDKYDSAIYKKKLKEKNITLFSITEQLGDNPEDIILESLLEGMSQYYIANLSRETMKGLMENAHRGLHNGGTPPLGYDVDPETKKYIINETEAQAVRLIFELYIKGMGYVKLCDELNKRGFTTKTGRAFRKNSFESILQNEKYKGTYVYNKTLQKVNGKRNNRIKKKDDEIIRVDGVIPAIISKDTWNEARKRKELNKHTTNHKKQNYLLNGLIYCGKCDSKLVGNSRTAGRNKTRYVTYDCYKRRQTKQCDLKSVNKEFIEKQVVKEIEKMLLDKDFLKSRMDEIKSSNNQKQKKIQSEIKALEHNLSKINRETENIIIVIKQGLFNDQLNLELKKLEESKEEIFMKIDELNAKLKEIITEDKIEDVINSYADNLNHIKALREQQQHLSTRKVKNENYLNNNPGIIELDGKKVRSLHYLQRTIDNMQIGKQSEVIEHEKKSTLEQVDFIKQNYIKDFYDFISLEDKAQLIREFVNKVVINEEYADVYFDIVHKNGGDGGSRTRVREFILIKYNN

SEQ ID NO: 7500 - protein, 507 aa, synthetic construct
MKRAISYIRFSSEKQSRGDSLRRQAKMVTDWLKAHPEYYLDESLTFRDLGVSGFTGKHLKGGLGDFLTAIEKGLVKAGDTLLIESLDRLSRQNVDRASELLRNILRSGVDVVTLSDGEHYTKESLRDPLSLIKSILIMQRSHEESLRKSERIQAAWNRKKELISEGIKISKRCPAWLKLNDDRKSFSVIPEKVETVKRCFQLRLEGKSIWEIVRTLNAEGHQTLNQYKAGSFGQTSVQDLLKNRSVIGYFTPKGCEEISGYYPSIIHETDFYKVQQLSYSRYGRKPASDKPMAVNLFKGVIRCSECGHALIITGFSDTRSGIYRCPLRNENRCSAKGLSRKQTDGTLLALLSRLDRFDSDMTNTIDTLKLHREHISSNIEKLVQLSLEIEDLNAITSKLKQLKGELSQVDADIEKETQRLKSIDVGCLSDCDLTTKAGRIEAQLIIKSAVKEVVLNTAKRRCKVTFHNGRAITLPITENPSEDVTEAIQSLSEVTERGLIDVDEVII

SEQ ID NO: 7501 - protein, 536 aa, synthetic construct
MRAAIYARFSTDLQSDRSVEDQVALCRSHADRLGLTVTDVFADRAASGASIHGRPDYQRLIGLALAGQYDAILTEDLDRLSRNLADIARLYETAQFAGVKLVTVADGEISEMHIGLKGTMSALFLKGLAQKVRRGLAGVVRDGRSAGGRAYGYRAVAGQPGKLEIVPEEAETVRRIFAEYLAGSSPREIAGKLNDEAVPPPRGRFWAAVTINGNRNRGHGILLNPLYAGRMVWNRVRMVKDPATGRRISRVNEASEHQEKAAPHLAIVDAETFDAVKARRDGRALNGPRDRAKPRHLLSGLLRCGGCGGGMSVKDRDHGRVRIRCTTAAESGSCSNRRSYYLDQVEQAVVGGLRERMADRDAIALYVRVYNEERQRLAASTVANRGQIERRLAAAEREHERVYRAYVKGLIEEDALERELPPLKAERDRLRAELATAEQPPQIVTLHPATVRHYLASIERLEVAIAEGEEHGGEAKAALRDLIRTVTVQPAPAGEAPQIDVLGELSALIGGAHFPTKRSGGPMVAGEGLEPPTRGL

SEQ ID NO: 7502 - protein, 540 aa, synthetic construct
MPRCAIYARFSTELQSAHSAEDQIASCSARAEREGWEIAGVYTDIAISGASNRRPGMTAMLADAAAGSFDIVCAEAIDRIARNQADIATIYQRLEFANVRIHTLTEGDVSELHIGLKGTMSALFLKELAEKIRRGQRGTVSRGRVPGGLAYGYEVVPAIRPDGELDRGIRRIVPEQADVILRIYREYATGRGPKAIAKGLNADGIPAPRGGDWRASAIAGSRARGLGVLHNPIYAGRYLYNRLHMRRDPETRRRISRVNPAEERVSVEMPELRIVPQELWQQVQDMAADRSSGPLNQRRRPKHLLSGLVQCGRCGGAYAMIGGGRMGCTRAPEAGTCDVQRTIARSAIEARVLRGVTEKLLESDAVSLLVREYHTEVESRRAERVLDAGDVDRRIKKTQGQIERLVSAIADGAADFADVREALAARKAELLDLQRERQEIDAVPVIAMNPAIVEDYRKRVRVLATTLDGSSATNDEIKARLRDMIDGVRVMPNNHDGFDIEVLSSFGAVVALATDKPRGRSSRSVMMVAKEGFEPPTPGL

SEQ ID NO: 7503 - protein, 539 aa, synthetic construct
MPRCVIYARFSSELQSIHSCEDQVALCKTRAEREGWQVVDVYTDVAISGASNRRPGMTTMLSDAAKGAFDIVCAEALDRIARDQEDIAAIYKRLTFAGVAIHTLSDGKVDELHIGLMGTMSALYLKDLAEKIRRGQRGSVARSRIPGGLTYGYSIVRAFGDDGEPVRGLREIVPEQAAVVRRVYDEFLAGRSPRQIAISLNADGVPSPRGSVWTASSILGSRSRSVGILHNAIYAGRFVYNRVQMKRDPETRRRVSRPDPADERISAHIPELAIVSAERWQAAQDAIANRAAQPLPQRNRPRHLLSGLVRCGKCGGGFAAINARRLGCSRTREAGTCDQQGTLARAEVERRVLACLVDQLLSPEAISLLVKTYHDEVAAATSDRRRRTAAIDKRIAEVDVALGRLVGAIETGAADFRMIREALVARQADRERLVRERAELGAIEVIALNPAIAEAYRRRVRELVYADGSGAPELVARQLRELVEQVTVRQTNSGWSIDVLTSLSGAVDLVEGRSPPEGSLGRSVAVVAKEGFEPPTPGL

SEQ ID NO: 7504 - protein, 506 aa, synthetic construct
MRTVITYLRFSSAIQGAEGADSTRRQNDLFKQWLKKNSDAQVVASFSDEGLSGYKGKHLTGQFGDMLARIESGEFPEGTILLVESIDRIGRLEHLETEALMNRILGNGLEIHTLQDGLIYTKDALADDLGISIIQRVKAYIAHQESKQKSFRVSQKWEQRAKLALAGEQRLTKMVPGWIDPDTFKCNEHAETVRLIFKLLLDGESLHNIARHLQANNISSFSRRKDANGFSVHSVRTILRSETTIGTLPASQRNDRPAIPNYYEAAIDAATFNKAQEILDKNRKGRTPASDNPLTINIFKGLFRCQCGASVHPTGTKNKYAGVYRCNNNPDGRCDVPPLKRKPFDKWMIDNFLGMIDVGNDGEAEGKIASLQHEVEIVTARIKKATALLLEMDDIDELKIQIKELNQRRTELQTTIDNMRRKASLTDKELPQLKDIDLTTKAGRVECQLILSKHLKGLTLGKDSVTVTLQNDTEIIVPTDPLPLNDGTSIFEIAEKELLEIDAYQL

SEQ ID NO: 7505 - protein, 559 aa, synthetic construct
MRTVIYARFSSLLQNSRSIEDQIAVCRDRCEREGWTIIDIFTDYAISGAAGIGEGQRPGLAAMLARVEAGGIDQVLAEATDRIARHQGDSFTIRERLTYARCRLFTLSDGEVTDISGTFKGLMDAQFRKELGAKIRRGQKGTIASGRSPAGLAYGYRTANRIDASGRPVRGLREIDPEQSEVVRRIFRLFVDGQSARTIAGILNAEGIPGPRGAIWRASTINGDGPRGNGILRNELYVGHLVHNRTSKVVNPVDRKVRIRVNPATEWTIEAVPHLRIIAQEDWDATRSRFDHTARKPLHTRVRPRRMLSGLGQCGVCGGSWIVVSGERWGCKTNRAEASCTNTATISTKRFEERVLAGLKTKMLDPDIVAIFVKEYHEEYARRAAETRRDTSRLQRTIDDADRKIARLVEAIAAGGGEFAEVKDALAKARMDRDAARDSLAEVEALPVVALHPSVAADYRREVEQLHKLLKDPEAKEATVPALRALIDRVVLTPAPVGRGVEIEIEGRLAAILKLATGGRLPPSIEADTPHEEGEGKVMYASDQFALPAPLPDIFGKRA

SEQ ID NO: 7506 - protein, 565 aa, synthetic construct
MQAIIYARFSSDAQATGDSIPRQLRTCTPYIESKGWTLETILKDEGRSGFKGHHRLANAALGTLEREARDGLHVGKVLVIERLDRLSREDHNETYDLIRALTKSGLSIATVEGDRLYEAYQPIEFAAMIELIVRLRMNHEESAKKSSHGRAKWDARRTAMTEAKKPVSALCPAWLRISEDRSRYEVFENRDDTVRLIYELADNGMGSQRIARSLNERGIKPWARFANRTPRAWSRGTLVRMLTDPAVTGDHQPMRMVGDKRVPVGDPIRDYYPRIIDPDLFARVSTAAADRKAVAGNKADIPNLFAGLAHCATCGAKMNYRNGRRAGYVRVRNGVEQAPTKTKAASLVCPIANDGGCSNKRTIAYVSLERALIDSALHLSLDDASFSRREDVARLDIQIADRQRDHDIAYKAAEELWMNAGASAIAQKLAGQREAEAEAIAAEIVELRASRAMAAGKVSAAEHISRLNAIRENLEAEDDEERTTARLKVAQGFRSVIDRIDCRDDGVSIVKFVGGRRVISVKAGRGRAAPRVWDFDLMHSMRDNATDDVREARYLRRVCPDLSSK

SEQ ID NO: 7507 - protein, 538 aa, synthetic construct
MPQTAIIYSRFSSAEQGKGYSLERQQTLGAQFAAEQEWTVERTISDEGRSAFHGANRLEGAALHQFELEARNGLHRGKVLVVENIDRLSRQGAKAAATLVWGLNEHGVDVATYHDQHVYRAGESDDLLDVFKVIIHAQNAHQESHKKSKRTAASWASRLDRIAAGDKSVMVPNLPNWIDRVDGQMVLNEHRMKVLNDIFDLYIDGMGIHRILSVLHNRGEESWTPEDQRRGNNGWFYSYIYRLLNKRAVLGEYVTHDGKTISTDFFPQAITAEKWNRAQAALAMRKGNQSTEKKFTNRNLLQGLVVCEKCGGGAHFGHTTDTVQKYIKKSGEVVNYRRKTYRKLRCDRARRKHNCDNGSILNYDVIEATVLQEMVPQLVDKRLEDTGIKQARESVAESHRLRAGTQHKLDNLIDALADGSSKAITERIRVLEREIEQLDRDIEGSEKFLAIQLSRPSPLEDGALVQKLRDDLIDEDDDIRTYARGRANMALRRLIKRIVLTETDCFRIEPDDYSWWLFDADGRMIEGAWTLSPEEVTA

SEQ ID NO: 7508 - protein, 507 aa, synthetic construct
MKRVISYIRFSSEKQAKGDSLRRQSKMVTDWLKAHPEYYLDQDLSFRDLGVSGFTGKHLKGGLGDFLTAIEKGLVKAGDTLLIESLDRLSRQDIDIASELLRNILRSGVDVVTLSDGEHYTRESLRDPLALIKSILIMQRAHEESLRKAERIQAAWDAKKEAAKAGIKVSKRCPAWLKLNDDRKSFSVIPEKVETVKRCFQLRLEGKSIWEIVRTLNAEGHQTLNQYKAGKFGQTSVQDLLKNRSVIGYFTPKGCEEISGYYPAIIDETTFYKVQQLSYARYGRKPASDKPMAVNLFKGVIRCSECGHALIITGFSDTRNGIYRCPLRNENRCSAKGLSRKQTDGTLLALLSRLDRFDSDMTNTIDTLKLHREHISSNIEKLVQLSLEIEDLSAITSKLRQLKNELSQVDADIEKETQRLKSIDVGCLSDCDLTTKAGRIEAQLIIKSAVKEVVLNTAKRRCKVTFHNGKAITLPITENPSDNVTEAIQSLSEVTERGLIDVDEVII

SEQ ID NO: 7509 - protein, 491 aa, synthetic construct
MTANVPVPHGKTVGGIRVSTAAQADRYGPERQRSDILGEADRAGLRITDWIEESVSGADEERGLENQYFALARDHPGLRVIWSHPNRVGRHVEVTVGIVRRLHKLGAVVHIAGIGNLRDRRNWREFIRDAVEAENDYSTIVYNLSAGKFAKAQRNMWPHGKQPFGYRLVRDERGRSTTLEPHPDDAPVYRTIVEMSLAGHGAQAIADHLNQLQVPNIRPIGVGRQSYGWGGTPVRTILSNPRYLGRMEYTGPDGQTTTVTYPPLITPEQWQAVQEGTADRLRQRSSRSDYPALFAGHLTCSSCGSTMSLEVDRPVGAQKRYARYVCHWHNKRKARAARGQPLCLGETRWRVTTLDEMGWRFLVYNLTQPEILLQLLDVGDLPLPDYSRRLEEIDAEMAKVLDMSVRLGLPESVALLRLVPLQEERARLQAVEAPVPRVITPEDAATMAQGFAERLARFETFEERRSALRRWRVRLSVDMDGIAGIQLRPGE

SEQ ID NO: 7510 - protein, 465 aa, synthetic construct
MTVRLYVRVSTQQQATDGFSIAAQRSKGEAWAAYQGHTDVEVYTDAGISGKRDDRPSLTALLADLRPGDIVVSYALSRLARGGAVQLLGIVNDIRERGARVVFLQENLDTDTSTGRLMLTILAALAELEVEQTRERTEMGRTQAAREGIWPHSDQSLPFGWMRGEDGRIIENPAGAETVRLIFAQGSAPYNQTAALLNSLGLSGRRGKLTWKATQVRDVVLYQGYATGEVRYRQDARPDSPEDHLSIPAPALVTPDVWAAAQRDRTVNHPHSQPGLYPLTGHVRCSCGARLFGKIKERPSGESAIWYVCYEAARRTPACPTNGRNTRLYPARPLHQQARDLLAHLLRHPNDPAHTAIAYGSVPITDPHTAERAEIQVKLDRLLDAYLSGLIEKPTYEQRQRSLSGLLQGLRPPARQNLTAQPAREDLAALVLACPNEELAAVLDDLQVEFVVRDGALALLHYAPL

SEQ ID NO: 7511 - protein, 655 aa, synthetic construct
MNKPVEFFAVYTRVSDRNQEAGTSPERQRRLCIEYGERQGWTLLEGGAVHDTHTGKEFKKRLNVNKILELVEEGKVKHVVFYKVDRVARDQQVLKDFLTEIYANGGDVSIQQKGRTFPKVREALKETKLEGFLAEWERDSIVEKLQDGKLEQFEIGSVIHKLPLGYQSEEVFLEGGRKFKKVVINAQEQADMITFLEKFVETKSIKDAIDFAAEQGIRSRDWKPRGQSKREGLSYNHSTFRDIIKRLDEYVGMPFVQYYGDKKEYQREFSYPALISQELYNAVKQAYNRKTRDNYQEVKPFKDIVYCSCCGSKARIVYKEKSQLKKDGSKYTTFIYGCSRHHLLSAKNYRTTGSHSSEECSRTIRLPQVVDIVTAFLDSASLLSDASKYAEELTRTVVDLSELRLNVEDLKEQRESLKAQRDKVSKRVTRLYDDENMPAEQRDFMLAESYAEIKGIDATLSEVSEEIRGDEKEVSRIVGLLEESGLTVDDALFQAVEEAEVELPSGPIEVETVDNAAWVAGRLLAAPVIPAVITRQSERMRSLLGGLKGAIEAQEWKTVNDTLYLLGVRVYVNFAEKLPHGGKAVPVGSSVRISLQDREYLPAERDTLLGVSQNTTKGHALKNIPMLREALNARGVPVKAPEPLAEGAAQDGRLL

SEQ ID NO: 7512 - protein, 598 aa, synthetic construct
MSSDLEPRTAQGRRRTSFAGWESLLGLDGSAPPEFDLGIQGQAVLYLRVSTQRQMFTAIDIDADGNSIATQREACLVRAKRVKAPVIKEFVEPGNSAQTIAKRPVFRELLQYVEEHPEISYVVIYMRSRAFRNSGDAAITKRILAGMGVKLISAKEDFGDGYMAEAMEAVTDIMNEVQVRQSGEDIKQKLLNKAKNGGTVGRAKLGYINDRRDFDGRLVNTIGIDEARAPLIRWAFEQYATGDYSTTKLAALLAEQGLTTRKSSKWPERPLSRSQLGLILRDPYYLGMVTFKGHVYPGRHEALVTPALFDRVQQVIDARVKRGQRDRVHNHFARGMLHCGRCHDAGREHRLIFAEAKNHANQIYEYFLCRGRQDGLCDLPYLPTAELERALTREFASLRLSPEAIDEAKREVQAALDHVLSRHAEQRARLQKELKKLDVQEERLVDLASDGALATDKLRLRLRDLQIKKHEVRASLDTTTESLQQHTEMVLSYLDLMARPDALFTAATGAVKRKLLAAFFSRIWVDDDGHLPQVAREFQSLVTDIRDAVLTSPANTKSVGENSDASDSERLDLYLKVICSSKTSLVAGAGLEPATSRL

SEQ ID NO: 7513 - protein, 546 aa, synthetic construct
MLRLGVYARVSSDDQAERGTIENQLEFARKYADLHQLEIVKWYKDDGVTGTIPLEARPAGRELLQDAKNGIIDLLLIYRLDRLGRSARIILNSVHELESDGVKIRSMTEPFDTGDPSGRFLLTILAGVADLERETIIERLWYGANRAARAGKWLGGIVPYGYRVDSEGYLVVCEELLPHSDMTEAGVVRLIFHMVANQGHSCIKVSEYLNALGVPTAYARDDRKVTRGKRKQKTAGIWRPSRIRGIITSTTYYGLHIYGKRSKRKRDLIEREVPAIVDLETWEKAQAVLRSNQIEAMRNTKNQYLLRSLLKCQCCGLTYVGIHYPGSKRALKGFYVCTGKQAFKGPMQGKCTSKNLPQDWIEDLVWRDCLSFINQPGEALQEIAAAREVKQTKKVDLESEITLIQKSIDDKDVERQSILDLFRKSIITFTDLEKQIQKINQEKEILEQRIKEIRTSLQVDRDYSTKVMNAFQLLTSLRNKLGDNPSFEARREIVKALVQRIQVHTTPSEGSKRPRASVTVQYCFSKDIIYTDKDYTNQLTETEQER

SEQ ID NO: 7514 - protein, 484 aa, synthetic construct
MSMRIAGYIRVSTEEQAEKGFSLDEQRDRLNSYCKAMGWPAPTIYEDDGYSAKDLRRPELARLLSDVKTEKYTLIITTKLDRLSRRLFDILSVIDYLEKHNCSYVSASEAFDTTTPAGRMTLQMLGMVAEFERERISERVRDNMRSIARKGEKIISRPCFGYEVKNGSLEINLEESLAVHQMARWALEGRGAWEIAKRLNERGITTKDGNQWQDRVVRELLKRETLVGDFVYNRTYRKGTRILTRPEEEWIRIENHHEPILDRDTFDAIQKIFQSRKQSASRYVDETNYLLTGLLVCTHCGGKMVGRKDSKHGKNIYFRYVCNTYMKKGGCYFHHLLRDDLEFTVIGEIKKIAIADPNDLEITVAKTNSEKRADKASIQDRLRKLDLKAQRQIEAYEDDLITAHDLKKAKERIEKDRQHLLEQLKEMEKSEQENAGVIVQQKVKRLLDDVLSLDRMKSKNAIRQLIHHVNISNASEVVITWYAD

SEQ ID NO: 7515 - protein, 502 aa, synthetic construct
MARSSDYDIRHVALYLRKSRGSNDEEIDDLAQHRGQLIGLCEENGWSYTEYAEIGTGDKIDARDKMIELLEDVAMEMFDAVVAVHLDRMSRGDEADQARIKKTLARAECLFVTPYKTYDFNDESDILTAEIEGLGARLEYKQIARRFRQGKARRAKAGFWSNGTPPFPYVYNNEIGKADPSDEHRLSVYRRMIDMALSGYVADDIAWELNKDGIPSPRGQLWQPAVVRRLLLDEVHLGKIVVGKKRKLVGADAIIRKKKEEWITYNNCHKAVKTQLEHEKLTYIIQRDKEIPTAARAGANTFSGLIRCAKCGSTMQIQKRTNRPSDLLKSCVHKDLYGTRCDNLGGSMVDIAVAVKESILLKVSQLEDAIRNGVQLEDIRHMLEMAEHKLTEIKLIEKRLGNLNLRYLDGDYTRDEFMPMKEGFTNQIAELESEYQVIQNQADNSKNARNEDMLETVKRVLHIVDKEADPKDINRAYKSIIHSVVWERDSLDNTGSVIVNFL

SEQ ID NO: 7516 - protein, 573 aa, synthetic construct
MQQQRGLPQAPAIYARISLDRTGQALGVQRQIEACRERCEALGWPEPKVYSDNDISARSGKRRPRFEQLLADVQAGYVDGLVAWHLDRVLRRVVDLERVLDAIEAQRSAIPVVFLQAGEIDLTTPSGRLLARILAAVAANEGDVKSARLSAQRAQAAQAGRAHGPLGYGYDDEQRIIPEEAGVIRDVARRLIEGDSLYSIAADLNERGVPTPGSGKWDARRVQRAAERDERQAVTAVIEGARSSSSLTPGALARLLRKAGGNAEVCSAAWVRDQLWVEHVTSHDHGLDDSTIARMLFAAGVPADRSYWRAANVRAMVRRGSLCGWREFSPGQRGGYGELISPGDWTPILSKEAIEDIRLVTDRPRTKRGREPKYLLAAILKCGKCGSSLAGSPTRNGGPFRYACSKQPGRPHTCGGLTIAGPQTDRIVSMAIIDAVAEAKVRSGTAQRRTANGAAARGAEETIAEISRLRKHYGLEFAAGRLHQEEWDAVREGWALRQREAERVLGTWAPNLHAVLSDVPKDRPDIEKWWESASVRRKREIVQVLVERIEIAPREKINNRFDDSRIGEPVWRI

SEQ ID NO: 7517 - protein, 519 aa, synthetic construct
MNERPKAIIYCRVSAKSQQDDGSGLDSQELRCRQHAAAKGHQVIAVFPDTITGGGDFMKRPGMVALLSFLDAQPNERFVVIFDDLKRFARDTRFHLDLREAFRKRGAQIECLNFKFDETPEGEFIETIMAAQGALERKQNGRQVAQKMKARMQSGYWTHSAPIGYKYQAVRGRGKMLVLDEPLATIVRDAFEGYAMGRFQTQAEVRRFFESFPEFPRNRKGVITQQRVVDILTQPLYTGYICSETYDISWLKGHHDPLITVETFEKVQARRDGVAYAPSRKNVGDDFALRGMAECADCGVPLRSSWSKGRGKSYAYYLCQTKTCESYGKSIPRDKLEEDIGAVIRTLQPTQNLFTIAKAMFALAWDQRSSQAAEIIRSGQRQIDSVEKQIETLLSRVMEASNATVIRSYENKITELERSKIVFAGQLANQAKPKGKFEDQLEPALTFLANPWKLWQTGHIGVRRTVLKLAFQDRIRYCRKQGPRTPKIALPFKAIDALTDYAVRNGAPCRNRTSTPLGT

SEQ ID NO: 7518 - protein, 485 aa, synthetic construct
MTGRNFKRKIMGCIRRVEAGEIRGIVVWKFSRFGRNDMGIAVNLARVEKAGGDLVSATEDVDARTAVGRFNRRILFDLATFESDRAGEQWKETHQWRRAHGLPATGGRRLGYIWHPRRIPHPTDPGQWTIQREWYEVEERARDHIEDLYARKIGDGYPVPDGYGSLAAWLNGLGYRTGDGNPWRADSLRRYMLSGFAAGLLRVHHPDCRCDYTANGGRCTRWIHIDGAHEAIITPETWERYEAHVAERRRMTPRARNPTYPLTGLIRCGGCREGAAATSARRASGRVLGYAYMCGQSRNGLCENPVWVQRYIVEDEVRGWLAREVAADVDAAPATPEPVERDNRRAREERERARLEGEHTRLTNALTNLAVDRAMNPESYPEGVFEAARERIVKQKQAVAEALEALAAVEATPERAALMPLAVGLLEEWETFEAPETNGILRSLVRRVALTRGAKGKKGVEGSGETRIEVHPVWEPDPWADDAPQ

SEQ ID NO: 7519 - protein, 512 aa, synthetic construct
MKAYLYIRFSSKQQEQGDSVRRQEEAARKWCKAHDVELSDMTFEDLGVSAFKEGGKRPALADLIEAIELGKIARDSYVLVENDDRLSRHGWYATQQMIRRMVLDLGVKLVVISSGTVYDSSNIEDIAQNILLMFNADRAHKESLRKSEMIRAARQTRRDDETLTGKLPFWLKRVDDKILLDQQKADIVRMIVELKKSGKSNQATARFLNDQKIVSATGGKWNASAIRMVYSNHAIYGAKAYFITDGTRKMTLDKVVEDKFPAIVTKADFDAVQTTQKHRGRRSTKTPFSLLLKCGKCGGGMVQRTSMYKEKKMIYRHCIASLEGRCDQNKLIREPDVILSNALKHMQYIDSVEQYVSRVSGIQAQIDTLKQTQDRLIELGQVDALTNLYTRLAELEQKLVQARIEDEANEQKPIDFNYKNVFDLEDASEQNAMLKRVIDSIEIHYLGVVDKKTSSKWRIKVNQRNKHHQGFVINQYHGFGNWEIIHMTDTEKFKKELEALTDDIDDCIDFDE

SEQ ID NO: 7520 - protein, 521 aa, synthetic construct
MANVTMIPARVNRRAKREEKETEIPKTRVAAYCRVSTDSDEQATSYEMQVEHYTEYISKNPGWELAGIYADDGISGTNTKKREDFNRMIEDCMVGKIDFVISKSISRFARNTLDCLQYIRQLKDKGIAVFFEKENINTMDTKGELLLTIMASLAQQESESLSQNVKLGLQFRYQAGKVQVNHNRFLGYTKDDEGNLIIEPTEAAVIKRIYREYLEGASYRDICNGLMADGILTGAGKKKWIPSTIHKILSNEKYIGDALLQKTITTNLLEKKRENNNGLAPQYYVEDSHEAIIPRDLFMRVQEEMVRRANLRSGKDGKKKRIYSSKYALSSLCTCEKCGDIYRRIAWNNRGKKYTVWRCCTRVEHGPGECDAPTVLEEDLQAAVMKAINKVVGQKSTVIANLETILEQTAICADEELAELDEKIKAVQLELVDRATSSEGYEDLARESDRLNEKKQKILVTLAEDKGRQEKKAELIDFLHEQTTEFEEFDDGLVRRLIEQITVHESGTFTVEFKSGTMVEV

SEQ ID NO: 7521 - protein, 514 aa, synthetic construct
MAIITKIEENKAVIGKKKVAAYCRVSTDQDDQLLSLETQKAHYESWIQGHSDWEYAGLYYDEGLSGTKMDTRPSLLRMMEDCKHGLIDYVVTKSVSRLARNTADFLTIVRTLLDLGIPIYFEKENIDTGSMENELMLSIMSSIAESESVSISENNKWSIQRKFKNGTYKCSYPPYGYDWDKKNGEMVVNPEQAEIVRYIFAQTLAGVGTHDIAKDLMAKGVPTKKGGKWTGHTVNGIIRNEKYTGDCLFQKTYTDSSFVRRRNLGEMDQYYVEDHHEAIISREDYEAANDVIDRRRQEKGIELDNGKYQNRYPLSGKVICGECGGTFKRKTYTHKVVLACTQHIDDKEKCSMKYVDLEAVEVAFATMMNRLVYGRNKVLRPFYEALQQSNQTEALLKIHDIQEQLDALVEKKQTIKGLFAKGVIEPAVYTQSLNRVTAEVERLTTEKDALSYRACSEISHIEETRKLLSFADKGEFLDGFDGEIFGTYVDRIVVKSQTELEFQMKCGLNLIERI

SEQ ID NO: 7522 - protein, 673 aa, synthetic construct
MIGEETLREEIFQYDKAKFKGICVPYARFSTKGQSKVGKKSLERQLSKAREYAKRNNLFINEDLIFTDKGVSGYSNQGELSKAFKKGQMATMLLLLEEVPPEERDNVYITFHNFDRFSRMSPDAAQAHFNKILNRGFKIVTTIDNQLYDRRDKGMSNMLISIIKMTTAWQESLNKSIYITDALSRKKKVIEYLYNHPSQKGKHKHIGVVQPSIPRWIDQENITYEYIDADGSKRTDTFKKFSLNQNKTEVVRKIFELKIAGLGYTRICQKLNNDGVEVFEQGRFKKAKKWHPYAVQNIITSDKVLGHITLKEMVTEEYHCKESDEIKTKKVKKEVTSKLENYYPAVVDEEVFRLANVLKFQEKKGKPLGRIGERTNIFATFMSCYCGATLQYSRSQVNTRSNKAPVYREQLRCNNALVKNGCFDDYINYVELEQAFFKYVNHIDFREVCLVGDKSLETEIKNLQAEITYLNGQKKELKLKNSGLEKTFESAISQGLNADYVLVALNEAKKSADLIETKINDLKVRITKLQLSLDSKESDFLDIFEYSKRINNSSTETKIMMRKKLNEFLHSKIKWMEVCSSKQSKFVILCFHDDVIRTFAYGEKYANDLMFNTIKISYEVDDAQLNYELFLIYIHQIKRSLRGETEVVSNGDLIEALQRLKRKFYAGKGIDYV

SEQ ID NO: 7523 - protein, 653 aa, synthetic construct
MFDYDKNIFDGICIPYARFSTTEQDKVGRKSLERQLEEAKRYASQNNLYISDDLIFTDKGVSGFAKQGQLSKTFEKGQMALLLEVLEDVPFKERENIYLCFHAFDRFSRQHPEVAYEQFSRILKRGFNIVTTIDDCLYSSKEADLESMLISIIKMSSAHYESEVKSLYVSDAHRRRRETLEYLYNHPTQKGKHKHIGLKQSTTPRWIIESEIIYDFVDDNGEERKDSFSKFSLDEAKAEIINQIFDWKIQGLGHTKICQLLNQKKIPTFDDGNCRKAEKWHTFAISNLFKNKSTIGTFTLKTVEDEEYFCESDRVFKTRSNKVDATSEMENYFPAVVTVEKYEAALKIIAMNNKGEKISEPEDKTHVFSKVLRCTCGGRLVFKGTRKTGKSEKADWFEYLRCEKAILKDGCDAENIIYKDFEMAFLRFATSSNYTVFSTTQSKLKTKLKRLSIKQSYLNGEKEQLLLEAKGLNKTFESIVTQNLDATLLLDSISKNKSLLNSVQNELVKIENQVKGVEREYEKSGKPIDKRIIKKELLSEDYSKRLLMRKAVNKQLRKNVVHMEVCSTKLLKFVIVCFDDYVIRTYAYQDEFSSDLMFNFIKINVENLDESEAYDLIIHMFKEVRISLSGENAVITNFDLKVHLSGIKEKYLK

SEQ ID NO: 7524 - protein, 530 aa, synthetic construct
MDHMITSEYDGCGKCLVGVRRLSRKTDSTNSPEKQLGQVLSAVEAVGGHVIAWADDWEVSGATDPMTRPKLGPWLRNEMGPYDGIAGSAVDRIGRNQRDVLNTAYLVHESGRLLITYGHAGPWNLDDPADEMRLSMESFGAQMELRAIQKRNRDETKRARDAGQPKQKNRYGYRFVRLIPTGKVDHVELDPVASLILRDVAERILADETGTVTVHTEAARLNRAGVLSPADHRSVMYGRKPKGTLWNAKALKRMLVSEASLGYLMHDERPVIGADGHAVRIAEPLWDHATRDALVKKTAPQWTGKRAPKGVRLLSGIAFCGVCGQRLYMMARTGQNPSYGCTARTRGIPSSAKCKPAPSMSVPRLDKEVTDWFLDEYGSHQVMRKEFDPGTGYAARIAEIDADRTRLRGDRQAGLYESEADTEWYRTEYTRMTREIEELKKLPERPAGMRLVPIGRTIEASWTAAPDDAARREILTEFDVRVTLHPQGAKQRVHRTGLNPEHRAANQRAAEEHAEANALASLEEDAEALR

SEQ ID NO: 7525 - protein, 635 aa, synthetic construct
MQEITVRPKAYSYIRMSTERQLSGDSLRRQLQDTRNYAAENNLDLDESLRDIGVSAYTGENVQSGALGKFLQLVKTNQIAQGSYLIIESLDRLSRKNVLEALPPFLAILKAGIIIVTLADRQVYSAQSIGDNPYQLMGSLVVMIRANEESATKSKRIKEAMTKMREAALRGEGRYNINLPTWIDVTKGPGSTVTYSLNEHAETVRLIYELAAEGVGQMEICRILHKREIPTFSKKAKGWHQSAVSHILSYPAVIGTYAKKDNLRGRYIVVGPEQRGFFPAAVEEDLYLRAQKAKRAPAHKGRKGNDFSNLFVGMITCRTCGGPMSLYYGRTHDYKYLRCYNRMRTFKRYGEEKKQFQCTNGVGISYPALENAILDHVPEFKLHEIFRAQNGSVDLNAIAKNLIEIETDLESLEAKNSSLIEELSATPKNLRHLVHQQLQRNSERQEELEKQKDAYEAQRINALAADEASNDVERQVREERNSWPTLSGEELYRSRSRIHTALKRFVDGMSFDPDTKELLVYIANGFRAYKFKEGKLVATFDAVTMGHASDKPGAMKSDHFVTDIRLQRDDEKNLLPESASNLAEKLEVVTSLFDAKANRAIPNPVNPRLNDPDVIAIKAMRQAAKEAAQRKKQHD

SEQ ID NO: 7526 - protein, 468 aa, synthetic construct
MSIVIGYARQSVDKKKTENSVHSQINAIKKYTNTHKIKDVKFISDVKSGRSTTRDGYQSMLDVIRKGECHHIIVFRINRLNRNFKDFIELEELCEEHGVLITSLSEGKFDLSNRFKAFEIRSLAILGETESNIISENVRSANAIKVKNNELLGTNAPFGYIYMNKSFQIDESKVKTIRFIFNMYVNQGWGYKKISQALTNHSKLYNRTPKQVMRIITNEKYAGLIRNHFGEYEGNFEPIIEKSLFHKAETIRASKKTLTHHHPIVLLRKKIRCICGATMTPIRMNRKHMTRPITYYICPLNDKLGYKKCSMGYLVASKIDKQVIKIIEDNIINQQMIQHLENTIHSKLSLKIKRSRPKYNQNQLITKLSKQQISIEEYKKQLNKIKEWHKKMNRYNQVNSANQLECITQNILSNYTLYIDQLSEMITQITINKDKEITGVFLKNTPLNLLKEKDDKHDERSAFTSIRK

SEQ ID NO: 7527 - protein, 547 aa, synthetic construct
MDTTSPTIKVAPYVRVSSIKQIDNYSISAQLAEIEKYCKLNDYEMLPPYIDNGISGAEMGNRPGLQQMLNDLKNNKLDKIVVWKLTRLGRSMKDILQIIEECEKNNVSFYSVSEHLGIDTDMNKLMLNIMGSLGEYERTILKDNIRIGASNKASEGKSVGGQPPYGYDRIDGLLIVNQHESRIVKEIYQMYSQGMNFTAIAKVLNDRHEVTKLGKPHSKDSVSYILKNKVYRGLVVYNQYVDWKKKGRKGYNDNPIITEGEHEAIISQELWNKVQTLLKARKRHKRGNNKTDNLLTGLLKCKCCNSNYVISNTINTLKDGSKRHFRYYVCRTRKQRSKNCKESPNIRADFIENYIFQNIKNLIQKPELIKKVVEAVNHKRTPNTDEINHEIANKQFQIDDLKSRYNNLIQVITTDTSLTESIKPTLLKYSEQINELNTSIKQLESTKNMNHPKIEADTVINIFHILFKNLESTKNSSLKAVYHLVIEHIYIKADSNNKKQFYITFKFNQDIVETLLNNINPDEQLLNCSSSLLANIPSEIIFLSFEI

SEQ ID NO: 7528 - protein, 449 aa, synthetic construct
MKQAIGYLRQSTTKQQSLAAQKQTIKALAEKHNIQHITFYSDKQSGRTDKRNGYQQITELIQQGQCDVLCCYRLNRLHRNLKNALKLMKLCQTYHVHILSVHDGYFDMDKAFDRLKLNIFISLAELESDNIGEQVKNGIKEKARQGKLITTHAPFGYHYHNGTFTIDTVKSPTVKAVFNYYLQGYGYKKIAQYLEADDNFINRKPYQVRNIILNPNYCGRVINQYGQYENMFPAIVSTTIYEEAQVTRTQKQVKRKPSENQLKQKIKCPYCHSTLTNMTVRKSDHSLRYYVCPQNMNNARFVCEFKGINAQELETSVLATCQDFFQNQQLYSKINHTIQQRLKRQSDIETKTTLNHEQLIEKLAQGKIDADTFREQSQSFRQQSNPITSINAHQIRKVFQNIIQQRFTLNMLYPYIDEIHITKNKTLTGIYFKNEPLNIVNQTAQSSIA

SEQ ID NO: 7529 - protein, 530 aa, synthetic construct
MRKVYSYMRFSRPEQAKGTSIERQSHFAEQYALEHGFELDKSLTMMDKGLSAFHGVHKTKGAFGQFLAAVTAGKVKSGSVLVVESLDRLSREDPLIAQSALSDLILSGITVVTAADNQVYSREEIQQNPFKLIMSLVVMIRANEESETKQRRSNAFLKSALNQYQTNGKVRRLGADPSWLDFNKDDGTYSFNERIEVIRQILGLYNQGFGSLKIARQLTEESIPTLSGKRNAWGQTTVANIVKSHALYGMKRINVQGVDYDLEDFYPALITKSKWLALQQHRTKRSKSMHGRGETVHLITGHGKGFTTCGYCGGGLGAQTQKQYKRSGEYSKTVTRLHCLTHKETSSCCSSVFLEPIENAVLFAACIGVEPQSLVPTVNNVNYSALIEEVENKVKHIVEQVTAGAPWHLFKDSHDRLNSEKQKLIKERDSQKPDVNQSDVQKWVEKLIELADKARADNKEARLKCRTLINSVCKSIVIQLRGHDLKSEPLITMTFVTDEQFEFKVGKGGAVRFVDNDMAVNRRLQPLLTE

SEQ ID NO: 7530 - protein, 541 aa, synthetic construct
MKQLKKKRIGLYARVSTEMQTDGYSIQGQLNQLTEYCQFQGYEVVNEYTDRGISGKTMQRPELQRMLKDANEGKLDCIMVYKTNRLARNTSDLLNIVEELYKINVEFFSLTEKIEIASSTGKLMLQILASFAEFERNTIVENVYNGQRQRAIEGYYQGNLPLGYDKVPDSKKELMINQHEANIVKYIFDSYAKGHGYRKIANALNHKGYVTKKGKPFSISSITYIISNPFYIGKIQFAKYRHWSDKRRKGLNEEPIIADGKHAPIIDRNLWDKVQFKRQESRKKPQVHGKGTNLLTGIVKCPKCGAAMAASNTTNTLKDGTKKRIRYYSCSNFRNKGSKVCSANSVRADVLEKYVMDQILEIIKSKKVLKQLVEKVNEKSQIDVSSLNHDIAYKQSQCEEIKAKMHTLTKTIEDSPDLDSVLKPTILSYQDELNQINNQIYQLEQDKQAEAPHYDADMIANVLQAIFKDIDKLEKSQLKSLYLTIIDRIDIRKDEHHKKQFYVTLKLNNDIIKQLFNNHPLDEVHLSTSSLFLPQTLYLTI

SEQ ID NO: 7531 - protein, 492 aa, synthetic construct
MSVTTDESTSIVRQENDLRELCKREGWTVVKVLTDDGLSGGKRRAKADLALDMLREGAADVIAVWKFDRWSRQGVRAVADLVETIDERQASGRPALFVAMGDGIRSDAQTWRMHVSLIAEVGRMERENVQTRVASARKHQRETRRHSGRPGFGYRPIPHPSGKGRALEIDPEEAKTVRRAVDLILSGKSAYMTAKILNDEGRAPRLAAEWNASTVADVLQRDSLMGYMTHRVKGDSSRTSRPLLGEDGLPEQVWPAIVTPAEMREIRALLRSRGDWGRVARAGRRRAARLLSGHLACSSCGRIMRAGQGDYKADGSNVHRYVCGAPAGACPRKVSIAAQHVEDHVAEQFLAVYGGYEVVEMRETSRDTGELAEVEAAIASTAADMASPDADFGSLVERLSMLRARREALAAVPVESTLEEVRTGETFAEAWEKRDVDGRRALMSYALDGPIVVRPALKRSKIIDWSRVEIPWRGNWGLAEIEEYLRDAARAD

SEQ ID NO: 7532 - protein, 449 aa, synthetic construct
MKQVIGYLRQSTMKQQSLAAQKQAIEAIAEKHHIQHINFYSDKQSGRKDNRSGYRQITQLIQQGQCDILCCYRLNRLHRNLKNALKLIKLCQTYHVHILSVHDGYFDMDQAFDRLKLNIFISLAELESDNIGEQVKNGLQEKAKQGRLITTHAPFGYDYHNGTFIINQNESPTVKAVFNYYIKGHGYKKIAQLLEEDDTFINRQPYQVRNIIMNPNYCGRVINQYGQFDNMFPSIVSANVYEQAQRLRSQKQTKQTPSDNQLKQKIKCPCCNATLTNMTVRKKNHILRYYVCPKNLNASRFVCDFKGINAQTLEDKVLKVCQDFYQDHHIYAKIKNAIDKRLKRQRNTETHHTLTQEKLIEKLAQGIIDAETFRKQMQSLHQQPQRITSISEHQIQHTIQNIIQKRFTLNILYPYIETIHIAKDKNLIGIYFKNEPLNIVNQTMQSSIA

SEQ ID NO: 7533 - protein, 542 aa, synthetic construct
MQQLKTKRVGIYVRVSTEMQSTEGYSIDGQINQIKEYCDFHHFEVKDIYADRGISGKSMNRPDLQRMLKDAKEGNIDCVMVYKTNRLARNTSDLLKIVEDLHKQNVEFFSLSERMEVNTSSGKLMLQILASFSEFERNNIVENVFMGQTRRAQEGYYQGNLPLGYDKIPNSKHELMINQHEANIVKYIFESYAKGHGYRKIANALNHKGYVTKKGKPFSISSITYILANPFYIGKIQFAKYKDWSEKRRKGLNDKPVIAEGKHSPIINQDLWDKVQMRKKQVSQKPQVHGKGTNLLTGIIRCPQCGAPMAASNTTNTLKDGTKKRIRYYSCSNFRNKGSKVCSANSVRADVIEDYVMKQILEIVKSDKVIQQVVARVNQENQVDGASLHHDIAYKQQQYDEVKIKLNNLIKTIEDNPDLTSVIRPSIQKYEKQLNDITNQINQLKNQQNEDKTLFNAKEISKLLQHIFHDIKHIEKSRLKALYLSVIDRIDIKKDGNHKKHFYVTLKLNNEIIKQLFNNKQLDEVHLSTSSLFLPQTLYLTI

SEQ ID NO: 7534 - protein, 542 aa, synthetic construct
MQQLKTKRVGIYVRVSTEMQSTEGYSIDGQINQIKEYCDFHHFEVKDIYADRGISGKSMNRPELQRMLKDAKEGNIDCVMVYKTNRLARNTSDLLKIVEDLHKQNVEFFSLSERMEVNTSSGKLMLQILASFSEFERNNIVENVFMGQTRRAQEGYYQGNLPLGYDKIPDSKHELMINQHEANIVKYIFECYAKGHGYRKIANALNHKGYVTKKGKPFSISSITYILANPFYIGKIQFAKYKDWSEKRRKGLNDKPVIAEGKHSPIINQDLWDKVQMRKKQVSQKPQVHGKGTNLLTGIIHCPQCGAPMAASNTTNTLKDGTKKRIRYYSCSNFRNKGSKVCSANSVRADMIEDYVMKQILEIVKSDKVIQRVVTHVNQENQVDGAALHHDIAYKQQQYDEVQIKINNLIKTIEDNPDLTSVIRPSIQKYEKQLNDITNQINQLKNQQNEDKTLFDAKEISKLLQHIFHDIKHIEKSRLKALYLSVIDRIDIKKDGNHKKQFYVTLKLNNEIIKQLFNNKQLDEVHLSTSSLFLPQTLYLTI

SEQ ID NO: 7535 - protein, 585 aa, synthetic construct
MSDKPLAYSYLRISTDNQRHGSGIERQMKAGAAWAEANGYELAETISDIGLSAYTSTHAKKGGFGRFLAAIETGQVPAGSILIVESLDRLSRAKVTEAFTQLVGLLKHGIKIVTLVDKQVYTESSLNENFGQLFMSLGVLLRANDESETKSKRGKAAWNHRRQNAATKKITKNAPAWLELSEDRSEFVIKPDRAKTVQKIFELAAAGQGAYSITKYLNANLSQHPGFGHSGNWADSYINKILNSEAVIGELQSYSGTGKNRVKVGDPIPNYYPRVISDELYHLVQAGIKERKTGAAGRKGDYFSNLFSGLLECGNCGGTIFMRNKGKEPRGYRFLRCSNSLKGNACNCPAWRYDEFESQFINFVKDISFAEVFSGKSADTQMVELRGRKAVELDKIAQAEQKYSALVEQFTDANLPEMLKESLIKKSVELENEIVAAKEAVETIDAELTKLSTSNVEADQTEFLESYEQLLSGDKDKLREVRFAMHNILRRNIDRISVHNGTYFEPWEEIPASLRAELADKGIISQNDIEAYLSKPHGKRLRDKHDRHFVVHFKNGARRRVGAEYSLLDVSKSDLALTEKFEGKI

SEQ ID NO: 7536 - protein, 584 aa, synthetic construct
MTIKAYSYLRISSDRQKQGGGIKRQMEASAKWAEDNGYELAETIADEGLSAFTGTHAKRGGFARFLAAVDSGAVARGSILIVESLDRLSREKVMDAFDQFRDIVKRGIHIVTLVDGQVYSEDSMNQNIGQLFMSLGVMLRSHDESATKSQRGKAAWQQKRAAAAESAKILTKNAPAWLELNEDRSGFLVKQPHGQTIQKIFDLSINGMGAYSITRFLNENIEKYPTMANGSSWNDAYVIRILKNPAVLGKLTLTEKIDGKRVPTGEVVDGYYPTIISTEDFSLVQAELRERKTGAAGRKGEHFANLFSGIAECGNCGGGMLHRNKGKEPRGYRFLRCSNSLKGNGCNCPAWRYDEFESQFINFVKDVSFAEVFSGKTADTQMVELRGRKAVELDKIAQAEQKYLALVEQFTDANLPEMLKESLIKKSVELENEIVAAKEAVETIDAELTKLSTSNVEADQSEFLESYEQLLSGDKDKLREVRFAMHSILRRNIDSISVNNGTYFEPWEEIPDSLRAELAGKGIISQNDIEGYLSKPHGKRLRDKHDRHFLVHFKNGVRRRVGAEYSLLDVSKSDLALIEKFESK

SEQ ID NO: 7537 - protein, 525 aa, synthetic construct
MRQVITYLRFSSKPQERGDSIRRQKGLFERWLKDNPDAKVVDEFSDEGASAYHGHHLKGDFGRMLQNIQDGKYLSGQTVLLVESETRLNRQKARNTENLVDLITGKGVDVICLESGKIYTSTNIDDLDTSIQLKIAAHIAHQQSKEKSIKVSAAWEHRAQLALEGKQQLTKNVPSWIDPDTRKLNEHSSTVVTIFDLLLSGESLHNIARYLQANNIKSFSRREKANGFSVHSVRTILRSESTVGTLAASKRNDRPAIPNYYEPAIDVATFNKAQEILSKNRVGRAPASDNPITINLFKGIIRCQCGASVHPTGVKATYQGVYRCNNVPDGRCNVPTIKRKPFDKWMLDNITGFLERSDGNNTDKRKAEIEYQISLVTSKLKKATPLLLELDDVTELKEQVKELNIQRSNMQSELDELNQRETLSDKPLHHLSEIDLTTKAGRVEAQLILSKFVQSIELQREMIIITLRNGTVIGKSRDLSPVLSQDLMKQVVSSSSPRDIDMFSVITSDEEFRKSGKALIKRTSY

SEQ ID NO: 7538 - protein, 520 aa, synthetic construct
MAEKNITVIPARKRVGSTAAKEKVKKLRVAAYCRVSTETEEQNSSYEVQVAHYTEFIKKNAEWEFAGIFADDGISGTNTKKREEFNRMIDECMEGNIDLVITKSISRFARNTLDCLKYIRQLKDKNISVFFEKENINTMDAKGEVLLTIMASLAQQESQSLSQNVKLGLQYRYQQGKVQVNHNRFMGYTKNEEGNLIIVPEEAEIIKRIYREYLEGKSLAGIGRDLEKDGILTAAGKPRWRPETIKKILLNEKYIGDALLQKTFTVDFLTKKRVKNEGHVPQYYVENSHEAIIPKELFLQAQEELHRRNNIYTGADKNKRLYSSKYALSTITFCGDCGDIYRRVYWNIRGRKEFVWRCVTRIEQGPETCKNRTVKEGDLYDAVMTAINRLLAGGDNMIRTLEENIHAVIGDTTEYKISEINALLEEKQKEVISLANKGKDYDFLADEIDRLREKRQSLLVEDASLSGENERIDELIGFIRKNKYRTLLYDDTLVRKLIQNVTVYEDHFVVSFKSGIEIKI

SEQ ID NO: 7539 - protein, 519 aa, synthetic construct
MKKITKIDELTRSQLSKNKLRVAAYARVSTDSDEQLESLKAQREHYENYIKSNPEWEFAGLYYDEGISGTKKEKRPELLRMIRDCERNRVDFIITKSISRFARNTMDCLELVRQLLNIGVFIYFEKENLNTGDMEGELMLSILSGFAAEESASISQNMTWSISKKFQNGSFIIGSPPYGYANVNGEMVIVPEEAEVVKRIFSECLSGKGGSVIAKGLNRDKIPARRGNHWSTGTVIDMLRNEKYKGDALFQKTYTDNNYSRRPNKGEKDQFYCKNHHEPIISKEVFSKAQKLITQRAKSKAVNKKAYQNRYVLSGRIICGECGSKFRRKTNYSAGRSYIAWSCIGHIEDKNSCSMLFIRDGEIKATFATMMNKLAYSRKIILGPLYDAISKNQEECDLERIDAIDKRMEQLTEERNTLIGLMTKGFLEPALFSKERNVLDSKIKKLTTEKTNLVMSFTSGTSQADEVKAILEHVSKDKFDGNYTDEVFEKFVENIIVNSRDELTFKLKCGLSLKERVVR

SEQ ID NO: 7540 - protein, 547 aa, synthetic construct
MKLLATYIRWSTKEQDSGDSLRRQTNLIDAFYSKHKNDYYLLPAHRYVDKGKSGFHQQHKAQGSDFRRMFENVMSGVIPEGSLIVVENFDRFSRADIDTAIDDVRQILRKGVSILTLGDGELYDKSALTDPVKLIKHIIIAERAHQESLVKQKRIAQVWNHKTQLARELKKPMGKQAPGWLELSEDGSHYIVDEDKASLVNIIYDKRLSGMSMFAICKWLNEQGYPTINQRKVRISKTKKPDGNWSALSVKHILTSRSVLGYLPAKISTEDRKTVLREEIEGFYPQIVTDSKFYAVQQLLEETGKGKTSSGEHWLYVNILKGLIRCKCGLVMTPTGIRKPVYQGTYRCNGNKESRCSYGTVSRKLLDTQLCSRLFSKLSQLHDEATDTAKLDELQRRLNTVDSELEKLTETLIQLPNITQIQEALRVKQEEKDELIVQLSREKARVKSVSSLDLSGLDMESVEGRTEAQIIIKRLVKEIVVSGNEKLVDIYLHNGNMIRGFPLDGKDDHTLTLEEATDEMQPLDDMLIFGEPVTRIYPAGDMEEVDA

SEQ ID NO: 7541 - protein, 515 aa, synthetic construct
MRTAIYLRKSRADLEAEARGEGETLAKHRSTLLKIAKEMNLNVLAVREEIVSGESLVKRPEMLALLEEIEDNKYDVVLCMDMDRLGRGGMKEQGIILETFKRSNTKIMTPRKTYDLNDEWDEEYSEFEAFMARKELKIITRRMQRGRVASVEAGNYLGTHAPFGYDIHRLNKRERTLTINSEEASVVRMIFDWYANEDMGANAIRSKLNDLGYKSKLGNDWNPYSILDILKNNVYIGKVTWQKRKEVKRPDAIKRSCARQDKSDWIIADGKHEPIIPESLFEQVQEKLNSRYHIPYNTSGIKNPLAGIIKCAKCGYSMVQRYPKNRKETMDCKHRGCENKSSYTELIEKRLLEALKEWYINYKADFEKHKQDDKLKEIQVIQMNEAALRKLEKELVDVQKQKNNLHDLLERGVYTVDMFLERSNVVSDRITEITSTMENVKKEIKTEIKKEKVKKDTIPQVEHVLDLYFKTDDPKKKNSLLKSVLEKAVYKKEKWQRLDDFELVLYPKLPQDGDI

SEQ ID NO: 7542 - protein, 525 aa, synthetic construct
MPSAFSYVRFSSGKQAKGSSEQRQRSMLGQWLEQHPSFTLSDLRFEDLGRSGFSGEHLDHGLGQLLAAIDSGAIKSGDVILVEAVDRIGRLEPLEMLPLFSRIVRAGVSVITLEDGHIYSKDSVNETSLFLLVAKVQQAHDYSNRLSRRINASYTARREKAKAGLGVKRETPVWLTTDGQLVPHVAPHIAQAFQDYADGLGERRICRKLRESGLEEFSKTNATTVRRWLKNRTAIGYWNDIPDVYPHVVDPALFYRVQQRLDAPKVDRAKPSAHYLTGLVKCAVCGRNYNFKQRKHTDPAMLCTSRARLAGEGCTNSKTYPVIVLDQVRKLTSLPFLQHAMENASSQADPSSQRLAVIDGEIGELSRKISEATKALLVLGFTPEIQESLEQLKTAREALEEERATLLLPQAEKLTAAQLEAFSNGLLDDEPMKLNHVLQTAGYSMVVHPDGSIDVDGKRFVYEGASRKEKVYKLRLLGEDKQWSLPILTPARAESLAKSVAGGYLPPDTPEDVARYFEKVKHLVR

SEQ ID NO: 7543 - protein, 505 aa, synthetic construct
MTKNAVIYARFSSDKQREESIDGQIRECRAFAEANEINIINTYIDRAMSARTDQRPSFLQMVKDSAKHLFDYVIVYQLDRFSRSRYDSAIYKHRLKKNGVKVLSAKENIKDDPSGILLESVIEGMAEYYSAELSQKVKRGMTENLLEGKWIGGIVPFGYELTSENKLAISPATGHLVSEIYNKCLSGVKTTDILSKLNSLGIKTQRGCNFTRNSLNRILKNQIYTGTFTWAGTSYPDYAPALITQEQYTAMQNLFESRKRKSNTARRVSPQYALTGKIYCGTCGLPMTGYCGKSHTGTTYYYYQCSSKNNKSEKAARSQIACDAKNISRDKLEKLVLDTTISILKNKDAVKCIADQCMTIQKAELEHKPAEQLRLESQIKEIEKRLKNSVKAVENGLISQTITNNIETYEKQLTELNAQLDGLKLETHIIPITEEAVIYYLNQLTERANKKDGYSLDTFDDFIRRVVVTGKRVDIYYNYTAVPNILENPAVKMLRGSSEDYLVTR

SEQ ID NO: 7544 - protein, 532 aa, synthetic construct
MKRAVFYGRFSTDLQNDKSVEDQFSLCQDFAARLGVTIVKQYSDRAKSGASMFGRPGLADLMMAAERGEYEILITEHTDRVSRDIADLADIHKRLKFRNIEMQCVNGGLMDTAQIGLYGIVGQMQREEGARKVKRGMTGVVRSGRNPGGKAYGYRPIQGQKGELEIVEEEAAIIRRIFDMYAAGLSARTIAKALNDEGVPAPRGKQWNASTINGNSNRGNGILRNPIYAGQIVWNRVHMVKDPSTGKRVSRVNDDSAVETIDAPHLRIIDDKLFRLVRDSKTERTGAAARSAPKNKRLLSGLLRCECGGSLSIIGTDRSGPRVQCTVNKESGSCPNDARYYVEKIERDVMDRLREMFADTSYIDAYVTEYQAESKRLAAERRNSRGSTERALADVQERINRLLDQVARGTIEEEDVLSMLPPMKAERARLKAELDAQEPPTNVIEIKPKAVTKFREDVESLAEILKQRGAEPTPEMARSFREVISGIIVSRRKPGEAYHYEIRGWLEGITGPDLSSVLLVAEEGFEPPTQGL

SEQ ID NO: 7545 - protein, 501 aa, synthetic construct
MKPNIKDVAIYLRKSRDDSDGQEDVLAKHESLLLEYAKSHNFKYKIYKEIGSSEYIDWRPEMMRLLTDVEQELYDAVLVVDLDRLSRGDLEEMGRISRVFRNSKTLVLTPSKTYDFNNEDQTLINNFEMVFANHEFRMINKRMIRGKKQGAKSGRWTNGTPPFPYVYNRLTKELDVDPDKVKVYELMKKMFLEDMKATYEIAWKLNELGFKTNRNSYWYENTVRRILKNEVHLGKVVYGKTSGSGSKKKPSANGVQIKDRSEWIIAEGSHQPLKTEEEHQRILAILESRRYTPKGTRTNVQVLSKLIYCGKCNRIMSFTGKASGKKYVKTCLTTDRFGNRCHNRCLNVEVIYAQLFLDLEQYEQQLLSHEPKEKQDDSSTLQLALQNKHEELERLEKGIERIKDLYIDEMIDKSEMQKRIEKQKQSMQTKKEEIRSIEQSLAVIENVRTDDDRLHAIREFKKAWDTEGIGKRELNTLAKQLIDRIEYVREGNNINMKIQFL

SEQ ID NO: 7546 - protein, 479 aa, synthetic construct
MRYAVYVRVSTDKDEQVSSVENQVDICRYWIEKNGYEWDQNAVYFDDGISGTAWLERHAMQLILQKVRKNELDTVVFKSIHRLARDLKDALEIKEILLGHGVRLVTIEEGYDSYYEGNNDMKFEIYAMFAAQLPKTLSTSISAALSAKVRRGEHTGTIPFGYDRIDKKLIINDEEALLVKEMFDWYEDGRGYRMIANNLNKKGCRTRFGNLWSEASVKTIVTNSLYTGEHVMHKYKTVKVDGKKKTVKNPKEKWLVFENHHDAIISKEQWERINLVSGMKDKKTKSDYRNEFRGIVWCAHCGKRVRAIYAGVRSKYERVYMKCSTYKAYGTCVNHIPVRYEDFRNLILERLKQKQEYIETRLVAQIKDKLQGKIAKSKKTIKQLESKKEKLLELYMDSFIDKETFVNRNRKLEDEMTAQELQLLKLKDKDIQNRETKDIQDAFMLLQEEQDLHKAFQKLIKKIVFYQDGKLDIEYTFDI

SEQ ID NO: 7547 - protein, 506 aa, synthetic construct
MRTVITYLRFSSATQGAEGADSTRRQNELFKQWLRKNSDAQVVASFNDEGLSGYKGKHLSGQFGDMLSRIESGEFPEGTILLVEAIDRIGRLEHLETEALMNRIIAHGIEIHTLQDGLIYTRDALSDDLGISIIQRVKSYLAHQESKQKSFRVSEKWKQRAKLALAGKQRLTKMVPGWIDHDTFKINEHAETVRLIFKLLLDGESLHNIARHLQSNGIKSFSRRKDANGFSVHSVRTVLRSESVIGTLPASQRNDRPAIPNYYEAAIDAATFNKAQEILDKNRKGRTPASDNPLTINIFKGLFRCQCGASVHPTGTKNKYAGVYRCNNHLDGRCDVPPLKRKPFDRWMIDNFLGMIDVGNDGESERKIAALQHEVEIVTARIKKATALLLEMDDIDELKIQLKELNQKRTELQTTIDSMRRKTSLSDKGLPQLKDIDLMTKAGRVECQLILSKHLKGLTLGKDSVTVTLQNDTEITIPTNPLPLNDGSPIFEIADKELLDIDAFRL

SEQ ID NO: 7548 - protein, 596 aa, synthetic construct
MMSKIIPYGYLRVSSLEQVKSGGGLDSQDEAVRRYINERSDLFDIEQMVMMSDMASAYSGKQLSEGQLGGVLADVEAGKVPSGSALIAYSIDRLSRQNPWIGTKLISTLIGAGIQIHSVAENQILKSSDPVGAIMSTIYLMRANNESEIKSDRAKTGYQKRLKESIQNKKVLTRQMPRWLFDNDGKYAVEPKMKRVIEFVFDSYIAGQSSGYIANELNNKGWLYGNTYWRGSYVAKLIRDERLIGKHLRYSKQIKGVKREVIETIPDFYPNAVDVEKYHLANNMLTNVAENIRGRTRITYGDTSILRNIFSNVIKCGLCGGDTSVVQNTRKKVVGDKFVYIPYKMFLRCRNKYELKTCTHGDIRYEIIERAILVHLMGLDIANLLATPIDNSIELYKTELERCIADESQYREIIELRRKAGKRVRPETVEVLEDVLDRIDELNRLIESHVVENFVPDFNVDLGNIADVSNVEERSLIKKGIAAIAKRIFYKRVGGYILVEVMYRNLSIKHILVIDNKSSNTVVNFSIKYEEEKHIYTCNSFNMNYLIKSGDFEIHEETTMEDYAQMMNFIDIVSEDEAKKAKEFLVKNFNQNFISK

SEQ ID NO: 7549 - protein, 547 aa, synthetic construct
MKLLVTYIRWSTREQDSGDSLRRQTNLIDAFYSKHKNDYYLLPAHRYVDKGKSGFHQQHKNQGSDFRRMFENVMSGAIPEGSLIVVENFDRFSRADIDTAIDDVRQILRKGVSILTLGDGELYDKSALTDPVKLIKHIIIAERAHQESLVKQKRIAQVWNHKTQLARELKKPMGKQAPGWLELSEDGSHYIVDEDKASLVNIIYDKRLSGMSMFAICKWLNEQGYPTINQRKVRISKTKKPDGNWSALSVKHILTSRSVLGYLPAKISTEDRKTVLREEIESFYPQIVTDSKFYAVQQLLEETGKGKTSSGEHWLYVNILKGLIRCRCGLVMTPTGIRKPVYQGTYRCNGNKESRCSYGTVSRKLLDTQLCSRLFSKLSQLHDEATDTAKLDELQRRLNTVDSELEKLTETLIQLPNITQIQEALRVKQEEKDELIVQLSREKARVKSVSSLDLSGLDMESVEGRTEAQIIIKRLVKEIVVSGNEKLVDIYLHNGNMIRGFPLDGKDDHTLTLEEATDEMQSLDDMLIFGEPVTRIYPAGDMEEVDA

SEQ ID NO: 7550 - protein, 561 aa, synthetic construct
MAASKKTKSKVYSYLRFSDPKQAAGSSADRQMEYAARWAAEHDMQLDASLTLRDEGLSAFHQRHIKQGALGVFLRAVEDGRILPGSVLIVEGLDRLSRAEPIQAQAQLAQIINAGITVVTASDGREYNRERLKAQPMDLVYSLLVMIRAHEESDTKSKRVKAAIRRQCEGWIAGTWRGIVRNGKDPHWIQQREDGAFELCPERVLAIKTMIDLFLAGHGAMEIARILSERALYVSNAGNYSTHMYRIVRNRALIGEKSLTVDGEEFRLSGYYPTLLTDEEFATLQDAMSERGRRKGKGEIPGIITGLSITSCGYCDMAVVSQNATKKRAKGSEIVRRLSCSGSTFNAGCPVGGTCDTETVERALMRYCSDQFNLTRLLEGDDGSARRASQLAVARQRAAEIESQIQRVTDALLSDDGVAPAAFMRRARELETELAQQRREIETLEHQIAASNAHEIPAAAEAWARLVDGVLALDYDARLKARQLVADTFRKIVLFQRGFTPLDDAPADRWKRTGSIGLLLVTKRGGMRLLNIDRKTGHWEAEDNLDLAPRHVNEVPLPHDM

SEQ ID NO: 7551 - protein, 523 aa, synthetic construct
MQLDASLTLRDEGLSAFHQRHIKQGALGVFLRAVEDGRILPGSVLVVEGLDRLSRAEPIQAQAQLAQIINAGITVVTASDGRRYNRERLKAQPMDLVYSLLVMIRAHEESDTKSKRVKAAIRRQCEGWVAGTWRGIVRNGKDPHWVRQVENGAFEFLPERELAIRTMIDLFLAGHGAIEIARILSERELYVSNAGNYSTHMYRIVRNRALIGEKSLTVDGEEFRLAGYYPALLTPDAFATLQEAMSERGRRKGKGEIPNILTGLSISSCGYCGLALVSQNTAIRPAKGRAFTRRLGCSGATFNTGCPVGGTCDARIVERALMHYCSDQFNLTRLLEGDDGAARRVAQLAVARQRAGEIEMQIQRVTDALLSDDGVAPVAFMRRARELEGELEQQHREIEVLEHQIAASNAHEIPAAAEAWAQLVDGVLALDYGARMKARQLVADTFRKIVLFQRGFTPFNNAPADRWKRSGTIGLLLVTKRGGMRLLNIDRKTGQWEAEDNLDLAPHHADEIPLPPTVQGMEC

SEQ ID NO: 7552 - protein, 560 aa, synthetic construct
MKASRVYSYLRFSNAKQADGSSIARQLEYATRWAAERGMTLDASLTLRDEGLSAYHQKHVKKGALGTFLRAIEDGRIPAGSVLIVEGLDRLSRAEPVLAQAQLAQIINAGITVVTASDGREYNFKSLKAQPMDLVYSLLVMIRAHEESETKSTRVKAAIRRQCEGWIAGTYRGTVAVGHDPRWITRDDKHGFVLIEKHAATIRMVIDCFKQGLGGVHIMRVPGAQELLAAAGIGVSSRVYEILRKPTLIGDKVVQIDGETYTLKGYYPPVLSDSEFAELQHLLTQRGRRPGKGVIPGIITGMRLTVCGYCGSPMASQNNLTRKRKTDGLPPDGHRRLVCTGSLATQRCHAGGCSVVPIEKALMAYCSEQMNLDRLLKGAAPTASVESKLALARERVAKTHKQLARVTEALLDDEASAPAAFTQKARELEAQLAREQTAVDALERELETLRGKGTPAAAKAWAQLAKGVEAFDPEARLQARQLVADTFSQITIYRHGFQPVAGNATIDMVLVAKNGNARLLHIDRITGEWRAGTAANLRAIQTAAGTPEIETEACPGHRAA

SEQ ID NO: 7553 - protein, 512 aa, synthetic construct
MELDAALSLRDEGLSAYHQRHVRQGALGVFLRAVEDGQVPPGSVLIVEGLDRLSRAEPLQAQAQLAQIVNAGITVVTASDGREYNRERLKAQPMDLVYSLLVMIRAHEESDTKSKRVKASIRRQCQGWIAGTWRAPIRVGKDPHWVRESEGGGFELIPERAEAVRHVIAMFRQGHGAVRIVRDLAERGLTVTDSGRTQSSNLYRLLANRMLLGEKSVEVDGEAFRLENYYPALLTPAEFADLRYLAEQRGRRKGKGEIPGVVTGLGITHCGYCGAAIVAQNLMGRKRLPDGRPHAGHRRLHCVTYSQGAGCKISGSCSVVPVERALMLYCSDQMNLTRLLEGDSGVTALNAELAQARAAVGALERQIARVTEALLIDEEQAPAALLRKMRDMEAELERERHRCDALDLKVQAVASAETPAAADAWSALVRGVEQLDYDARMQARQLVADTFSRIVIFQSGFYPETDDGLIGLMLIAKRGSTRLLHVDRRSGEWRSADDVAIGTDLPLPHDAG

SEQ ID NO: 7554 - protein, 552 aa, synthetic construct
MAAKARVYSYLRFSDPKQAAGGSVDRQLEYAARWAADNEMELDASLSLRDEGLSAYHQRHVRQGALGVFLRAVEDGQVPSGSVLIVEGLDRLSRAERLQAQAQLAQIVNAGITVVTASDGREYNRERLKAQPMDLVYSLLVMIRAHEESDTKSKRVKAAIRRQCQGWIAGTWRAPIRVGKDPHWVRETEAGGFELADDRAAAVRRVIEMFKQGHGAVRIVRELAERELKISDSGRTASSHIYRLLANPMLIGEKSVEVDGETFRLEGYYPALLTPAEFADLRYLAEQRGRRKGKGEIPGVVTGLGITYCGYCGAAIVAQNIMGRRRAADGRPYPGHRRLHCVTYSQGNGCKISGSCSVVPVEHALMQYCSDQINLTRLLEGDAVTATVSAQLASARQRVAKLEAQVQRVTDALLLDDGEAPAAVLRRVRELESQLTSERRDVDSFEHHLAAEASNVAPAAADAWRQLVQGVEHLDYDARLLPRQLVADTFSRIVIYQSGFQPETDTGKIGVVLVGKRGNTRMLHVDRRTGEWNAAEDFAPPDDTHTSINDNL

SEQ ID NO: 7555 - protein, 564 aa, synthetic construct
MSIKSIIYARVSSKEQEDTGYSLDAQEKLLKEYAEKNGFTVAKIFRVSESASGRQIRKTFNEMIQYAEKHHIPIILCEKIDRLTRNLKDAASVSDWINENSDRQVHFVKESFVVNKNTRAHENLVWDMKVAIARFYTNNLSEEVRKGQKEKLAQGWLPTKPPLGYKTIGEKGHKTHIIDEEIAPLVRRMFELYATGNYSLNALVDKMHKEGLRKNGKKVGKSRLHVQLKDPFYIGKNQWKGDVTQGMHEPMISKELFDVVQTRLNRTNDNPQYKKHLPVFKAKVKCEECGGVIAWEIQKGHWYGHCNHYRECTQNKYVRQEAVEEQLFRYFDKVALKNTRVLEWLEKAIRESHEEEIGYNTAKREEFSRIIRTADQRIENAYRDKLDGEMPATLCEKMIRESTKEKDEAIEALGKLSKGRTAYYEAGYAIHTLAAHAETIYKSPKATEDQKRLLLSHVFSNLTLNADRISPNYTFGFEFLAEWVPKLNLIFELAESSPTKGKEDAFASSHPTLLRRQDSNLRPRDYMCSSCFQDAWTISSPSHECIRSEALRPLAGPTPLRDSL

SEQ ID NO: 7556 - protein, 589 aa, synthetic construct
MPAHVTILRNTVRPVKFNTMNRPRLYSYIRYSSERQGRGNSIERQKSYIAEMAKKIAAEYDLEIFEEYQDLGVSAYKGKNVQEGALSDFIAQVESGLIPKGSFLLIESLDRFSRQNAMQAVNLFTSLLLNGITVITGIDKQIYRQTEVNTEILQQLMFSVMLFSRANEESSTKSHRTIASALSKIRRHQKRKPGDPVIAIKELGSDKWWTDSSTGYVNPHPVLFPIAKKIIQLKQDGWSNRMILMHLKNNYDGPVIGNKKSKGIWNMQHCSRILEPAIYGRKVITVNNAEYVLDDYYPAIISKDEYEALKIQVGNKGFAPNREINPEIPLLSGIGILHCAHCSCYMVKAKSTLKNHPHAYRYQCASRDLHQDCNKWGFRASTLERTILQLIADRIFLQTKYQPSGLEWKISDIESKIENYVLAIGSAKSPAIINSMTSQIEQLEQEKQSLVEEKRLYDESIVQMNTEGWDKFRKFDINDALNPLRAKIRANIKTVITRIDCSRIDKKHNLFTITYRDQHKQRIVIENNSGWKKGKIYVEAQTINDTQILESEGLILHDHIDILINRDKFMTEAKKRLEHPRTLIDELTE

SEQ ID NO: 7557 - protein, 616 aa, synthetic construct
MTKNVLFYARYSTDRQDEVSIDTQIELGKAFIAKQGWTLVESYSDAAISGTSYQLRPGIQNLMAHVKRDRIDVVLCVTVDRLSRDIEHSHKILKDLRYRDVDLWTVHAGTPVTDMEMSFRAMLSHELVGQIRYRTREGMKTAVRKGKASTCLAYGYMISQQRDVNGDRIKGLREINPAKAEIVRRIFALYADGMSPRDIAQLLNKEGIPGPRGRKWRDTAIRGHVSRGTGILNNESYIGRMVWNKRNYRKNPETERRTARVNDASEWVLTDVPEVRIVSDDLWQRVKERQKELGELFDFGQGNRLNATQRPEYLLSRMLECAECGGPYAISGKGRYSCTNRKKRLPIDDLDGACCGNSKTITRHELEERVLNCLPVAFFSMDIFDRISEKMVAHEVSKLKSLPSRKDQLTTELAAIKSKQSGLMQQIQDRHADGRPRLAILDDQLDELEVTREALVLELAHSQEPAEDFQEKIAKLKAQFNPANIEISVRKLIFLARNNADEHAKQRLMPIVRDLIQTVVIGKTPGHQPASLQVHGSIANIMASMEVLDLMEQQFITAAQNDLMARIASGELDTEQKQKKLLDAYAEELRCKYPEWENLQVSVVAGAGFEPAAFRL

SEQ ID NO: 7558 - protein, 533 aa, synthetic construct
MTPRAARFDRRTAVLYLRLSDARDESSTSIERQRNDLTAEAERRGLSIVAELVDDGVSGRKSRARAFEALGMLRDGKVDALLVWKFDRWSRQGLSAVAALIEALDARPAALFIAQQDGLNSDQPAWRIIASVLAEVARMEAENTSARVSSFIRHAKEVGRWHGGRAPVGYRSIPHPSGIGRALEPDPLAVELLTDAATRIVAGEALYGVTQRLNTTELRPPAAPAWSVQTVRRALMGHSIVGRVSARVPGSAPEERKFDVLRDDEGNPRQIWEPVLPLDLWRACKSVLEARNAASPLASRQRATVKKARLLSGLLVCVYCGGPMYVGVTAEGRARYVCSKRSRAQQCRPGISGPAVTAQDLEEYVEAQFLETVGHYPVFAPVAREVPALALAEAKDALATLTARLGDPDMDDDTAERVEIQARALRRRVRDLSAQGPPPAEVELVATGETFGEVWARADIPERQELLSAAIDHITVATGKRGGKRFDPDRFDIVWRPSPQELGLAGDPDQGNSSPRAVAWLREREARRSGSST

SEQ ID NO: 7559 - protein, 575 aa, synthetic construct
MTLTMPMHDTDTSPLLTAVTYQRVSTKEQATKGGRDEGFSIPAQRQANARKAEDLGARIVAEFVDAGESARSADRPDLQRMLEYIATHQVTYCIVHKVDRLARNRLDDVEIHRRLVEAGVTLVSATENIDETPSGMLLHGIMSSIAEFYSKNLANEVSKGLNQKFETGGTPMRAPIGYLNVRKRDEQSREYRTVEIDTERAPLVRWVFEQYATGENTVVSLLTEATARGLTTVLTPKRPSGPVGRSTFFKLLRNPYYIGIVRYKGAEQSGTHEPLVDVETWQQVQRLLDSRKIADERRRTHDHYLKGTLFCGQCGSRMQLDYPANKQGVRYAYYVCSGRASKRKNCTRRAVPVGIAEQLVADCYRDISITEEQYAALAAQVEAAFDERLASRSQELAELTENRKRLANESDKLLAAHFADAIDLETLKRHQDRIRAGLADIDRRLASEHDQHEGSRKHLSTALSLLVDCATLYARTNDQGKRLANQALTNGIEISEDERATIRLAEPFAALAPTPASTDVRCSSTSEIVEDRGFEPLTFSMPWRRATNCANPPEPVWATGTSLDHASDQCKIDGP

SEQ ID NO: 7560 - protein, 655 aa, synthetic construct
MKPTIITYLRYSSKQQADGLSEFRQSEINRKFVEKFCAEHDVDLNEVISLKDLGVSAYRGLNLTLGSFSQTIKKFKSGEIKKRFNEDGEINTYLIVESLDRITRTGPFKSTQIFTELLEYTNIVVLADGEKKIYSKKSIDSTHGMMDLFMALISLQRSHTESLMKEYRSRKSWEKKREDLLNYFTLPEEDRVGLERPKNATAMCPFWLTAKKDGRGYDFIPENKKVMDFLIEKLLDGNGMTRAVRLLNDEIDAGNLKPKLKKANRKTRHFRAAAYSGLFNSEISTVKGDYLLTESYYPTEDDIEQGKYPEKHLGKRVRKEIAVLKNYYPALMTESQAAYIRKMMDERRSAGTKPNKSIKNLAQGILRCPHCNSTYIKSKDRRNVYLRCNLAREGLCNAKVIKHGVFEHNLLQFCKGLNINKIISNQSSDQVIDSSLKELEQKMMPLKVKKSQLEDDIEQIVKNISSIKIPSLLEKVQDDYLKKESELKKVVQEIDLIETSIMKLQHQIAMSDGDSSLQDLIDLTLDENADDEIRQRFNVELKKVVKSMTVLYRDTDDNPFGYHMISIQFLDGVHRLIPVHEKMTDKIHNILPYQDAAKVDSVDFSETVILPEDYVEGREKGKYPNLDGMAKYYQENPTKYLRLKHKMDQVHEIHA

SEQ ID NO: 7561 - protein, 593 aa, synthetic construct
MTQQQAARRRTSFSGWESLLGLDGSAPPEFDLGIQGQAVLYLRVSTPRQMLTAIDIDADGNSIATQREMCLARAKRSKAPVVKEFLEPGNSAQSIGKRPVFRDLLRYVEEHPEVAYVVIYMRSRAFRNAGDAAITKRILAGMGVKLISAKEDFGDGYMAEAMEAVTDIMNEVQVRQSGEDIKQKLLNKAKNGGTVGRAKLGYLNDRKDFDGRLVNTIGIDETRAPLIRWAFEQYATGDYSTTRLAALLAEQGLTTRKSSKWPERPLSRSQLGQILRDPYYIGMVTFKGHVYPGRHEPLITPELFDRVQQVIDARVKRGQRDRVHNHFARGLLHCGRCHAAGREHRLIFVEAKNHADEIYEYFLCRGRQDGLCDLPYLPAAELERSLQQEFRTVILSPEGIATAKQEVGAALERVLADQAQQRARLQKELKKLDVQEERLVDLAAEGALATDKLRARLRDLQIKKHEVRASLETTVESLEQRTQMVLSYLDLMARPDALFTSVPGSVKRKLLAAFFQRIWVDDDGHLMSVAHELQPLPAAVRHAALSVTTNERSAGEISDASSAERLDLYLKVICSSNTSLVAGAGLEPATSRL

SEQ ID NO: 7562 - protein, 605 aa, synthetic construct
MTITNTTSSTFEDNSWPAPPPAAVGSINTIAGLEHLALDTAAQPRASKQGTAVLYLRVSTVRQLNTGADVDADGNSIATQRQWARDAACELGATVVEEFVDPGHSAQSIEKRPEFKRMMRYIDEHPDVRYVVIYMRSRVFRNHLDAAVTKIRLREKNVTLVSAKEKFGDDYMGDAMEAITDIMNEVQVRQSGEDIKVKMAHKVQRGGSVGRAKLGYLNVRKEFDGRLVNTIDLDPDRYPILQWAFAQYATDQYSIWQLCGLLEEQGLTTRPSSKRPARPLSPSALAKILRDPYYAGTIRYKGALYAGRHQAIIDKTTFLTVQKILDRRNRKGDRDITHFHYLKGLLACGQCESEGRTSRLVYSQNVGNGGTYEYYLCAAKQRGNCTIGTMRLDDIETAVARAVAAERFHTESVDTIRREVTRAMETLQAADRELKDSLRKQLTTLETQEDRLIDLAADGTMPSDKLRGRLNDITLQKASIKERLVKTETHLRSGAERVLAYVDLLENPGDLYVSLAGNTRRDLLAAFFQRLIVYVEDDGLHIRPIRTDVNEALHDWQTNTHAANERASRVSAEGSPFSTTQRDSSSNGLSNSQLVGMTGFEPATP

SEQ ID NO: 7563 - protein, 541 aa, synthetic construct
MAQATTAKKVVVVPIKTMDIVEGIQSIQKKKVAAYCRVSTDSEEQKESYTNQVNYYTQYIQNNLEWEMADIFADEGITGTSTKNRTHFNRMIQDARNGKLDLILVKSISRFARNTLDLLKYVRELKSLGVAVFFERENINTLDTTGEVLLTILSSLAQDESRNISENSRWGILRGFQNGKVFCNTNRFLGYDKDDHGELVINEKEAEIVRRIYEEYLDGKSYQAIARGLMRDHIKTVTGGDTWWDSSITLILTNEKYYGALLQQKTVTVDFLTHKRIRNKGQEQQYLIEDNHEPIVSKELFEAVQKEKARRAKLKGNVMGESKRYSSKYALSSKVYCGCCGAIFKRRTWNSNNPSKKVVWQCKTYVNEGKTACDAKSVDEQVLHSAFVRLFNRMYENKERLIKTLKGNIVSVLSSRVEQETLLDIEGKMQQLKSDLKELVNLKLRNQIDESVYDEETNRLSSELNELRQQMLILEEEEDQKAKIKERVDEIIQVLSSRQDILKQFDDNLFNALVEKITILSPAHFVFTLKSGMSIDEIIED

SEQ ID NO: 7564 - protein, 508 aa, synthetic construct
MKKAIAYMRFSSLGQMSGDSLNRQRRLIAEWLKVNSDYYLDTITYEDLGLSAFKGKHAQSGAFSEFLDAIEHGYILPGTTLLVESLDRLSREKVGEAIERLKLILNHGIDVITLCDNTVYNIDSLNEPYSLIKAILIAQRANEESEIKSSRVKLSWKKKRQDALESGTIMTASCPRWLSLDDKRTAFVPDPDRVKTIELIFKLRMERRSLNAIAKYLNDHAVKNFSGKESAWGPSVIEKLLANKALIGICVPSYRARGKGISEIAGYYPRVISDDLFYAVQEIRLAPFGISNSSKNPMLINLLRTVMKCEACGNTMIVHAVSGSLHGYYVCPMRRLHRCDRPSIKRDLVDYNIINELLFNCSKIQPVENKKDANETLELKIIELQMKINNLIVALSVAPEVTAIAEKIRLLDKELRRALVSLKTLKSKGVNSFSDFYAIDLTSKNGRELCRTLAYKIFEKIIINTDNKTCDIYFMNGIVFKHYPLMKVISAQQAISALKYMVDGEVYF

SEQ ID NO: 7565 - protein, 528 aa, synthetic construct
MLAASRGWEVVHTFKDVGRSGWDPNAVRPEFEALMEAVRAGEVDVVIVNELSRLTRKGAHDALEIDKEFKEYGVRFVSVLEPFLDTSNPIGVAIFALIAALAKQDSDIKAERLRGAKDEIAAVGGRHSSSPPFGMRAVREKIGSLVVSVLEPDEDNPDHVALVKRMAAMSADGISDNKIATTFTEEEIPAPGEAERRATPKRMESIKRRRVSDKERPIQWRAQTVKWILSHPAIGGFASERVKRGKAYENVIARNLVGKPLAPHRGIIPGAQWLDLQEKRKAGTQPGRKSGGNAVPTLLSGWRFATCGVCDGALGQTPGNGDGSYMCANPKGHGGLGIKRSELDDYVARRVWARLENSDMDDPEDRVWVEAAAQRFALQKDLSSAQEERRETELHLDHVRQSIAELQEDRKRGLYRGRDELNTWRATLEQYRAYEDQCVARLTELEEEASATIRIPVEWTEPGEDPIGKGSPWASWDIFERRAFLDLFLSGVSVGRGRDPETRKYIAVEDRVTLHWRPLPADDETDED

SEQ ID NO: 7566 - protein, 558 aa, synthetic construct
MKVAIYTRVSTDHEDQLSSLKHQEEYYIEYCHKKGYEIYKIYADEGLSGTSAKREKFLEMLHDAGVDAIIKKNGRIEFELSDRKPKFEMIITKDVSRFARNINAIEIVRALKRKGVYIFFENADLSTKMNDWEFRLGLFLLFSQQESIDRSKKVRFGKLQRAKKGHYKMSVVLFGYEYDKQNDKYVVNEEEAAIVREIFDMYTNQNKGTKIIAKELNQRGIKTRRGKKWDGEAVKRLLTNEKYIGKVIVHRYTKPDVMSSARYIERDPSEWVILENAIPAIIDEETWKKAQEIMESRVQFSKTGRKVGAKTGESDFYKKLICAKCGAYFTRVSTTKMRKKLNAVIKEYNYFCRNRRIYGTCDMKGISHNTLEREIMNFVQSKILHEMIKKKDYEKQMYEMLMNIQKRKMESVEKEREKIQNEINEIGAQIDKLYDTFLTNENSQLLLEATQRKIEQLERKRKKLEREKMKYDMSYIEEENQQIQRSYQKIQEYAEKERYTFEEILAMIQKIVVYEETEEGRELEFYFNLPTMLAYIFEDEIEDVETEIIPHSWKIQIK

SEQ ID NO: 7567 - protein, 520 aa, synthetic construct
MKKITKIEGNTANSFKPKDRVVAYCRVSTGSDEQLVSLQAQKAHYESYIKANPEWEYAGLYYDEGISGTKKENRSDLLRMLSDCETGRIDLIITKSISRFARNTTDCLEMVRKLIALGIHIYFEKENINTGSMESELMLSILSGLAESESISISENTKWAIQRRFQNGTFKISYPPYGYQNIDGQMIVNPKQAEIVKYIFAEVLSGKGTQKVANDLNQKGVPSKRGGRWTATTIRGILTNEKYTGDVILQKTYTDSHFNRHTNYGEKNMYLVENHHEAIISHEDFEAVDAILNQRAKEKGIEKRNSKYLNRYSFSGKIICSECGSTFKRRIHSSGPRKYIAWCCSKHISNITECSMQFIRDEDIKTAFVTMMNKLIFGQKFILRPLLQGLRNQNNAASFRRIEELETKIESNMEQSQVLTGLMAKGYLEPALFNKEKNALEAERDRLLAEKDQLTRSVNGDFAKVDEVDRLLKFATKSKMLTAYEDEFFEDYVERIIVFSREEVGFELKCGITLKERLMN

SEQ ID NO: 7568 - protein, 523 aa, synthetic construct
MAVSRNVTVIPAIKRVGSNKSSERKPKIRVAAYCRVSTDSEEQASSYEIQIEHYTNYIKKNKEWELAGIFADDGITGTNTKKREEFNRMIEECMAGNIDMIITKSISRFARNTLDCLKYIRQLKDKNIAVFFEKENINTMDSKGEVLLTIMASLAQQESQSLSQNVKLGIQYRYQQGEVQVNHKRFLGYTKDENKQLVIDPVGAEVVKRIYREYLEGASLLQIARGLEADGILTAAGKAKWRPETLKKILQNEKYIGDALLQKTYTVDFLSKKRVKNNGIVPQYYVENSHEPIIPRELSMQVQEEMVRRSNLRGGKGGKKRVYSSKYALSSIVYCDHCGDIYRRVHWNNRGYKSIVWRCVSRLEEKGSECTAPTINEETLQTAVVKAINELLANKEPFLSTLQKNIATVFNEENDNATNDIDSKLEELQQQLLIQAKSKNDYEDVADEIYRLRELKQNALVENAEREGKRQRIAEITDFLNEQSYELEEYNEQLVRRLIEKVTIYEDKLTVEFKSGIEIDIEI

SEQ ID NO: 7569 - protein, 534 aa, synthetic construct
MEQVRYGMWDSSILVVESIDRFSRQNPFDVMGYINALMAHNVAIHDVMANIVISRSNSKDLPFVMMNAQRAYDESKYKSDRIRKGWAKKREQAFNKGTIVTNKRPQWIEVENDKYVLNHKAAVVKEIFALYQTGMGCPTIAKQLQTKEGEQYKFNRPWTGELVHKILTNRRVTGKIFISEIIRNHDDIDNPVTQKKYDMDVYPVVISEDEFELVQELLKSRRPNAGRITVKKEGQEEVLIKSNLFSGIARCTECGGSMYHNVVRAKRTPKKGDPKIEEYRYIRCLNERDGLCENKAMTYETVERFVVEHLLGMDLNTVIKEQEFNPEIEVIRIQIDQVKDQITNYENGIERRKNAGKAVSFEMREELDDAKLELEKLLARQASLATVQVDVPVLQDVNVAELYNVNNVDIRTRYENELNKIVSNISLKRNGNFYTIDIIYKQNELKRHVLFIENKKKEQKLISEVIIENVDGTKFYYTPSFVISVKDGEIRFQQTKEDLTIIDYSLLLNYVDAVDRNDAVGVWMRNQFNFLTSN

SEQ ID NO: 7570 - protein, 551 aa, synthetic construct
MNKKSAIYVRVSTSHQIDKDSLPLQRKDLINYSKLILGINDYVIFEDAGYSGKNTDRPAFKDMFNRIKEGEFSHLLVWKIDRISRNLLDFCSMYDELKKYNCTFISKNEQFDTSSAMGEAMLKIILVFAELERKLTGERVAATMLDRATKGLWNGAPIPLGYKWDKTIKFPIIDDEEKLTVESIYNKYIETESTSAVMKYLNQENIKTKRNGSWTTKTVGDILRNPFYKGTYRYNFRESARGKKKKENEWIVLDNNHDPIIALDLWTKCNNILDENAKKNSARFRAKSKTHIFAGLLECGECHKSFYSKSDKTSLDGYTPSIYTCSSRYNHLGCNQKTISDTIIGNFTLNFISNMIKLSKTYKKLSPEDIEKNLLSGPSFNDVKGIIEIDDIFNSFYNTSSKIFKPNKQETKPANVDLNKLDADLKKQHRALERLENLYLYAEDEMSEKDYILKKNIINTKIKEIDTKIKSSATISTSTYNINFFLNTATLELSKEIIEGNINMKSLIQRAGRDIIKEFVNSLITKITVRDRKIISIQFTNGLISTFIYEV

SEQ ID NO: 7571 - protein, 529 aa, synthetic construct
MKAFALYNDYEIVGEYEDAGKSGKSIEGRIQFTRMMEDIKSGKDGVSFVLVFKLSRFARNAADVLSTLQIMQDFGVNLICVEDGIDSSKDAGKLMISVLSAVAEIERENIRVQTMEGRIQKAREGKWNGGFAPYGYQLIDGKLLINEEEAIAIRTIFDQYVNTSIGANGLSKYLENHGIRKIPRQNGKNPLFDAGLIRKILKNPVYNGKIAFGRRTLEKVHGTRNEYRQVEQDDYLVAEGIHEAIIPDELWQAAQVKLKAQAKKYEHVNKGKNMRTHLLSGIVKCPICGAGMFGNKSIKYKKDGTKYKDFYYYGCKHRLMNRGHKCTYNKQIREELLDDAVAEVIIKLVSNPKFASMMQEKINMKVDTSAIENEIDNYQKELRKNHSTKFKLIEEIDNLDVDDKHYKRRKQDLDDRLYRMYDKIEELESLLIDAKAKKQTIEAEKLTGDNIYKVLIYFDKLYKVMNDVERRQLIEALISEIQIYEEKQPNGQWLKSITFKLPIIDEDLNISLDNDEQVECIALIQRMKS

SEQ ID NO: 7572 - protein, 620 aa, synthetic construct
MAGIRMENKIYEVGMYCRLSKDDGTDNESASIATQKSILTDYVKKQGWHLAKTYVDDGYSGTNFQRPSFQNMIKDIESGLINCVITKDLSRLGRNYLDCGLYLEVFFPEHNVRYIAVNDGVDTLNKSAMDITPFRNILNEMYSADVSVKIKSAYRARFQQGKFMGTTAPYGYVKDPADHNHLLIDDKVAHVVREIFDLALAGNGIAKIRKHINKQHILRPAAYAAEQGATGYERYFEENEENRYIWSENSVRGILRSPIYAGNLAGYKRIAANMKSKKRPSKLPEEWEVIPDTHEGIVTQEEFDTVQQLITSRRLPENKGGFENIFAGVIKCADCGYAMRAMSANRRKRPDIIDCVQYSCNNYGRYGNIMCTAHSIEARDLFNAVLTDINRFADMAVNDEKAVRAIEKRLTETDQSKAKALEKEQRKLNKRLAELDRLFSSLYEDKVMERITERNFEMMSGKYQKEQLEIEARLKEVTETLSDSYEKTQGVRDFLSLIRNYQGIKELDATIINALIDKILVSEREKLTDGMVRQEIKIYYKFIGFVGELHITPTKRWTALKPKNCTVCGVEYVPRSGISKYCPACAKKIQREKSNESKRRSRERNRQACIELSAKNDRLT

SEQ ID NO: 7573 - protein, 604 aa, synthetic construct
MRNFEKITALYERLSRDDELEGESNSIINQKKILEEYASKNNLTNIIHFTDDGISGTQFDRPGFMAMMNGVNTGNIGCIIVKDMSRLGRDYLKVGQCMEILRQKGVRLIAINDNVDSFYREDDFTPFRNIMNEWYARDTSRKIQSTFRSKGESGKHTASTPPYGYIKDEKDKDKWVVDEKAAEIVRRIFNLTMQGNGPYRIAKILEAEKIDIPAYHQQKLGYGLHQSKNFEYPYRWCSSTIASVLKKKEYLGHTVNFKTRKHFKDKKSKYVSEDNWLIFENTHEAIIDQETFDNVQRIRGNVKRYPDGWGEYHPLTGLMYCADCGSKMYVHRTNNYKNIPYYVCSNYKKVPCGTLCPSAHRIKAEVVINLIQETLKDIKNYLDEDNEAFIHSIQNEMEEKEKAHIEKKKIRLTESQNRLQELERLMCRIYEDMILNKIPNNRYEILNNQYETEQLTLSKEIKDLELVISRYEMETDKARKFISLISRYENFDNLTNTMINEFVKKIIIHERDRKGSQTSKQKIEIYFNFIGNYEVPKEELSEEERSKLEEEERKINERRDRLHQNYLKRKANGKQQEYEERYKERREQKKQEKLKSLRKDYEKA

SEQ ID NO: 7574 - protein, 507 aa, synthetic construct
MKRAISYIRFSSEKQSRGDSLRRQSKMVNDWLKAHPEYYLDQDLSFRDLGVSGFTGKHLKGGLGDFLTAIEKGLVKAGDTLLIESLDRLSRQAVDRASELLRNILRSGVDIVTLSDGEHYTSESLKDPLALIKSILIMQRAHEESLRKSERIQAAWDAKKEAAKAGIKVSKRCPAWLRLNDDRKSFSVIPEKVETVKRCFQLRLEGKSIWEIVRTLNDEGHRSMNQYKPGKFGQTSVQDLLKNRSVIGYFTPKGCCEIADYYPSIIPESDFYKVQQLSHSRYGKRSVSDKPLSVNLFKGVIRCSECGHALIITGFSDTRNGIYRCPLRNENRCSAKGLSRKQTDGTLLTLLSRLDRFDSDTTNTIDTLKLHREHISNNIEKLVQLSLEIEDLSAITIKLKQLKGELSQVDADIEKETQRLKSIDVGCLSDCDLTTKAGRIEAQLIIKSAVKEVVLNAAKRRCKVTFHNSKSITLPITENPSEDVTEAIQSLSEVTEKGLIDVDVVEI

SEQ ID NO: 7575 - protein, 509 aa, synthetic construct
MRRAISYIRFSSERQLKGDSVRRQSKLVTDWLDKNPEFYLDSSLSFKDLGKSAFSGKHLKGGLGDFLTAIEKGLVKAGDTLLIESLDRLSRQDIDIASELLRRILRAGVDVVTLSDGEHYTRESLKDPLALIKSILIMQRAHEESLRKSERVQAAWNRKKELISEGIKVSRRCPAWLKLNDDRRTFTIIPDKVEVVKRAFDLRLQGLSFWAITRTLNDEGHLSLNQYTPKQKGWSDTAVKKLLRNRAVIGCFTPAGREEVQGYYPAIISESLFYRVQQLNTGQYGRASVSSNPLSVNLFRGIIKCSECGATIVLGGYALKRFGMYRCPNRSANRCSAKAISRKQTDATILYMLALCDRFETENTDIIDSLKLQREDLQRKISKMAELAIELDDMTIITEKLRDMKNALSKLNHDIEEETQRIKAITTGSLKDIDRTTKEGMVETQLLIKGVLKEIVIDAAKRRCKVTFHNGKAITLPIIEDPSKDVTEAIQSLSEVTERGLIDVDVVEI

SEQ ID NO: 7576 - protein, 565 aa, synthetic construct
MQNSSDKNINRVAIYIRVSTNHQIDRDSLPMQRQDLISYAKLLLNTEQYVIFEDAGYSGKNTDRPKFQEMMKQLRNGLFTHLLVWKIDRISRNLLDFATMYQELKELGVTFISKNEQFDTSTAIGEAMLKIILIFAELERNMTSERVTATMISRASNGLWNGGRVPYGYNYDPDKKEFKINPAEAEVVKLIHDKYEELHSLIRESRMLNERGIITRYGNLWNPTTLQIILHNTFYCGDYQYNVCKEGNRQKQKNKSEWVKIHNHHEAIISHEQKERIIALLDCNRRLNKKVVKSEKYVHIFSGLLYCGNCNKLMGASPSSKINGYQYSRYTCPTKRQLQCDSKSVSDQTVGEFVFNYILNLINSQRDFKSISSKNELQKHLLKGSSFNDIKSIDSDGLNDLYNVLLSGNINQDIYSNDVSFKKEDSSNSSRTKLLSEKQKLERALDRLTNLYLYSEQTLSEQNFLSHKMQIDDKLNEINDQLSFMESDDWQQSISDAEFIVKTSSFIISKKLDGRNYINYKRLATSIDKEVLKSFVNSVIDSIIISNGSIETITFKNGLSHTFIR

SEQ ID NO: 7577 - protein, 521 aa, synthetic construct
MMNNKVIVIPAKKKKGNSIKESEKKKLRVAAYARVSTDSDEQATSYDTQVDHYTNYIKKNPEWEFAGVFSDEGVSGTYTKKRDGFNKMIGEALEGNIDYIITKSISRFARNTLDCLKYIRKLKENNIPVYFEKENINTMDAKGEVLLTIMASLAQQESQSLSQNVKLGFQYRFQQGQVQVNHNRFLGYTKDEDGKLVIVPEEAKIVKRIYREYLEGASLRDIKLGLEKDKIVNGAGNKKWHVSNLNQILTNEKYMGDALLQKTYTVDFLNKKRVKNDGIAPQYYVENSHEAIIPKEIFMRVGEEMYRRANMVSGKGKRRIYSSKYALSSIVYCSKCGDIYRRIAWNNRGKKYTVWRCCTRVTHGPDACHARTIKEEDLQEAVVEAINQLISESSELKEIIKENIEKAITGNGSRQIEEIDKEMLAVQEELLKVANAKKDYTDLANKVEELRNEKEKILLNVAEEKNVKSRLMELEEFLDNQELEIERYDEELVRKLVDKIVVYEEKLKVIFKSGLEVEINQ

SEQ ID NO: 7578 - protein, 520 aa, synthetic construct
MKKITKIEANQKEESVLRVAAYARVSTDEEDQLVSLKTQKAHYKKMISENKTYTFAGLYFDEGITGTKKERRDGLLKMLKDCEDGKIDFILTKSISRLARNTTDCLEIVRRLLDLNIGIYFEKENIDTRTMESELMLSILSSLAESESRSISENNKWSIKKRFQNGTFIISSPPYGYENIDGKMVVNEEEGKIIKEIFEKYLSGKGTHKIAEDLNKRKIKGQKGASWHGSTINGILKNEKYTGDVIYQKTYTDENYDRHKNKGEEDQYKIIDNHEAIVSREDFEKVQELIRLRALAKGNGENTKRYQNRYSLSGKIKCGECGSSFKRRHHYNGKDKYIAWTCSEHLKDINKCSMKFIKDKDIKLAFVTLVNKLIFGKDSILTPLLESLKRVDSREEVEKINKIEESLEKLKERKEVLNKLITSGVLDASIYTKESSEISNEERKLLREKERSQKSILGNDEEIRELEKLIGILGKSEMIDHFEDDMFEEIIDHIQVVNRETLDFHLKCGLVLREEVKNNV

SEQ ID NO: 7579 - protein, 521 aa, synthetic construct
MARITKIEATKSFVKERKIRVAAYTRVSTKSEEQLLSLEIQKEHYESYINANSSWEYAGIYYDEGISGTKIEKREGLLALLKDCEDGKIDRVITKSISRFSRNTTNCLEMVRKLTSLKVFLFFEKENIDTEHMSSELMLSILSSIAESESKSISQNNKWSIKKRFMAGSFIVSYPPYGYENKDGKMNIVPKEADIVKEIFTMTINGMGTHLIARELNNRSIPSKKGAKWHGSTVRGILQNEKYTGDAIFQKTYTDDNYNRHINYGEENMYLYKNHHDPIISHEIFDKAAEVIKQRGREKSIEKGTGKYQSRYVFSGKIYCGECGATFKRRHHYKPSGDYVAWCCNGHITDKNACSMMYIRDEDIKTAFLRMIRKLQTTHDKVLKPFVMGLKGTNNKQRLKQVLALEEQIEKNEEQATVLTNLMSSGYIEPEVFHAENNKLTLEADRLARNKQIIVKSINGDLNHLDEAQKLFRFASRKEVITEFNDALFLEYVDTIKVNNRNEITFALKCGLNLRERLVKI

SEQ ID NO: 7580 - protein, 524 aa, synthetic construct
MTKKVTTIPATITKFSQTPINRVTKRRVAAYARVSTEQEEQQTSYEAQIDYYTNYISGREDWEFAGMYSDEGISATNTKKRVGFQTMVTDALDGKIDLIVTKSVSRFARNTVDSLTTVRQLKEKGVEIYFEKENIWTLDSKGELLITIMSSLAQEESRSVSENVVWGQRKRFADGKVTVPFKRFLGYDMGEDRNLVVNPEQAKLVKRIYGMFLQGKAPHTIAKILTEEPETLTPAGKQKWNPSTIKSILTNEKYKGDALLQKSYTVDFLTKEKKANEGEIPQYYVKGNHEAIIQPEIFDMVQKQMALRTKGNNRRRSTSIFSSKLICGDCGNFYGSKVWHSNTKYRRTVWRCNHKYGNDEKCQTPHLTEDEIKEIFIKATNQLVDMKDEVISNYDEMKEMLFGTVDLESEQGKLEDELNEVASLIEDCINENARVALDQSEYEKRYNSFVERFDKANGRLEEVKVQITERQARGQQIEIFLKDLEEVGVLEEFEDDLFLALVENIEVGRYKVVVRFKDGTEVEG

SEQ ID NO: 7581 - protein, 524 aa, synthetic construct
MNNVAVYCRVSSEDQAERGTIESQIEFAMKYVDLHQLNLYKIYKEDGVSGTIPLHERPVGIQLIEDAINKKFDTLLIYKLDRLGRSARVTLNSIYQLEQLGVQIKSMTEPFDTSNPSGRFMITMLAGVADLERETILERMWHGANRAAREGKWLGGIVPYGYIVDSQGYLVVNDERIGDLEMSEKEVVQLIFDLVGNKKYSTMKVADYLNSLKIPTHYQKDDRQILKGKRKANTAGVWLPNNIGRMIKNTTYKGVHYYGKRSKKQRDVIERKVPAIVSEDLWDKCQEVLKNNQILSMKNSKRNYLLRGLIRCELCNSTYHGSFSTKHEYYICTGKTKYKGPGYGRCKAKNIRSDFLNKVVWEDVVNFINNPGKVLNFLDTSNNNNNIYTLNNLESEIDIIKSRLDNIETEKESILNLFRKNIITSLDVEKQFENINKDKIQLQERLLELEKEILNVRSKNKNTDKIREFLSDMKYKLETNEVTFELKREIIETLVGTIKVNTIFDENGKAKINIKIEYNFDCTV

SEQ ID NO: 7582 - protein, 518 aa, synthetic construct
MNKRYDTKNLEPACFYLRKSREDQESEARGEGETLAKHKNALFRLTKDYGVNITKVFEEVVSGESIIHRPEMLQLLKEVGEGKWKSVFCMEIDRLGRGDMEDQGLILRTFKQAKTLIVTPRKVYDLNDEFDEEYTEFEAFMARKELKIITRRLQGGRLRSVEDGNYLGTLPPYGYQIEQNNRKRYLIKNPEQTTPTELIWKLYRTAGIGTNKIANELNRLGYRSYTGKLWNASSILFILKNPVYAGITAWRKTEQKKSASPDKRRDTRTRPREEQIWIYNTHEAYVTEEEYREVQDMIGMKYHPPYQLINGMTNPLAGLIKCDMCGASIIYRPYTKQRAHLMCYNPHCRNKSTRFEFVETRLLEVLSDWLAEYSEQMRRPPSEKGNLISIKEKALRNMRKEVIDLEQQKERLHELLEKRIYDEETYLERSRKLSERLAEAGQAITEIESTLAGEIKREKARKEIIPKVKQLLTIYPKLTDPARKNELLKSVLEYADYRKEPDQKGEEFALVLHPKLPQ

SEQ ID NO: 7583 - protein, 533 aa, synthetic construct
MAAQVYSYRRFSSHQQKHGGSIERQSDYAKQVAEEHALRLNEDLVMTDEGLSAFHAEHVSRGALGIFIRAVDEGLVDEGSILIVESLDRLSREMPLEALNQFNVLINKGITVITANDGQVYNTSTIAKDPTKLFLSIAVMIRAHDESLTKQKRSVAYVKQQIRKFEQEGKGDVAGTTPFWISRTKKGFELNERAEIAKRIVELYLDYKGLNTISRELADMDIPSPQKGNNRWGISTIRTVLDNKALYGVKHFKLRYLKDGRNLDEEYDLENYYPALISKDDYILIQERKKKKATSRESYGEVTYLLSAYGKGRSICSRCGHAVGSQLQKQVNRKGEYTQSVLRLHCMKHKESMDCCKSFKAGHMEEAFIKSICNQLDGRFLTSSADKQREAEILRAKISEADERIANIIDTLITVKQVDTKKRLQGALMEAEEEKHKLEKQASAIKTNTMSMEEFNKLELLGKKAVDIRNNEERKLLKQMLLQTVERLIINFETNSLSAYFYSGSHLSLNYDQKSESYKTVIFHKTKQRAREL

SEQ ID NO: 7584 - protein, 511 aa, synthetic construct
MNIYGENHQEKVKYDEYPYLVYVRVSTDKDEQKDSVPNQIDICRYWLEQNHYSWQEEAVLKDDGLSGTYFLERKAMQLILQKARNREIKMVVFKSIHRLARDLKDALEIKEVLIGHGVRVVTMEENYDSHLEGKNDMKFEMYSMFAAQYPKTLSVSISASLAAKVRRGDHIGKVPFGYDRINQKLVINEEESKVIKRIFDWYTEDNYGFKAITHKLNEGVENGTVVPPKESSYWGVTSVQRIIKNPVFCGMFILNKYTTIKVDGKKKQIVNPREKWTVFEDHHPGIISKQQWSQANNKDVTRYNTKIAKWNEFRGLMKCSECGSNMVTMVSYKKRKSDGHKTTWRYLKCSAYRRGGKAACVNHTPITYEDFREFILNTLVAKWNSIELELENNLGKNNEEKAKLLRVQLQQLEKKQARLVDMYLNEMLEKDDYMQRRKNFENEIDKLNDDIFMYDNMESNKVQINSIKTAFGSLNDREQDLTRIFKEIIDSIIIAPNGEIEISYRIDGSSL

SEQ ID NO: 7585 - protein, 493 aa, synthetic construct
MPKAVGYVRVSTDKQLENTSIQKQKEEIEKYCLQNQLTLVNIFNEGAHSAGPFTERKKFMEMYRELFDPKQGIDYLITFKSDRISREQTEAGILFKMITDANKHLICIADNIDTRDHNSKLVFHLMSLVSDLERDFIKFRTSTGLEKNAKNGNFNGGAVYGYDVSNKKLQLNPNEARVVKYIFEKYANDKWGYRKIASNLNDQMIRTKNKNLWNVTSVKTILNNKIYIGYVKWKGTYHKGNHTGIIDDELWEKTQKTLCIKSYMPKKIHPGNYPLSGLLKCPECGAPMVQGNSGKKYKYYQCSRNKASGKRACSSNLVNKNHTEEYVFHHLYNSLKSMNLSSPILNTTLNTLSSEVEPIEEKISHIKNDLSQFEEKRSSLIEWRTDDVLSEMTFRNEMSKLKTEEENLKQNLEILNMQVNQRKNADLCKNIAEIFAEPDSFFSVLSEKDKKEVLHYMLDSIQINTGKKPKERTVREINFKFTVDHISEINKSA

SEQ ID NO: 7586 - protein, 430 aa, synthetic construct
MQEGKIPRGSYVLFESTDRLSRRGWRHTQELIRTITCVYDCKLVILDKGQVYTKENVNDVVQNILLMVAADMAEKESQRKSDLVAAAYKSKRQDGDVSRWPFWIDKTDSGFVLNENAETIRLIIALRLKGVGALGIASELNRRGIKSSRGGNWGHTSIRVVLSNSALYGTKDFYSMKTIKQFDEHGEEIKVTDNQLVSSMPDVFPPLCDFTTWQQIQIKGEKPGRKGQSSPFHNMLFCECGAAMGLQIGSAGERYRKCTRSKVGSCSQKMIRNFDETLIECLGRITYESSETQKDELPELQARLAKLEGVKDALMAAGAVDALVDVYKDIAKAKDAVANAQKIAVVPTTELKDVFAGSVDEQRVALKRVISKVVVNRVKNTASIKVHLTNGHLKIFGVSIGVKKQSGVNRFFSETDTEKFLAEVVALNCD

SEQ ID NO: 7587 - protein, 514 aa, synthetic construct
MKKVALYCRVSSDDQKERDTIENQVEILHTYIEMKENLEIYNEYLDNGISGTVAFEQRPAGKQLIEDASKGMFNTVLVWKIDRFGRDTLSGLNAVEMLRKYDIEILSVTEPFDLNTSTGRFQFITYLNMAELERNNILDRMYLGATRAAKKGKWMGGIVPYGYIINKKGYLEINKEEAEIIKKIFRMYTENKMSTIDIAIYLNNANILSSCGKGKGKRTKGITGKWRSGSIQRILSNTTYKGLHYYGKRSTRRKELIVRKVPAIISEKVWEKAQAQKKENFIISKRNLKREFLLRKMIKCKRCGKTYYGVSYKNRSDVYVCSGKRNEYVKMYGIKCDNVNVNADMLEEQIWNDCLHILKKYDYYVEQMKKRAGNSNEDIDSDLKKLRKALNDKKSEKNNILTLFRKNIISEEEVEEQLRDIKREEKSISNLIESLENKINNRKHKDELISTVSSKLKTYYNKLDNLTYEDKYDLVRLLVKSIEVETVVEDGQKVPNIHVVYNLVKLDTYTDTDS

SEQ ID NO: 7588 - protein, 519 aa, synthetic construct
MKKITKIDELPKSQPSKSKLRVAAYARVSTDSDDQLVSLKAQRVHYENYIKSNPEWEFAGLYYDEGISGTKKEKRPELLRMIRDCESNRIDFIITKSISRFARNTMDCLELVRQLLNIGVTICFEKENLNTGDMEGELMLSILSGFAAEESASISQNMTWSISKKFQNGSFIIGSPPYGYANVNGEMVIVPEEAEVVKRIFSECLSGKGGSVIAKGLNRDKIPARRGNHWSTGTVIDMLRNEKYKGDALFQKTYTDNNYNRRPNKGEKDQFYCKNHHEPIVSKEVFSKAQKLITQRAKIKAVNKKAYQNRYVLSGKIICGECGSKFRRKRNYSAGRSYIAWSCIGHIEDKNSCSMLFIRDGEIKATFATMMNKLAYSRKVILGPLYDSISKTQEECDLERIDAIDKRMEQLTEERNTLIGLMTKGFLEPALFSKERNVLDSEIKNLTTEKTNLVMSFTSGTSQADEVKAILEHVSKDKFDGNYTDEAFEKYVENIIVNSRDELIFELKCGLSLKERVVR

SEQ ID NO: 7589 - protein, 416 aa, synthetic construct
MAQVSVVTPVRPLAPKLVNVAAYARVSTNGAEQLASLSAQVSYYSRLIQSTPGWAYAGVFTDEGITGTSMKSRQGLADLMNAARAGKIDLVLCKSISRLARNTVDLLATVRELKDLGVAVRFERERIDTLSVDGELLLTLLASFAQEESRSLSQNVKWAIRNRYKNGGTNSFVVFGYQWADGQFTIIDDEAKIVRLLFANYLDGISPEKTATMLNDQGKRSRGGGRFYGSVFRRMLENERYKGCQMLQKMYRPAIQAPNRALNDGELPRYWVEQALPPIIDKSVFDAVQAEIAHRREIGPAATPSKNTGVFTGRICCGACGKNYQRKTRTYKSGTSYKFWRCWSACTGNGNPCRGHNLRETLLEHACADMLGAQSFDPVSVGEQIVMIEAFSHQLTFHLADGTMTPVGLTSEGRLA

SEQ ID NO: 7590 - protein, 525 aa, synthetic construct
MSRTVTAIPATKKPGTVTTLSGVPARRRVAAYARVSTEMEEQTSSYEAQIDYYTTYIHSRNDWQFAGLYADEGISGTSMKRREGFQTMIDDALAGKIDLILTKSVSRFARNTVDSLTTVRKLKDAGVEVYFEKENIYTFDAKGELLITIMSSLAQEESRSISENVTWGHRKRFQDGKVMVPYKSLLGYKKGEDGSLVIDETQAPTVRLIYQLFLDGMAISEIKTELAARKILTPRGKEVWSTSTVRSILSNEKYKGDALLQKTFTTDFLTKKMKVNEGEVPQYYVTGNHEPIIAPRIWDQVQYELATRHGNISSAKVGLFSTRLKCAQCGAWYGRKTWASNTKYKYTVWQCNHKYAGERRCSSATMKNEDIKNAFVQALNQLIARHRYESQLPQILDSMFDTSRMEEQAAACQTKIVELTEQIEALIGQNQRHALDQDAYQNKYTELDTAYRKTLARKTSLEADIAANTAKHAAVTTALGDLAGEPVSDFRPAQWSALIDHAIVDEDTIRFVFRTGEQVSMTLQG

SEQ ID NO: 7591 - protein, 520 aa, synthetic construct
MKKITIIEANQKEESILRVAAYARVSTDEEAQLVSLKTQKAHYEKIISENESYTFAGLYFDEGITGTKKECRDGLLKMLKDCENGKIDFILTKSISRLARNTTDCLEIVRRLLDLNIGIYFEKENIDTRTMESELMLSILSSLAESESRSISENNKWSIKKRFQNGTFIISSPPYGYENIDGKMEVNEEEGKIIKEIFEQYLSGKGTHKIADNLNKRKIKGQKGASWHGSTINGILKNEKYTGDVIYQKTYTDENYNRHKNKGEEDQYKIIDNHEAIVSREDFQKVQDLIKIMAIAKGNGEDTKRYQNRYSLSGKIKCGECGSTFKRRHHYNGKEKYIAWTCSEHLKDINKCSMKFIKDKDIKLAFVTLVNKLIFGKDSILMPLLESLKRVDSKEEVEKINKIEESLENLNERKEVLSKLITSGVLDASIYAKESSEIYSEESYLLREKERIKKAILGNDEEIRELEKLIEILGKSEMIDRYKDDLFEGIIAHIQVVNRETLDFHLKCGLVLREEVKEDV

SEQ ID NO: 7592 - protein, 520 aa, synthetic construct
MNSKVIVIPAKKKKGNSIKESEKKKLRVAAYARVSTDSDEQATSYDTQIDHYTNYIKRNPDWEFAGVFSDEGISGTYTKKRAGFNKMIEEAMKGNIDYIITKSISRFARNTLDCLKYIRKLKENNIPVYFEKENINTMDAKGEVLLTIMASLAQQESQSLSQNVKLGFQYRFQQGQVQVNHNRFLGYSKDEDGKLVIVPEEAKIIKRIYREYLEGASLRDIKEGLEKDKIVNGAGNKKWHVSNLNQILTNEKYMGDALLQKTYTVDFLNKKRVKNDGIAPQYYVENSHEAIIPKEIFMRVGEEMYRRANMVSGKGKRRIYSSKYALSSIVYCPKCGDIYRRIAWNNRGKKYTVWRCCTRVTHGPDACYARTIKETDLQEAVVESINQLISESSELKEIIKENIEKAITGDGSSRIKEIDKEMLKVQEELLKVANAKKDYTELADRVEELRNEKEKILLDLAEEKNEQSRLIELEEFLENQEIEVDSYDEDLVRKLVDKVVVYDEELKIVLKSGVEVNVCV

SEQ ID NO: 7593 - protein, 591 aa, synthetic construct
MPKRKRAPKKALRAVGYIRVSTDMQAEEGYSLENQEHQIKEYVKYQNMQLVHIYKEEKGASGKNIEGRPQFQQMLADIAKNRDIDYIVVLNMSRFARNAADALVTLNKLKSYNVNLYLIDDKLDTSSKTGSAMFSLSSIFAELERNNIRENTTAGRYQKARNGLWNGAQAPFGYRLDNGKLVIEESEAEVVRIIFDRYVHTPDGIHKIAVWLNEHGYKKEPRGNGKYVFFSPGTLKNILDNPVYAGKIAYGRRRMEQVEGENNEFRPVRQDKEDWQISEGQHEAIVSPELFDEAQKRREAESTPFPRKRSDHVNLLTGLLVCPICGRKMIATNTRGKVKKDGTLGKETHAYNCKYSKKAFGPDCTFTKQYRQELIDKEIDDVIGVCLDDKLIAEMLTYMHNEMQDTEAIEGEIAAQEKQVAKLETAIRSLSATMDAMDGTEPAYERKYRDLQERQDKLYEQIDDAERKLDEAQRRLDGAREGEATVEEVKLFLTEFGKAIGKVDKATRKTFYAELIDTIEIVPDADWKHGEGIVSRIRFKLPMIYGDKRTLEVSRREDGTLKPADKEVGNKYFRVTENTDECIALIQRVKS

SEQ ID NO: 7594 - protein, 650 aa, synthetic construct
MKNKKAYVYTRVSTSMQIDGYSLDAQEERIKQYAKAYGIEIIETYKDAGKSGTSISGRNEFIAMLNDIEAEKDKVDYVMVFKLSRFGRNAADVLQSLQVMENHNVNLICVDDSLDSSKDSGKLVITILSAVAEMERENILSQTMEGRKQKAREGKWNGGFAPIGYSLDNGELVVNEDEAKAVRMIFDLYANSDMGANGVSKYLVSLGINKPIRQNGKNPYFSASLIRQILDNPVYNGKIAYGRRKTIKDKTTGKIKLEKSDHYIIAQGNHEALIDDELWNTVQEKRKSQAKKYEKINRGKDERVHILSNLIKCPYCGAGLYGNKSRKRNKNKEGEHYKDYYYYGCKHRQMMNGHKCTFNKQIRAELIEKEVETIITQVVSNPTFAKKIEEKINIQIDTKEIDEVINKHLAKIRQLTGTKASLINQIDSLNFEDKHYDRKYTDLNLRLDAIYDQLEYAEMQLNDSRKRKEAILEEKITSDNIYKILVNFNSLYTVLSDIDKKRLLNEMIEEIQIYDEKTEKDTWIKSVVFKLPLIDNEIDFGLDNKDNVETVCLLTRKNVAGYVNVDIDVKELKRDKLPPKATYKQIQAYVLDKYGLKVSTLNIATVKDELGLEKQFSYEKGGMAAKNRPQCPKEKRDAIVDAFRYFKMTL

SEQ ID NO: 7595 - protein, 629 aa, synthetic construct
MKKCFIYHRVSSDLQLSGTGIERQEQNLNAYVERINLLAEMDDPEATIISDQGVSAFKGLNMSEGELGRWMDQVRAGMWDDSHLVLESIDRFSRQNPFQVVGYLAELDRHNITIHDVSLNMLINRGNSAMLPIVAMSAQRAYEESKIKSDRIRDGWRRKREQAFNQGTIVTNKRPQWIDIVEDKYELNDKVAIVREIFRLYQTGIGTPTIAKMLNERGSEWLFESGRLWRGESIHKLLRNKRVTGSIFISEIIRDYSSTSNPVDQKRYEKDVYPIAISKEEFNLVQELLKSRRPGAKVTGGKVLKKFYDPITNKPYLDRDGNVIELEVDTGKEIIQSNIFNGICRCARCGEAMYHNVVVAKRDSKKKGKFTEEYRYIRCIAERDGLCDNKALQYEVVEQFVIEHIKNLDFTQILKPNEINPEIELVRLKIEEEEAHIEDYKLNIERIRNTGKKIPFAVLVELEESEDRLKELKERQTTFTEVQVDTDYLKMVDPSILFDVKNIEVRARMAAELSKILDSIQLYRTGKHYVITINYKKVEILKHVLFVEAKKEPVLVSGVAIERFGDTVAYCTPSFSIVVEGVTSPRLINIEGEPLSIIDYSLLLNYVDAVDPNDAVGVWMRNQFNTLTA

SEQ ID NO: 7596 - protein, 576 aa, synthetic construct
MKRAVIYARYSTDLQNDQSVEDQIRLCKAHAERLGLNVVGEFSDRAKSGASMFGRPGLAKLMQKADSDAFDVLVAEHPDRISRDIADLAHIHKTLRFRRIEMNCVNGGAMDTVQIGMYGVVGQMQREEGAKKVKRGMVGVVRSGRNAGGKAYGYRPVPGRKGELEIVEEEAAIVRRIFSLYASGIAPRAIAAALNDENVPAPRGKRWNASTLNGNGQRGNGLLVNSMYAGKLIWNRVHMVKDPSTGRRISRINPETEHEEIEAPHLRIIDDAVFEAVQQRKASRGGSHSRSTPKYKRLLSGLLRCGACGGGMAINGSDRSGPRIICSTHKESGSCTNGARYYVEKIEQQVIDTLRAQFADTRIIDIYVKEYEAERRREAAEKRRNRATLERQIEETKTAITRIVERLAKGLIEDDDAAAILPGLRADRDRFQRELEEVEPVSNVIEIQPRAVRAFKENIERLAETISKRGETPPVELAQAFREMIAGVIVEPRKAGEPYRIEIKGYLSGLVSPELSSVLMVAEARSGLYHRLDNPELIDLGTWQIALVRAINNFIKKPKQLSANNDALGLSKRTAD

SEQ ID NO: 7597 - protein, 585 aa, synthetic construct
MDNKTKAVLYARVSTEEQATEGYSINAQKELLYEYANKNNIEIIEEYIDEGKSGKSIEGRPEMKRLLRDAREENFHAVIIYKLDRLSRKTKDALEIAEKLDFHNVQLISYSENIDTTTPGGKMFFTILSSVAEMERSTIIDRAKMGMVQRAKEGYYNGGRVLGYDSINKHLVINEEEANIIRLIFDYAEQDLGYKAIVSRINTMGYKTKRGFDFSINTIKQILDNPLYIGKIRFNMYENWAEKHRKGKNKDYILVDGRHESIIEQEQWNRVQQSRKKRSIKPAQSNNPYILNGLIRCPECGYGMVSGSSKGAKGKKYRYYVCGLFHNKGSKACSAHSIRADRAEEQVFEELERIVSEPYVLKRIVDNVNEKRIDARTPINDEIKILQTKLNKVEVRINNITNQLMDDPSLVAIFKPKLTGLTEEQAELQSKLKALNTELEECDTTPIDAQALHNLLTNFDKVIKDAEPEQQKALLRLIIKNIQISKEAPRGIGRHIKKINLYFDFTIEGLEEHTLELLDTVSMDFIAPVESWMLENEDGKMLSEMMDSLNILPLKDVRFPPQNPKRPIHLLHQHQPHQLMWKCHL

SEQ ID NO: 7598 - protein, 585 aa, synthetic construct
MTNNHQTPSPRSTSTTTRTPPQVVSYSRYSTKKQSKGFSLERQDENLKRWSDANGIPISELSFADLGISAFSGTAVREGLANMLEAVRQGAVPQGWWIAFERIDRLSRRGITETRRLIDQILQHGVNIVCIGEGIELRPDDDANDELKGSLMVAIHAHLAREQSAKASERIRSTAAAKRRRARETGAPIKKRLPYWLELSPDGSKYQFKAGRIETVRYIVKRRLEGRGFHGICAELNAMNTPPLTRMSKQWNDMAIAATVRNVALFGQYQPAITNEVEKVDSDGRRKMVRVAIPDGEPLDNYFPAVVDRATWDQIQSDSRTKMKAGRRGDNPVSGLTFCRHCGGTLPMKPASKTSTNGTRHTYRYWTCRGAVDGKCDHGKGIKDLDHFVVKACRRIVPRTLGQGDGGQDPAAAFEYQSLLERRGKVTTQIATLDAAMADPELGAAALKHIARQIDVATANLEQVDAEIATVEARQKADQDTTPEAVEKLKQLEGDPVAYNLHLKTLVHRIVAGAVQLDDGSWSDVALLFRFTVELLNGQRIDVTVSRRNRWDKDPVEFYSHSEDATSTGGEGDLFPWETDDGQDD

SEQ ID NO: 7599 - protein, 447 aa, synthetic construct
MKKVAIYCRESTEKQDIDSLVSLCEKQAIKLGFREYKIYRDIKTGYSSERTEYINLIDDIKANKINVVITYESARLGRDELEHHILYKIFKDYGVKVYNMSHGWVDPNNEDDLFLEGLLNLLDAREGRKTARRVRDRMKEICQSGRWTGGPAPFGYCLKNKELFIDEEKAIIVKEIFRLYLEGVPSSKIAEIYNFESRQIRRMLSNPVYAGKLKYHQVRIENKKKIESKEYEIYDGIHEKIVSEETFNIANNMVKKTSTTRFTYPAVFRNLLYCNCGNKLYPSIGYGRRTYRCVHNCLRVVYEDEVLVDVIESMENILNQIDLDNIDSQKKELEERTVFYKKNLTSLKTQIENLTRKYISEQISEELYDKLNNELSEKVKFATSEIEKLNAKSLHVDSSVSNKKIILKYLEKIKKEEDKDKMNQFFSLIIDKIVFINGYRFIIYMKI

SEQ ID NO: 7600 - protein, 544 aa, synthetic construct
MITLTGNEKLKKSELDALVGLIKALVYVRVSTDGQVDNYSIESQIQRCINEAKEKFFINENEIIVLVEDGESGDNPNRPMINYILFLFSKGIGNKVIFLHPDRLSRYLNLQQQISHEIWGMGCDLHFVEFDLNKDNAESMLNFNIQGSIAQYNKAKILANTKRGRKTMVNNGKIPGLNRIYGYTFDKDLDILVTNDVEKEVYLTMVKMILNKSSCSEIARTLSKKSIEAPKGSKWYQATISRILRNPTYKGIYYHGKTEIVQKNGKKTKIDKAPDEWVGIPIPQYIDEATFLRVQKYLDDNVKGNKNSGRPSEDYLLKGLARCGRCGSSVSSGITSKTKKRLLKYYSCTQKTKKSFEVGTGESNPLCRGRNWRVDNVDNIIWNRIPEILKTPETIIRHIVSNSTNSGKLDEIRHQKTVLEKEKIEKKSAVERYLDLYATGYIKTKQALDEKIGELNNQIDDIEKDIIIIIDTLKYTDVEVDQIQLFESIFEKYKYVIESNLISTNDKKLLVNFFFEKVIFHEDELEIVLRVSDYEHLKGSRKTK

SEQ ID NO: 7601 - protein, 511 aa, synthetic construct
MGNDKIKCGIYARVSTDKQGDSIENQVSQAREYIKRMGDEYDSEDILIYKDEAVSGYYTSVFDRAEMKIAIDDAKNKRIQLLVFKEVSRVGRDKQENPAIIGMFEQYGVRIVAINDNYDSLNKDNITFDILSVLSEQESKKISVRVSSARKQKAARGQWNGEPPFGYYINPETKRLEIDEERGKVPPLVFDLYVNKGLGTFKVAEYLNQRDLLTKNDNLWSRETINRMIKNQAYIGQVAYGTRRNVLKREYDERGAMSKKKVQIKIDRKEWQIVENAHPSLIDKELFYKAQKIISSRSHERGVKRAYHPLTGLLICGQCGAGMVCQKRTHKEKSYRYYICKTYHKYGRDTCSQANVNADELEKVVIEDVKSKFTNLPNESLLLSANREDDIDNLRKELKSINIRKEKLMKDQMDIFSQRDLFPEDLYRTQMIEIKNKIGDSDSETSIIENQICGIEEKLSEATSLQYIIEEFNKLDIEDVNHLRTLLREVISKITLTVEDLHIDYIFDFNS

SEQ ID NO: 7602 - protein, 506 aa, synthetic construct
MRSVITYLRFSSAIQGAEGADSTRRQNDLFKQWLKKNSDAQVVASFSDEGLSGYKGKHLTGQFGDMLARIESGEFPEGTLLLVEAIDRIGRLEHLETEALMNRIIAHGIEIHTLQDGLIYTRDALSDDLGISIIQRVKSYVAHQESKQKSFRVSQKWKQRAKLALAGEQRLTKMVPGWIDPDTFKCNEHAETVRLIFKLLLDGESLHNIARHLQANNISSFSRRKDANGFSVHSVRTILRSETTIGTLPASQRNDRPAIPNYYEAAIDVSTFNKAQEILDKNRKGRTPASDNPLTINIFKGLFRCQCGASVHPTGTKNKYAGVYRCNNNPDGRCDVPPLKRKPFDKWMIDNFLGMIDVGNDGEAEGKIASLQHEVEIVTARIKKATALLLEMDDIDELKIQIKELNQRRTELQTTIDNMRRKASLTDKELPQLKDIDLTTKAGRVECQLILSKHLKGLTLGKDSVTVTLQNDTEITIPTNPLPLNDGTSIFEIADKELLDIDAYQL

SEQ ID NO: 7603 - protein, 559 aa, synthetic construct
MKTKLYSYIRFSSMRQNDGSSYERQIRMAREVAAKYDLELVNDYQDLGVSAFKGANSKTGALSRFLDAIGRSVPVGSWLFIENLDRLSRADIVSAQELFLSIIRRGITIVTGMDNKIYSLDTVTANPMDLMFSILLFIRGNEESQTKRNRTNSSALIKIKSHQENPQNPAVAIEEVGKNMWWTDTTSGYVLPHPVYFPVVQEIVELRKNGRSTAEILDHLNETYAPPPAVSNKKHSKWSRAMVERLFHTRALIGIKEVSVDGVNYELKDYYPRVIDDATFYHLKKNIGARAWNFGDKEEVKPIPLLSGIGLLKCDHCGCAMVKVKGTNKRSDQYRYTCDATRSRRLDCEHPNWSFRGDQLEKAVLQLLADKIWIAEDKANPVPALKVQVDEISRKIDNLIALSAMTGATKELADQITTLNSERETLYNQIKMAEEEMYSVDSQGWEKLAEFDLEDVYNEERLKVRFKIKQALKRIGCSRIDRNKNLFVLEYIDGKTQRVVIENSRGTRKGQIFVDLKTINDRQILESNGLVLHPCLDMLTDKNWKPEEETPGPLQEFGI

SEQ ID NO: 7604 - protein, 542 aa, synthetic construct
MKQLKKKHIGLYARVSTETQKNGYSIQGQLNQLTEYCQFQGYEVVDEYTDRGISGKTMERPELQRMLKDANDGKLDCIMVYKTNRLARNTSDLLNIVEKLYKINVEFFSLTEKIEIASSTGKLMLQILASFAEFERNTIIENVYNGQRQRAIEGYYQGNLPLGYDKVPDSKKELMINQHEANIVKYIFESYAKGHGYRKIANALNHKGYVTKKAKPFSISSITYIISNPFYIGKIQFAKYRHWSDKKRKGLNEEPIIADGKHAPIIDKALRDKVQFKRQESRKKPQVHGKGTNLLTGIVKCPKCGAAMAASNTTNTLKDGTKKRIRYYSCSNFRNKGSKVCSANSVRADVLEKYVMDQILEIIKSKKVLKQLVEKVNERSQIDVSSLNHDIAYKQSQCEEIKAKMHTLTKTIEDSPDLDSVLKPTILSYQDELNQINNQIHQLEQDKQAESPHYDADMIANVLQAIFKDIDKLEKSQLKSLYLTIIDRIDIRKDEHHKKQFYVTLKLNNEIIKQLFNNHPLDEVLLSTSSLFLSQTLYLIIY

SEQ ID NO: 7605 - protein, 551 aa, synthetic construct
MTTRTTRRATSQQTLAVIYCRISSKKQDREGDGLASQETRLREYAARCGYQIVEVFRDKLTGSESQRPGLRDMIAFVAGDKKNRYRILIDHLDRFTRDFYLHADLRRAIANTGALLETPAGVLDGRSSSRLMENVTVAFADYHRVNNAEQTVNRMKSRLQNGFAVFCAPSGYRFGRVSGLNGRVLVRDEPAASIVVEALEGYASGRFESQADVVRFLEEHPSYPKPKNGKVPHQRVGDMLRNPIYAGYVEAPKWDIPRRKGHHEALISLDTHQRIQDRLNGLRSTYRTDLSVDFPLRGFVICDDCDGPLTACWSTSGSSQRKRHPYYQCPRKACASYGKAIRRDLIEGEFEAILKNAQPRPQLFEAATAMMKELWARKQKNRAAEARALEAGLAQIDKQVDQLVDRIVETSVPAVVRALEEKLQRLENEKLLLNEKIASGAAPQGSFDLRLRTALAFVASPWSLWSTGRIEDRRAVLKLTFADQLRYKRGEGFRTANLTLPFKVIADVFSGEMGMARPKGFEPLTPRFVVWCSIQLSYGRLTRRRALGPPV

SEQ ID NO: 7606 - protein, 701 aa, synthetic construct
MDDFQSLFKDMSSRPKRKGNVINKAEKKKDKYGILVRVSTDMQVEDGDSIQMQKELAGDIVTKNEGVIHDWYIEEGISASKNRIAQRPELQRLLDDIESGIVTKLVAYKRDRLTRNTGDWLQILEICAKNQCDIIFSASGEAQLFNDPVYGKVFETILGSISEMESANTSMRVRDTMSSLAKSGEWTGGTLPYGYVKNEFDQIEIEEDKVAIVDEIVDLYLSGLGLYSIVKWLNGELVKTLGRREGGAVKKEAAHKARVTHWTKSSVESVLFNPFYAGVIEYSKEGHKAYQKDETKFVRAQGKHPAMRTLEKQREIYKMREKKSLRPARSYNTTFLFSDLIVCGYCGEKYQTRNTTKNGNQYSYYCCSSRHNSSKTGVGHHCLNKNYKKSILEDFLIGHLKDYLKQLSFASMSDYLSENMNKQKSGVKKSIEAIDDDLKKLAQDEEKILRLLMDLDLSSPLYETFKEKYETEYARVLSEVAEKKKAKYEMESSLTEKEDNELSTKRAMEVMKDFTKAIDTASMQKKRMLIDKIINKIVLHADGTCDIELFAPIAAVENPQNNNGGASNNGEDNGNGENLDNSGNPVIINDSFGDPNASIPTPQPVLYRPMFASYGKARAKTSLTFVSKAAYEKRVGEKLGLQKLLKPVKDIRQLKKTDMKLNGEMPKIEVDPQTYEVKVDGQMITCEAAEVVPMAQRYFLF

SEQ ID NO: 7607 - protein, 507 aa, synthetic construct
MKRAISYIRFSSEKQSRGDSLRRQAKMVTDWLKAHPEYYLDESLTFRDLGVSGFTGKHLKGGLGDFLTAIEKGLVKAGDTLLIESLDRLSRQDVDQASELLRNILRSGVDVVTLSDGEHYTSESLKDPLALIKSILIMQRAHEESLRKSERIQAAWDAKKEAAKAGIKVSKRCPAWLKLNDDRKSFSVIPEKVETVKRCFQLRLEGKSIWEIVRTLNAEGHQTLNQYKAGKFGQTSVQDLLKNRSVIGYFTPKGCEEISGYYPAIIDETTFYKVQQLSHSRYGKRSVSDKPLSVNLFKGVIRCSECGHALIITGFSDTRNGIYRCPLRNENRCSAKGLSRKQTDGTLLTLLSRLDRFDSDTTNTIDTLKLHREHISSNIEKLVQLSLEIEDLNAITNKLKQLKNELSQVDADIEKETQRLKSIDVGCLSDCDLTTKAGRIEAQLIIKSAVKEVVLNTAKRRCKVTFHNGKVIDLSITENPSEDVTEAIQSLSEVTERGLIDVDEVII

SEQ ID NO: 7608 - protein, 507 aa, synthetic construct
MKRVISYIRFSSERQAKGDSLRRQSKMVNDWLKAHPEYYLDQDLSFRDLGVSGFTGKHLKGGLGDFLTAIEKGLVKAGDTLLIESLDRLSRQDIDIASELLRRILRAGVDIVTLSDGEHYTRESLKDPLALIKSILIMQRAHEESLRKAERIQAAWDAKKEAAKAGIKISKRCPAWLKLNDDRKTFSVIPEKVETVRRCFQLRLEGKSIWEIVRTLNDEGHQTLNQYKAGKFGQTSVQDLLKNRSVIGYFTPKGCEEIAGYFPPIIPETDFYKVQQLSYSRYGRKPASDKPLSVNLFKGVIRCSECGHALIITGFSDTRNGIYRCPLRNENRCSAKGLSRKQTDGTLLALLSRIDRFDSDMTNTIDTLKLHREHISSNIEKLVQLSLEIEDLSAITSKLKQLKGELSQVNADIEKETQRLKSIDVGCLSDCDLTTKAGRIEAQLIIKSAVKEVILNTAKRRCKVTFHNGKVIDLPITEDPSENVTEAIQSLSEVTERGLIDVDEVII

SEQ ID NO: 7609 - protein, 547 aa, synthetic construct
MKLLVTYIRWSTKEQDSGDSLRRQTNLIDAFYAKHKDDYYLLPAHRYVDKGKSGFHQQHKNQGSDFRRMFENVMSGAIPEGSLIVVENFDRFSRADIDTAIDDVRQILRKGVSILTLGDGELYDKSALTDPVKLIKHIIIAERAHQESLVKQKRIAQVWNHKTQLARELKKPMGKQAPGWLELSDDGSHYIVDEDKASLVNIIYDKRLSGMSMFAICKWLNEQGYPTINQRKVRISKTKKPDGNWSALSVKHILTSRSVLGYLPAKISTEDRKTVLREEIESFYPQIVTDSKFYAVQQLLEETGKGKTSSGDHWLYVNILKGLIRCKCGLVMTPTGIRKPVYQGTYRCNGNKESRCSYGTVSRKLLDTQLCSRLFSKLSQLHDEATDTAKLDELQRRLNTVDSELEKLTETLIQLPNITQIQEALRVKQEEKDELIVQLSREKARVKSVSSLDLSGLDMESVEGRTEAQIIIKRLVKEIVVSGNKKLVDIYLHNGNMIRGFPLDGKDDHTLTLEEATDEMQPLDDMLIFGEPVTRIYPAGDMEEVDA

SEQ ID NO: 7610 - protein, 545 aa, synthetic construct
MKVVAYARYSSDNQREESIDAQIRAIKKYCKENKYILLNIYIDEARTGTNQNRPQFQQMLKSAKNKEFEAVVVHKFDRFSRNKMDAVRIKYELKQQGVKVLSILEPLNGTPEDVIIESLYEGMAEYYSLNLAREVRKGMIENAEKGLTTGGTAPLGLDIVDKKYVINEYEAGAVRLIFDMYASGNTYLTIINTLNKKGYVTKKGKDFGKNSLYEILRNEKYIGNYIYNTNLNKRKGKTNHHAKVKEEDIIRKNGIIPAIIDNDTWNIVQKKMEEKKKMGRRSTGKSIEPYILSGILICGACGSVMHGNRRNNGKGKENIYSSYVCSNRNCKAKSIKKETIEKAVISQLKGYFTEDTKKELHKMLEEKLIESQKNYVDKTNIYKKELRETEQKIDNIVEAIANGLYNPKMKKKMEQLENKKSELNSLIENNYIYTAPTYEQFKEYLEMVLNFANKDDLNAYKNIIDYFVENVILTEDDIIVNVKIQNIGVGTNGAPKRTRTSDSQFRKLQLYPTELWMHIIDINIIKIYPLQYHKIKIITINFKKY

SEQ ID NO: 7611 - protein, 559 aa, synthetic construct
MKTKLYSYIRFSSMRQNDGSSYERQIRMAREVAAKYDLELVNDYQDLGVSAFKGANSKTGALSRFLDAIGRSVPVGSWLFIENLDRLSRADIVSAQELFLSIIRRGITIVTGMDNKIYSLDTVTANPMDLMFSILLFIRGNEESQTKRNRTNSSALIKIKAHQENPQNPAVAIEEVGKNMWWTDTTSGYVLPHPTYFPVVQEIVELRKNGRSTAEILDHLNETYAPPPAVSNKKHSKWSRAMVERLFHTRALIGIKEISVDGVNYELKDYYPRVIDDPTFYHLKKNIGARAWNFGDKEEVKPIPLLSGIGLLKCDHCGCAMVKVKGTNKRSDQYRYTCDATRSRRLDCEHPNWSFRGDQLEKAVLQLLADKIWIAEDKANPVPALKVQVDEISRKIDNLIALSAMTGATKELADQITTLNSERETLYNQIKMAEEEMYSVDSQGWEKLAEFDLEDVYNEERLKVRFKIKQALKRIGCSRIDRNKNLFVLEYIDGKTQRVVIENSRGTRKGQIFVDLKTINDRQILESNGLVLHPCLDMLTDKNWKPEEETPGPLQEFGI

SEQ ID NO: 7612 - protein, 547 aa, synthetic construct
MKLLATYIRWSTKEQDSGDSLRRQTNLIDAFYAKHKDDYYLLPAHRYVDKGKSGFHQQHKAQGSDFRRMFENVMSGAIPEGSLIVVENFDRFSRADIDTAIDDVRQILRKGVSILTLGDGELYDKSALTDPVKLIKHIIIAERAHQESLVKQKRIAQVWNHKTQLARELKKPMGKQAPGWLELSEDGSHYIVDEDKASLVNIIYDKRLSGMSMFAICKWLNEQGYPTINQRKVRISKTKKPDGNWSALSVKHILTSRSVLGYLPAKISTEDRKTVLREEIESFYPQIVTDSKFYAVQQLLEETGKGKTSSGEHWLYVNILKGLIRCKCGLVMTPTGIRKPVYQGTYRCNGNKESRCSYGTVSRKLLDTQLCSRLFSKLSQLHDEATDTAKLDELQRRLNTVDSELEKLTETLIQLPNITQIQEALRVKQEEKDELIVQLSREKARVKSVSSLDLSGLDMESVEGRTEAQIIIKRLVKEIVVSGNEKLVDIYLHNGNMIRGFPLDGKDDHTLTLEEATDEMQSLDDMLIFGEPVTRIYPAGDMEEVDA

SEQ ID NO: 7613 - protein, 578 aa, synthetic construct
MECVAYLRVSSYSQKEKGDSIDGQRNSITEWIENRGDNIIKWYIDGGASAYKGRRNNFELMLHELESDIIKADGLIVYSLSRFSRNLLAQLEATKVLQKKGIHLVSATEALPKSYEDSYVMLSILGLMNEHYSMQNGKVVRDRLKDTAMKGYFTGGPIPFGYHSVTVSGVTSKCRRKLQILEEEAEIVIEIFNLPEKGINGKPLGVKSIAEMLNKRKCYRRGTKWNRNSVCRVLKNRSYIGEFIYNSRDSEPIVVNIPNIITKDQFYNVQAGLKSRDIFSFESRRIRSKCLLTGLLKCGVCGASMVVTSGKSGKYSYYQCSKQVRHAPDSCTSKRIRRDKAELLVKDKFMNELLSEAHLKTIHCQAKQRLKETSKLLSADKTKLSKRISNLETRYSRLITMVADGDLVPDVRINKTITDLSTQLDVLEAEMAKLAVRINLPVKNFGEARLVEVAAAVQKHLQQIDNEALKQLMLATVTSVKVVEATKKLIFEGSNMAVLYLTANAKTGTNFSVPAFITKWRRDRDLNPRYAINVCRFSRPVLSTTQPSLRCGTYNREHSPNCKVLNYNRSTVCSFYSR

SEQ ID NO: 7614 - protein, 518 aa, synthetic construct
MRIADLYIRVSTDEQADKGYSQRNQEETLRKYCEINSLQVRKVIFEDHSAKTFIRPEWNKYLADLRKNKGKSDVVLFTKWDRFSRNAGDAYQMISTLRRLGIEPQAVEQPLDLSIPENKMMLAFYLAAPEVENDRRALNVFFGMRRAKKEGRWMATAPIGYINKSTDNGRKYIAPKEPEASIIKWAFEEIANSQFAADQIRKEANNRGLKCSRANFWNAIRNPVYCGKIFIPKYKDEEPLLVQGQHEPIISEALFYEVQDVLEGRKRKIRQGTKIITHDALALRGFLICPHCGRILTGSASKGRHNHYYYYHCVSSCGCRFKAEHANGLFVQELKKYVPYPGMNDIYVATIGEAYNDKTKHLKSDRTQILSQLDNLNTRLKNAREMVADQKLDHDDFRELKAECTTKINELEAKLAGLSQKENNIDGLLNMAVSNLSALDILYEEGTITEKRQIIGSMYPEKLTFDGFSYRTARVNEAAELIFSLDAGFNQIKNRKNNDISCLSGWVVPTGIEPVSKV

SEQ ID NO: 7615 - protein, 545 aa, synthetic construct
MNKYHLYQRVSKQIQAEEGQGIQRQEQACEHWISDYNKRLLSEGKSAYSKGLIYEDRGKSAYTAANFKRGELGALINDIENGKIEKGDLIVIELIDRFSRANVDFVRSQFQRIIDAGVKIAITKWNLVFEENMESVSSVTGRILLEIGMYLAYQESSQKSSRIKASRKLLEDSGRKSIAKPPFWLARNSDLKSYTIIEENAEIIRKIFDLKLNFNYGPQKIIKSLGDLDIYRYSFDENGNLIKTTKNSPLSESSINAYIRNTNVIGKLDGKDYYPRIIDDRTFYAVQKRTRENTGGVGEIFRNVFVGVGKCGCLIRKENENGCGSLAKCGYIMAFSSRKVKNPTKGMYLKCNRKRKSTKCDSVNINYYLAQNKIYNVLKSLKFDIDQSVDISHLEEKINTIDKSMSKIREYMTQYSDDEEWENQYKIKRMEREKIENEIKASKSRITGKLSNLDIDFSKEKDRVLFNQFLKDNRITVYFTKERMEIIIGSLNNFSIKCGYDDSNRDIDHIIESYSKNGLVGIEEKSGKSEGKGLLRFNLPTVPGS

SEQ ID NO: 7616 - protein, 429 aa, synthetic construct
MRVRIIEPTLKTEKVKKKVCAYARVSTDSQKQDESLENQIQYYENLILNNPDYEFIGVFADRGITGTTEDRPEFQSMMNFCRQGKIDLIITKSISRFARNTAIVLETVRELKLLNIEVRFEKENINTLSGDGELMLTVLSSFVQEESKNVSDNIKWRMRKKFQQGEMIINTKRFLGYDKDEYGDLVINPKEAEVVKRIFNEYLSGKGCFTIAKGLREEGVPTVAGGTWRDSTILRILKNEKYKGDALLQKYYTSDHLRKKKVRNNGEVDSYYIEDNHVPIVSRETWEAVQEEIKNRAKDKGIVSGDTKKYKRRYPLTGMLYCSKCSSTLRRRTWNSKLNCKKIVWQCSNYIKNGKNACRGTSIDDETISKLNIKEETVVKEEIRNGKKYYSYTSKRTQNQHSANNRVAQKENGSVLQGINRPSRTVIKL

SEQ ID NO: 7617 - protein, 443 aa, synthetic construct
MAAYCRVSTDQAEQLSSYEAQVNYYTNFINNSPEYEMVKVYADEGISGTNTKKREQFNEMIKDCKLGKIDIIITKSISRFARNTLDCLNYVRMLKELGIGVIFEKENINTLDGKGEVLISILASLAQDESRSISENSTWGIRRRFEQGKLHINHKKFLGYDKDEEGNLIINEKQAKIVRRIYKDYLDGKGTNRIAKELEEKGIKGWNGKAKWYESTIRGILTNEKYKGDALLQKTYTVDFLTKKRAENNGEVPQYYVEESHPAIIDKEMHAAVQLEMERRKTFAKEHGIVKVDYATVTNPFAGKAICGHCGSVFGRKVWNSTNEIRRRIVWRCNKRYIEKGKKGCNNKHIDDKVLYQAFIDTFNAMIENKDYFMEKWKEHLKSENVLVRYKAKQFVGILKNAKPIKQFDEDLFFRIVEKMTVFDGEKIIVSLLDGTEIEVIIE

SEQ ID NO: 7618 - protein, 551 aa, synthetic construct
MLRAAIYARFSTDLQSERSTDDQITLCRTYADREGYQVVAAYEDKAKSGASIFGRDGLQQLLADAANQKFDVIIVEAIDRLARDMEDLAGMHKRMSFLGIKILAVHEGEANTVLVGLRGLVSQLFREDNAHKVRRGLSGRVKQGLSAGGKAYGYRPDPLKKGELIIDHDEASIVQRIFREYANGKSPRAIARDLNRDKIAPPRGRTWSASTLNGSASRHNGLLRNPIYGGTLIWNRVRMVKDPNTGKRVSRINPKDQWEVVEKPELRIVDEMMFAKVQARKEETAHEPHFYKQRRPKHLFSGLLKCGCCGSGMVTTGTDKSGRKRIRCSGFSQRGICDKPRTYYLNVVEDLILDTLRNELQHPEVISAYVQEYHAERKRLELQRTKSRAQLEQRLAAVEAEAKRILDIVVKTDTPPDFALSRLQELSAEKKQINADIAETPEAEKIVSLHPTALAFYEKQLQRLGRYIGDTIAEGDLEAAQVIRDIVSKIVIIHGENEGRGRFEKSDFTVEIHGDLTRLLGPETEEVVVIGISGSGGGIRTPDTRIMIPLL

SEQ ID NO: 7619 - protein, 521 aa, synthetic construct
MEGNYCAYLRKSRKDLEAEARGEGETLARHEHILLDLAHRLNISLEAIYKEVVSGETISARPVVQQVLREVEEGVWTGVLVVEIERLARGDTRDQGYVAEAFTYSNTKIITPLKIYDPSDPADQEYFEFNLFMSRREYKTINRRLETGRHQSFLEGKFLGNVAPYGWERYKLERQKGFSLRPHPQEGKYLVMMYNLIAYGSDGTPLGPDQVASLLNDMGVPSRTGSGWTGITIRGIIENEHNIGLVRRGYRKTVKKMQNGHIVKLRPHQKSYELAEGLHDGQVSEEVFRLANENIHSPAPPVNRDYTVKNPLAGLVICSCCGHAMRRRPTHVKAAYDFLYCPYGCKTIGAPLYLVENAVLDMLKGWTEKYQLQRTSHDDRGSRDLIQAKQLILSEKEDDLAKLKKQRGSLYDLLEQGVYSTEVFLTRQKDLSEREKTLMEELSRLQDEIEYERKLESERVNFIPKCKKLIDNYEFLSVQEKNRFLKELIDRIVYTKTERNQRGKGGTANFTLEIYPRVPRS

SEQ ID NO: 7620 - protein, 530 aa, synthetic construct
MIGGIYARSSLGKIKQGDTVKHQVQMIQEYAKRMEFNVSFDEKFIYPDDGESGFKTTLLQRPPMKQLLEDIDSGLIDIVFFKGISRFARDSGEAIQTSKRLIQKGVRVISIEENYDSDVSDPTFFQMYAVLAEAESRKTSIRVSLGNKQKSRNGLWAGSVPPFGYIKVKDITDKAKKEELISKGVHPQTLFPHPEKADIIKKIFDMYVNQGFGRKKIVNWVNSQGIKTQYGNKIGDITIKRILMNPAYIGVIVYGKTRYNYIDSDDGLRKIQKVINVDKEDWAICEDAHPPIIEREVFMKAQRLIKQKEKAFNKGRRFNNAKHPLTGLLKCSLCGAPMICQKRTNKKADGTKVTYRYYVCSTYHQKGRDVCPQANINADELEDYIHKQISQQIEKVKNDEYFLEGYATYNPNEEINSQIKVIDREIEKNTNKSLTLLENKDLYDDQTFRDLNLKLKEEIVRLRKQKDELMDELKFAEEIMTKDDLKAKFDEFLELNLSDISRTREVFHEWINEVRVEDKKVIIDQKFKMI

SEQ ID NO: 7621 - protein, 416 aa, synthetic construct
MAQVSVVTPVRPPAPKLVNVAAYARVSTNGTEQLASLSAQVSYYSRLIQSTPGWAYVGVFTDEGITGRSTKSRQGLADLMDAARGGGVDIVLCKSISRLARNTVDLLATVRELKDLGVAVRFERERIDTLSADGELLLTLLASFAQEESRSLSHNVKWAIRNRYKDGGTNSFVAYGYHWADGQFTIIEEEAKIVRLLFANYLDGISPEKTATMLNAEGKRSRGGGRFYGSVFRRMLENERYKGCQMLQKMYRPTIQAPTCALNDGELPRYWVEQALPAIIDEVMFDAVQAEIAHRREVGPAATPSKNTGVFTGRICCGACGKNYQRKTRTYKSGTSYKFWRCWSACTGNGNPCRGHNLRETLLEHACADMLGTQGFDPVHVAEQVVMIEAFEHQLTFHLADGTMTPVGLTSEGRLA

SEQ ID NO: 7622 - protein, 525 aa, synthetic construct
MSRTVTAIPATKKLRSAAASSGVPAHRRVAAYARVSTEMEEQTSSYEAQIDYYTTYIHSRNDWQFAGMYCDEGISGTSMKRREGFQTMIDDALAGKIDLILTKSVSRFARNTVDSLTTVRKLKDAGVEVYFQKENIYTFDAKGELLITIMSSLAQEESRSISENVTWGHRKRFQDGKVMVPYKSLLGYKKGADGSLVIDETQAPTVRLIYQLFLDGMAISEIKTELAARKILTPRGKEVWSTSTVRSILSNEKYKGDALLQKTFTTDFLTKKMKVNEGEVPQYYVTGNHEPIIAPRIWDQVQYELATRHGNISSAKVGLFSTRLKCARCGVWYGRKTWASNTKYKYTVWQCNHKYTDEHPCSSATVKDEQIKDSFVQALNQLIARRPQQSQLPQVLGDMFGTSRLEEQAAACQTKIVELTEQIEALIAENQRCALNQDAYQARYTELDTIYRKTLARKTSLEADIVANTAKHAAITTTLNDLTGEPVSEFHPAQWSALIDHAIVTEDTIRFVFRTGEQVSMALKE

SEQ ID NO: 7623 - protein, 496 aa, synthetic construct
MYGYNLKPCLTRRNTLKRMEQITPPPISASPLVKVAAYARISMETERTPLSLSTQVSYYQQLIHDTPGWTFAGVFADSGISGTTTHRPQFQEMLALARKGAIDLILTKSISRFARNTVDLLETVRELKDLGVEVRFEKENISSTSADGELMLTLLASFAQAESEQISQNVKWRIWKGFEEGKANGFHLYGYTDSADGTDVQIIEEEAAVVRWIFAQYMKKTSCEKMAAQLIADGRVPHLADNKLPGEWVRHILKNPHYTGDLLLGRWSTPEGRPGRAVRNTGQLPQYLVENAIPAIIDRDTFTAVQTEITRRRELGARANWSIETVALTSKIKCVSCNCSFVRNVRNPKTQNSISTEHWICTERKKGRKTGCDTCEISDTALKGFIAQVLDIETFDQEVFNERIDHIDVQGKDHYTFHYTDGTSSSHTWRPNLKKSSWTPARKAAWGELVRARWAEAKRLGLDNPRQAPTPPEALAKYRAVAKAEAERLRAERGER

SEQ ID NO: 7624 - protein, 585 aa, synthetic construct
MLTGVIYARVSTEEQASEGYSIEAQKQLLRDYAKHRNIQIIDEYIDEGRSGKSIEGRPQMLRLLRDAKDTKFDAVITYKLDRLARKTRDSLEIIETLERHNVQLMSYSESIDTSTPGGKMFYTVLSSISEMERSTIIDRVKMGMNQRAKQGKWNGGIVFGYNVIDKELVVNEDEAAVVQDIFNLADKGYGFKKIAYDLNKRGIKTKKNKEFSTISVKTILNNPMYIGKIRFNQHENWSERRRKGKNPDPVLVDGTHTPIIEASQWNQVQEKLQKRSRRPAQSAKPYFLGRLLRCPSCGYGMVAAKSKGENGKVYRMYQCGQYKNKGRTVCQAHSINADKAEKYVLDELNRVVTLPYFIERLVEKMNQERSDAEHPLQEELNRLVSSKQKTEKQLDNLVSLLMDDPELRDIYKKKMKEQKDFLLNIEERIEHVKKQLLNVSKDPVDADALKQLLKNLDSILERADAAEKKELLALFVENIQITKERVSFKEGRQITQINLMFDFTIEALQGSASVLLNSMDHINCIAPIDHSIISQISKEDMYREALASLNLLPLFMIRFSPINPKSPVNLLHQNQAHQLMRKRHF

SEQ ID NO: 7625 - protein, 561 aa, synthetic construct
MKKPKAFSYVRFSTPKQAQGDSYRRQIQQAQDYCAANDLELEDKTIEDFGVSAFRGSNRTDGALGRFIDAVKCGEIERGSYLLVESVDRLSRQAIEDALTQFLEIVREGIVIVTLSDNQVFRSGEVDFTKLIVSIVYMARANDESEMKSRRSRAAWSNGRQQARDNNKVIANSRLPSWLKLEGDKIVPIPERVAIVNEMFQMARSGQGYQQIAKVFTENDYKTFGQGKVWRPAGIQSVIKSRTVIGEFQPHVIVEGKRVPEGEPILDYYPAIVPPSIFAEVLHIVDKRSNHSGSYRKGLYNNLFSGVIRCQCGELLRFHNKGSRGQVRNYLVCPMEGVTGCQLPYLLYNKIEPQLLQAISKLSVVMKQRIPQTEKTSLLKDGLAVLRGQLEIETRKSKKAAQAMLELDDDAVFRSLYEECKANCQSLEEKILQIENEIVGLELSTRTLFQLLSPEDLSNTEQRQRFNSQLKLAVKIEFIYEHSGLVAVIKNLEDELLLEQAFGHKLMNSIVHDFEGHVVVKTISDSPYIDPSWAYEEREEYTKGISVEFDQCGDFNIDNFK

SEQ ID NO: 7626 - protein, 507 aa, synthetic construct
MKRVISYIRFSSEKQSRGDSLRRQSKMVNDWLKAHPEYYLDQDLSFRDLGVSGFTGKHLKGGLGDFLTAIEKGLVKAGDTLLIESLDRLSRQDIDIASELLRNILRSGVDVVTLSDGEHYTRESLKDPLALIKSILIMQRAHEESLRKAERIQAAWDAKKEAAKAGIKVSKRCPAWLRLNDDRKSFSVIPEKVETVKRCFQLRLEGKSIWEIVRTLNDEGRQTLNQHKAGSFGQSSVQDLLKNRSVIGYFTPKGCEEIAGYYPAIIDETTFYKVQQLSYARYGRKPVSAKPLSVNLFKGVIRCSECGHALIITGFSDTRNGIYRCPLRNENRCSAKGLSRKQTDGTLLALLSRLDRFDSDTTNIIDTLKLHREHISSNIEKLVQLSLEIEDLSAITSKLKQLKGELSQVDADIEKETQRLKSIDVGCLSDCDLTTKAGRIEAQLIIKSAVKEVVLNTAKRRCKVTFHNGKSITLPITENPSEDVTEAIQSLSEVTERGLIDVDEVII

SEQ ID NO: 7627 - protein, 734 aa, synthetic construct
MTLDQLSGLDISGLRRLARTTPRPDATAPTGDGKVAAISYLRVSTKDQATRNGLEEGLSIPAQREAAQRKAKQLGAVIIKEFIEPGESAKTAQRRALQEMLDYATTHPVRYCIINKVDRLARNRLDDAKIHAALRDANISLVSVTENIDETPSGMLMHGILASMAEFYSLNLAQEVLKGMTQKAAIGGTPTKAPLGYLNVRTTDARGRESREIEIDPERADLVRFAFTAYATGDWSLSRLAKELTARGLTTRPTPSQPAKPVTTTGLHKILTNPYYQGTVTFRGVTYDGTHQPLVDAKTWLRVQTNLDANNARGERPQKYDHYLKGTLYCACGAKLMLERPRDKTGDRYEYFTCSGRRRKTTNCTRSAILAERAEAEIERTYQRNSLTQTQAEHVRKVLNDVFDQLEGSSEDERKLLTAQRDKLEAERLKLVQAHYADAIPLDLLKSEQDRIRASLDQITTRLDNLTDTYADARTGLEQLTELLVDLDDLYNRCVPAERRILNRALFTRITIDDEENATYTPDETTASVLAHTTIDAPAHVTAETKLPRHQAGQVSIFSSYVDLRGLEPLTPCMPCRCATSCATGPCRSNLTNISRPLQLCKSSHQAGFFRGHTSNPIRIITSTRNTANATFAANGLSVEAISDPTGVSSPAATPIYAAARKSTFFFRTFAIVPDSPVAIIINSDDPFAIRSLAPNTSTSSGTTTTPPPMPNRPEATPATKPITSSSAPSATLT

SEQ ID NO: 7628 - protein, 559 aa, synthetic construct
MKTKLYSYIRFSSMRQNDGSSYERQIRMAREVAAKYDLELVNDYQDLGVSAFKGANSKTGALSRFLDAIGRSVPVGSWLFIENLDRLSRADIVSAQELFLSIIRRGITIVTGMDNKIYSLDTVTANPMDLMFSILLFIRGNEESQTKRNRTNSSALIKIKSHQENPQNPAVAIEEVGKNMWWTDTTSGYVLPHPTYFPVVQEIVELRKNGRSTAEILDHLNETYTPPPAVSNKKHSKWSRAMVERLFHTRALIGIKEVSVDGVKYELNNYYPRVIDDATFYHLKKNIGARAWNFGDKEEVKPIPLLSGIGLLKCDHCGCAMVKVKGTNKRSDQYRYTCDATRSRRLDCEHPNWSFRGDQLEKAVLQLLADKIWIAEDKANPVPALKVQIDEISRKIDNLINLSAMTGATKELADQITALNNERESLYNQIKMAEEEMYSVDSQGWEKLAEFDLSDVYNEDRIKVRFKIKQALKRIGCRRIDRNKNLFVLEYVDGKTQRVVIENSRGTRKGRIFVDLKTINDRQILESNGLVLHPCLDMLTDKNWKPEEEQAGPLQEFGI

SEQ ID NO: 7629 - protein, 519 aa, synthetic construct
MPKAISYIRFSTKIQSVGDSTKRQSKYINDWLKRNPDYYLDESLRFQDLGISGFSGANAKSGAFGEFLAAVESGYIEAGSVLLVESLDRVSRQDIDTAGEQLRKILRSGVEVVTLVDNEWYTKESLKDSLSMIKAMLVMERAHEESAMKSTRLRSMWAGKRERAANGEIMSKRCAAWLKVSEDRSHFEFIHENVKAVQRVFQLRLEGLSHIKIAKKMNDEGFYTLNQHKSIKGGWSQSSVTELLSNRSVIGFKVPSKSMAVKGVSEIPNYYPSIITDEQFYAVQQLKQGSGRKPSSDLPLLTNLFKGVLRCSECGFIVVVAGVSAKRSGIYKCSMKSEGRCNSVGFSRLQTDRALVQGLLYNTNRLSLNRDNGSAIGALQSELEQLQKQRERLIKLAMLADDTESMAKDLKALNSQIKDAEKAVSEVHQREQSSQLEALSHLDLTVKKDRVEAQIIIRRIVKEIRLNTAGKKCDVFLHNGLKLYNFPLDKVVDGEIFLEVLPLLEADEFDFDTYRLISP

SEQ ID NO: 7630 - protein, 523 aa, synthetic construct
MRQVITYLRFSSKPQERGDSIRRQKGLFERWLKDNPDAKVVDEFSDEGASAYHGHHLKGDFGRMLQNIQDGKYLSGQTVLLVESETRLNRQKARNTESLVDLITGKGVDVICLESGKIYTSTNIDDLDTSIQLKIAAHIAHQQSKEKSIKVSAAWEHRAQLALEGKQQLTKNVPGWIDPDTRKLNEHSSTVVTIFDLLLSGESLHNIARYLQANNIKSFSRREKANGFSVHSVRTILRSESTVGTLAASKRNDRPAIPNYYEPAIDIATFNKAQEILSKNRVGRAPASDNPITINLFKGIIRCQCGASVHPTGVKATYQGVYRCNNVPDGRCNVATIKRKPFDKWMLDNIVGFLERSDGNNTDKRKAEIEYQISLVTSKLKKATTLLLELDDVTELKEQVKELNIQRSNMQSELDELNQRETLSDKPLHHLSEIDLTTKAGRVEAQLILSKFVQSIELQREMIIITLRNGTVIGKSRDLSPVLSQDLMKQVVSSSSPRDIDMFSVITSDEEFRKSGRPVTKRS

SEQ ID NO: 7631 - protein, 523 aa, synthetic construct
MRQVITYLRFSSKPQERGDSIRRQKGLFERWLKDNPDAKVVDEFSDEGASAYHGHHLKGDFGRMLQNIQDGKYLSGQTVLLVESETRLNRQKARNTENLVDLITGKGVDVICLESGKIYTSTNIDDLDTSIQLKIAAHIAHQQSKEKSIKVSAAWEHRAQLALEGKQQLTKNVPGWIDPDTRKLNEHSSTVVTIFDLLLSGESLHNIARYLQANNIKSFSRREKANGFSVHSVRTILRSESTVGTLAASKRNDRPAIPNYYEPAIDVATFNKAQEILSKNRVGRAPASDNPITINLFKGIIRCQCGASVHPTGVKATYQGVYRCNNVPDGRCNVPTIKRKPFDKWMLDNIIGFLERSDGNHTDKRKAEIEYQISLVTSKLKKATPLLLELDDVTELKEQVKELNIQRSNMQSELDELNQRETLSDKPLHHLSEIDLTTKAGRVEAQLILSKFVQSIELQREMIIITLRNGTVIGKSRDLSPVLSRDLMKQVVSSPSPTDIDMFSVITSDEEFRKSGKQVTKRS

SEQ ID NO: 7632 - protein, 564 aa, synthetic construct
MRSPKAYSYVRFSTPKQAQGDSYRRQLQQARDYCTTHNLVLDDKTIEDFGVSAFRGSNRTDGALGRFIDAVKSGEIEKGSYLLIESVDRLSRQAIEEALTQFLEIVREGIVIVTLSDNQVFRSGEVDFTKLIVSIVYMARANDESEMKSRRSRAAWSNGRQQARENNKVIANSRLPSWLTLEGDKIVPIPERVAIVNEMFQMARSGQGYQQIAKAFRDKDYKTFGQGKAWRPAGIQSVVKSRAVIGEFQPHIIYEGKRVPDGDPLFGYYPTVVSPAIFAEVQHIVDKRNNHSGSYRKGLYNNLFSGVIRCQCGELLRFHNKGSKGQVRNYLVCPMEGVTGCELPYLPYNRIEPQLLQALSRLSSVMEQRQPKTGRVSALKDDLAVLQNELEAEGKKRVKAAQLVLDFDDDAAFRVLFEESKNACHALEEKIVQIEGEIMALELSTRTIARFLSPEDLNSTEQRQQFNSQLKSAITIEFIHENAGLVAVIKNMEGQVMLEQAFGPKLMSSIVHDYEGHICVRTIAEAPYVDPVWVEEERVEYEKGKLVEFDECGDYSVDNLNKIS

SEQ ID NO: 7633 - protein, 547 aa, synthetic construct
MKLLVTYIRWSTKEQDSGDSLRRQTNLIDAFYAKHKDDYYLLPAHRYVDKGKSGFHQQHKAQGSDFRRMFENVMSGAIPEGSLIVVENFDRFSRADIDTAIDDVRQILRKGVSILTLGDGELYDKSALTDPVKLIKHIIIAERAHQESLVKQKRIAQVWNHKTQLARELKKPMGKQAPGWLELSEDGSHYIVDEDKASLVNIIYDKRLSGMSMFAICKWLNEQGYPTINQRKVRISKTKKPDGNWSALSVKHILTSRSVLGYLPAKISSEDRKTVLREEIEGFYPQIVTDSKFYAVQQLLEETGKGKTSSGEHWLYVNILKGLIRCKCGLVMTPTGIRKPVYQGTYRCNGNKESRCSYGTVSRKLLDTQLCSRLFSKLSQLHDEATDTARLDELQRRLNTVDSELEKLTETLIQLPNITQIQEALRVKQEEKDELIVQLSREKARVKSVSSLDLSGLDMESVEGRTEAQIIIKRLVKEIVVSGNEKLVDIYLHNGNMIRGFPLDGKDDHTLTLEEATDEMQSLDDMLIFGEPVTRIYPAGDMEEVDA

SEQ ID NO: 7634 - protein, 538 aa, synthetic construct
MAKQIATEYDLEIFEEYQDLGVSAYKGKNVQEGALSDFIDQVESGLIPKGSFLLIESLDRFSRQNAMQAVNLFTSLLLNGITVITGIDKQVYRQTEVNTETLQQLMFSVMLFSRANEESSTKSHRTIASALSKIRRHQERKPGDPVVAIKELGSDKWWTDSSTGYVNPHPVLFPIAKKIIQLKQDGWSNRMILQHLKNNYDGPVIGNKKSKGIWNMQHCSRILEPAIYGRKVITVNNAEYVLDDYYPAIISKDEYEALKLQVGNKGFAPNRESNPEIPLLSGIGILHCAHCSCYMVKAKSTLKNHPHAYRYQCASRDLHQDCNKWGFRASTLERTILQLIADRIFLQTKYQPSGLEGKIADIQSQIENYVLAIGSAKSPEIINSLTSQIDQLEQEKQSLIVEKRLYDESIVQMNTEGWDKFRKFDIDDALNPLRTKIRANIKTVIMRVDCSRIDKKHNLFTITYRDQHKQRIVIENNSGWKKGKIYVEAQTINDIQILESEGLILHDHIDILINRDKFMTEAKKRLDHPRTLIDELTE

SEQ ID NO: 7635 - protein, 523 aa, synthetic construct
MRQVITYLRFSSKPQERGDSIRRQKGLFERWLKDNPDAKVVDEFSDEGASAYHGHHLKGDFGRMLQNIQDGKYLSGQTVLLVESETRLNRQKARNTENLVDLITGKGVDVICLESGKIYTSTNIDDLDTSIQLKIAAHIAHQQSKEKSIKVSAAWEHRAQLALEGKQQLTKNVPGWIDPDTRKLNEHSSTVVTIFDLLLSGESLHNIARYLQVNNIKSFSRREKANGFSVHSVRTILRSESTVGTLAASKRNDRPAIPNYYEPAIDVATFNKAQEILSKNRVGRAPASDNPITINLFKGIIRCQCGASVHPTGVKATYQGVYRCNNVPDGRCNVPTIKRKPFDKWMLDNIVGFLERSDGNNTDKRKAEIEYQISLVTSKLKKATPLLLELDDVTELKEQVKELNIQRSNMQSELDELNQRETLSDKPLHHLSEIDLTTKAGRVEAQLILSKFVQSIELQREMIIITLRNGTVIGKSRDLSPVLSQDLMKQVVSSSSPRDIDMFSVITSDEEFRKSGKQVTKRS

SEQ ID NO: 7636 - protein, 595 aa, synthetic construct
MKLYSYQRWSSAVQADGTSKARQSHAAEQYAVANNLELVEIVDAGISGFKSANSKSGALAQFLEAVDAGLIIKNSYLYVESLDRITRDEIDIAIELFMGILRRGITIVTGMDNKVYTHAGIKGNPIDLITSLLLFIRAHEESKTKQNRTNGNALALIRRFQEGKPTTIKSVGSHPWWIDCSTDKFESVRRHPTLWQPAQDAMNMFMDGMSVFKVVQYLDEKYPHAYKGKAWKTSNIRKLRFNKAVYGLREIKVDDKDYELQNYFPALITEGQFERLKKIRENTKYIGKVGKGKTVTDKEGNSKVIAERNNINLLAGMKLFRCGHCGGTMMAMRNGDTIRYLCEKGRGHLNDCKTWSLPGMLVEHTLMIVTTIAYINMQRKGGVEKEDYTAQISSTQMLIEDISKKISNGAHLVLAGLGDLDEVIKELQELKDSRSNLALELEVLQRKQLLLQDNTFESLMMDFFTYAQYGVLQDPVHEYRNKLRDIVYSSIDEVKAWKIDKKLMISFKIKGDDEYYTFSAGDEPYDYIFYYGSPLQLGEDLTVQGTYELPEDVKRRIRDYSDVYEATMAVFSTAKEMLRVIHYPPLDGRLFWPRK

SEQ ID NO: 7637 - protein, 455 aa, synthetic construct
MANEIKQVALYIRVSTDQQAKHGDSLDEQQHTLNEYVRQQGNMRVFKTYIDDGISGQKLYRDEFQKLLDDVKKGRIDTILFTKLDRWFRNLRHYLNIQEILDKNNVTWLAVTQPFFNTETAMGRSFVNQSMGFAELEAQLTSERIRAVFDNKIRKGEVVSGKVPLGYEIKDKHLVPNEKAEIVKEIFQYYLETGSMRATVRHLENHFNMTRDYQSVRQMLTNRKYIGELRDNKNFCEPIIDRDVFERVQLQLSKNIRMNKKRDYMFTGLLVCSECGCNYSATAVISRYVRKDGTTNPNERHLYRCTKNRNNVKKCSNKKGIYETTLENFLLENIEKQAEELSVKMQQEPEVKKTKNTNDKIKKKIDRLKKAYLNEVITLEEYKKDRKELEALLIPERDNKIAKIDLNSLHNYSTAEFRDGYIQLTISEKSSLWRQVIKNIVVYPDGNLKINFLGY

SEQ ID NO: 7638 - protein, 455 aa, synthetic construct
MANEIKQVALYIRVSTDQQAKHGDSLDEQQHTLNEYVKQQGNMRVFKTYIDDGISGQKLYRDEFQKLLDDVKKGKIDTILFTKLDRWFRNLRHYLNIQEILDKNNVTWLAVTQPFFNTETAMGRSFVNQSMGFAELEAQMTSERIRAVFDNKIRKGEVVSGKVPLGYDIKDKHLIPNEKAEIVKEIFQYYLETGSMRATVRHLENHFSMTRDYQSVRQMLTNRKYIGELRDNKNFCEPIIDRDVFERVQLQLSKNIRMNKKRDYMFTGLLVCSECGCNYSATAVISRYVRKDGTTNPNERHLYRCTKNRNNAKKCSNKKGIYETTLENFLLENIEKQAEELSVKMQQEPEVKKTKNTNDKIKKKIDRLKKAYLNEVITLEEYKKDREELEALLIPERDNKIAKIDLNSLHNYSTAEFRDGYKQLTISEKSSLWRQVIKNIVVYPDGNLKINFIGY

SEQ ID NO: 7639 - protein, 584 aa, synthetic construct
MNTKVKVIKASNTGARNRNSIHLDLKRVAAYCRVSTDSKDQLESYKSQVDYYTNLIKNNKNWTLAGIYADEATTGTTASKRADFMRLISDCQNGDIDMIITKSISRFARNTLDTLKYVRLLKENNVGVVFEEENIDTLTMDGELLLTILSSVAQQEVENTSAHVKKGLKMKMEKGELIGFQGCLGYDYDPTTKSISINEEESKIVRYIFKRYLEGNGGSVIGRELEEQGYLTPRGKTKWSDTTVLGIIKNEKYIGDILMGKTFTVDPITKRRLANFGESDKYHIENHHEPIISKEDFEKAQEIRLRRAQNRNTIANKDRKREKLSRQYAFSSMLECGFCGEILSRRTWHTSSIYKKINWQCVRSTKKGKKYCPHSKGIQEAAIEKAFVESYRQLCHADSTIIDDFLKIVEEEINDNTLVKDLKNIENQLNRIISQERKLVDLHLEDSIDEEVYAKKYKKLTKQKEELLDEKKTLELTIKDENSIKERLKQFKKVLENREIIEEFNRTVFESIVDKVVVGRIDKDGTVHPYDLTFYFKTGVKDSQDSNNFKDKRKNAKDNDINKLCSYKNDEDKKLCPQSKDNAH

SEQ ID NO: 7640 - protein, 455 aa, synthetic construct
MANEIKQVALYIRVSTDQQAKHGDSLDEQQHTLNEYVRQQGNMRVFKTYIDDGISGQKLYRDEFQKLLDDVKKGRIDTILFTKLDRWFRNLRHYLNIQEILDKNNVTWLAVTQPFFNTETAMGRSFVNQSMGFAELEAQLTSERIRAVFDNKIRKGEVVSGKVPLGYEIKDKHLVPNEKAEIVKEIFQYYLETGSMRATVRHLENHFNMTRDYQSVRQMLTNRKYIGELRDNKNFCEPIIDRDVFERVQLQLSKNIRMNKKRDYMFTGLLVCSECGCNYSATAVISRYVRKDGTTNPNERHLYRCTKNRNNVKKCSNKKGIYETTLENFLLENIEKQAEELSVKMQQEPEVKKTKNTNDKIKKKIDRLKKAYLNEVITLEEYKKDREELEALLIPERDNKIAKIDLNSLHNYSTAEFRDGYKQLTISEKSSLWRQVIKNIVVYPDGNLKINFLGY

SEQ ID NO: 7641 - protein, 583 aa, synthetic construct
MSNNVEIIKANPLVTRRNDNSGSLSRRVAAYCRVSSDSDDQKNSYDSQVRHYREYISQHQDWILVDIYADEGISGTQVGKRQDFQRLISDCLDGKIDYIITKAIARFARNTLDTLKYVRLLKDKQIGVFFEEENIDTLTMDGELLLTILSSVAQQEVENTSAHVKKGLKMKMQRGELIGFQGCLGYDYNQDTKSISINEKEAKIVRYIFERYIDGIGGRAIARELDELGYKTPRGLDHWQDTTVLGIIKNEKYKGDILMGKTFTVDPISKRRLINFGEEDKYYIKNNHDAIISPEIFTQAQEIRLRRSGNKKTIANTKGKRERYSRMYPFSSRLECGFCGTVLSRRSWHSSSEYKKIIWHCTTSIKRGKKYCTHSKGIEEKAIENAFLQSYQQLFYENNNLTEDFLEIIKEELTDDTLKVELTKIVSKLNSLYKKEEKLVSMNLDGKISDSVYEDKFNQIQIEKEKLLEEKVNLEVTLKSEVDIKSRLENFKEILTSQKTLTEFDKDIFESIVEKIIVGGINSDGEIDPAMLTIIFKTGDSSTKNAKSYKSKRKNAKIDNDKLCFNSVTDDEKKCTNKENNAH

SEQ ID NO: 7642 - protein, 455 aa, synthetic construct
MANEIKQVALYIRVSTDQQAKHGDSLDEQQHTLNEYVRQQGNMRVFKTYIDDGISGQKLYRDEFQKLLDDVKKGRIDTILFTKLDRWFRNLRHYLNIQEILDKNNVTWLAVTQPFFNTETAMGRSFVNQSMGFAELEAQLTSERIRAVFDNKIRKGEVVSGKVPLGYEIKDKHLVPNEKAEIVKEIFQYYLETGSMRATVRHLENHFNMTRDYQSVRQMLTNRKYIGELRDNKNFCEPIIDRDVFERVQLQLSKNIRMNKKRDYMFTGLLVCSECGCNYSATAVISRYVRKDGTTNPNERHLYRCTKNRNNAKKCSNKKGIYETTLEKFLLENIEKQAEELSVKMQQEPDVKKTKNTNDKIKKKIDRLKKAYLNEVISLEEYKKDREELEALLIPEPNNKIAKIDLNSLHNYSTAEFRDGYKQLTVSEKSSLWRQVIKNIVVYPDGNLKINFLGY

SEQ ID NO: 7643 - protein, 464 aa, synthetic construct
MKRAALYIRVSTMEQAKEGYSIPAQTDKLKAFAKAKDMAVAKVYTDPGFSGAKMERPALQEMISDIQNKKIDVVLVYKLDRLSRSQKNTLYLIEDVFLKNNVDFISMQESFDTSTPFGRATIGMLSVFAQLERDTITERMHMGRTERAKQGYYHGSGIVPLGYDYVDGELIINDYEAQIIQEIYDLYVNQGKGQQYITKRMVAKYPDKVKTLTIVKYALTNPLYIGKISWDGKVYDGHHTPIIDKSMYDKAQEIIARKAQKGGEQHGNQLGLLLGITYCGKCGAKVFRYVSGGKKYRYNYYMCRSVKKMLPSLVKDWNCKQPSLRQEVVEKKVIDSLKSLDFKKIERELKQVENKTKSKITTINNQISKKHNEKQKILDLYQYGTFDVTMLNERMKKIDNEINALTANIANLEGTKSESLINKLETLKTFNWETETTENKILIIKEFVERIELFDDEVIIKYKF

SEQ ID NO: 7644 - protein, 455 aa, synthetic construct
MANEIKQVALYIRVSTDQQAKHGDSLDEQQHTLNEYVRQQGNMRVFKTYIDDGISGQKLYRDEFQKLLDDVKKGRIDTILFTKLDRWFRNLRHYLNIQEILDKNNVTWLAVTQPFFNTETAMGRSFVNQSMGFAELEAQLTSERIRAVFDNKIRKGEVVSGKVPLGYEIKDKHLVPNEKAEIVKEIFQYYLETGSMRATVRHLENHFNMTRDYQSVRQMLTNRKYIGELRDNKNFCEPIIDRDVFERVQLQLSKNIRMNKKRDYMFTGLLVCSECGCNYSATAVISRYVRKDGTTNPNERHLYRCTKNRNNAKKCSNKKGIYETTLEKFLLENIEKQAEELSVKMQQEPEVKKTKNTNDKIKKKIDRLKKAYLNEVISLEEYKKDREELEALLIPEPNNKIAKIDLNSLHNYSTAEFRDGYKQLTISEKSSLWRQVIKNIVVYPDGNLKINFLGY

SEQ ID NO: 7645 - protein, 545 aa, synthetic construct
METRPTKRVALYIRVSTQEQALEGHSIQAQEQNGRQFAERMGYEVVEVYADEGISGKSTKNRFAYQRMMNDARNHRFDLLVIWKLTRLGRNMLDVLQTVEELLRYDVGLHSISEQFDVTTSTGKLMLQLLGSFGEFERNQIAENVQMSMQSLVKDKKRYAGGRRLGYVSGIDASGQKQLVIEPEEAKIVRLIYAKYLGGAGYRAIANFLNRQGYQTVKKNAFSTTAVKDILRNKIYAGYLEYARYINWETKRRKGKNPKPILVKGTHEPIISEEDYQKVQERLVLEGKQPKWNHTGENVLTGLLRCPECGAPMAASNVTNTLKDGTKKRIRYYSCSVFRNKGASVCHANSIRAEQAETFVADRLKEIVQLPEVLPRLVAALNEEIVRQSQPLEHELVVLLERKEELKTKIEKWEAALEDSPELFPMLKDRLDELTEKRRQLHIRENEILGIFQQQGEPIQVKDVQRILTSLDRFLAQSEKKQIKALYRTFIEKITFDPNHKEMLEITMKFTHAVVQQLNEQYQIAVSKTKDTAIFVLKTPFTLTI

SEQ ID NO: 7646 - protein, 457 aa, synthetic construct
MRVACYDRTSVYEEAKISNDAQYDAVKEYILEKYEQIPQRFSDKGESGGKADRPAFRQLRAWVCASEEEGVIYVWRYDRLARQAKIALEFIELCQQHQVQVYSISEPLPASFSHASTNKLFVQLLFTFAEQQRNVIIENVRAGLAYKKQQRQYLSSAVPYGYRLVNGKIQQEAHEAKVVRHIFQLYLTKKYGYKKLCQRLTQQKFFFRERPFQPYHIYSILKNPLYYGEIKGGSLGKYLGTFEPILSKATFLQVQEIRQSRCTAKKDTYPYLLRQKIKCPFCGRHLSSKYQWNTKKTKTLHYYHCTDRSCQGIFLRAERVESEVLEKIQAFFQHEGVYQALIAQLTQQLAEKRKDEKHKVIQQKKQEAQWLKAFEEGNCSLEELKQQLQALQKPRSTSSFLSLQQCEAKVKEWLQLKDLSSRQLLCNHVCRIEVTKEKTVCGIYFRQLTQNILEGNE

SEQ ID NO: 7647 - protein, 584 aa, synthetic construct
MKTNNVEIIKADSLVRRRGVKVERHLKRVAAYCRVSSDSEDQKNSYESQVRHYKDYISQRSDWELAGIYADEGISGTQVGKRQDFQRLINDCVNGEIDYIVTKAIARFARNTLDTLKYVRMLKDMQIGVYFEEENIDTLTMDGELLLTILSSVAQQEVENTSAHVKKGLKMKMQRGELIGFQGCLGYDYDVETKQLSINKKEAKIVRYIFERYLEGIGGKVIARELDELGYKSPRGLDHWNDTTVLGIIKNEKYKGDILMGKTFTVDPISKRRLSNFGEEDKYYIKDNHEPIISKEDFEKAQEIRLRRAGNKKTVANVNGKRERYSKMYAFSSMLECGFCGSILSRRSWHCRSDYRKVVWHCVTSIKKGKKFCKHSKGLEELAIEGAFMEAYRQLYHSNENLMTDLLETIESELNDNSLNKELKRITNKLRTLLKKEENLVNLRLEGKISDTIYNEKYNEISSEKEFLAEEKVNIETTLKSEIDVKKRLTEFKHLLSSQKMLTEFDRAVFESIVEKIIVGGVNSDGEIDPAMLTIIFKTGETQNKDGKQFKSKRKNAKLETDKLCPQNSDEDKKLYSQGTDYTH

SEQ ID NO: 7648 - protein, 464 aa, synthetic construct
MKRAALYIRVSTMEQAKEGYSIPAQTDKLKAFAKAKDMAVTKVYTDPGFSGAKMERPALQEMISDIQNKKIDVVLVYKLDRLSRSQKNTLYLIEDVFLKNNVDFISMQESFDTSTPFGRATIGMLSVFAQLERDTITERMHMGRTERAKQGYYHGSGIVPLGYDYVDGELIINDYEAQIIQEIYDLYVNQGKGQQYITKRMVAKYPDKVKTLTIVKYALTNPLYIGKISWDGKVYDGHHTPIIDKSMYDKAQEIIARKAQKGGEQHGNQLGLLLGITYCGKCGAKVFRYVSGGKKYRYNYYMCRSVKKMLPSLVKDWNCKQPSLRQEVVEKKVIDSLKSLDFKKIERELKQVENKTKSKITTINNQISKKHNEKQKILDLYQYGTFDVTMLNERMKKIDNEINALTANIANLEGTKSESLINKLETLKTFNWETETTENKILIIKEFVERIELFDDEVIIKYKF

SEQ ID NO: 7649 - protein, 533 aa, synthetic construct
MLKQQANNKEKVALYSRLSRDDGLDKESNSIANQREMLKRYAKENKFYVYDEYIDDGFSGTTFNRPALNRMFEDIEAGKVNVVLVKDMSRLGRNNALFMYYVEEVFPDLDVRFIAINDMVDTAQDDNEIMPFKSVLNEYYARDISKKIRSSIRTTALTGGFTGAFAPYGYLVDPENKKKLIVDPETAPIVKRIFELSQQGTSTHQIARILCKDGILVPRAYRAKKKGILEQSKGFTFPTDWVGKNVKMILENQVYLGHMVSHKSQTKSFKNKKIVPVPKEDWIVVENTHEAIIDKETFEIVQKFISVKKQPNKTGKPNIFVGLVKCPDCGKNLAYSNPNGNEPRFRCRTYARNTELCTTHAISYKALYEIVQNDIKNHVNSMEELGDHFIKEMRELSETSGSQKIHQFNQELVSLEKRIDEIDSIFTKLIEQNALGKITDERFSKMSMNYETEQAEVVQSYRELKSKIKSEEEKVQGTDRFLETISKYKDVTELNRSMLCELIDSIYVYQAEGIGKERTQKVEINYRFLAVSH

SEQ ID NO: 7650 - protein, 470 aa, synthetic construct
MKGESELDKKAAIYIRVSTQEQATEGYSIQAQTDRLIKYVEAKDFILYKKYIDAGYSASKLERPAMQDLIQDVQSKKVDVVIVYKLDRLSRSQKDTMYLIEDIFRPNDVELISMQESFDTSTAFGSATVGMLSVFAQLERKSISERMITGRVERAKKGFYHTGGQDRPPAGYQFNSDNQLIINEYEAAAIKDLFRLYNDGLGKSSISEYLKKNYPGKNKWLPSSIDRMLKNSLYIGKVKFSGAEYDGIHEPIIDEVTFYKTQKEIARRKQTNTKRYNYVALLGGLCECGICGAKMANRRAVGCKGKVYRYYRCYSKKGSPKHMMKTDGCSSKAQQQFIIDEAVINNLKNIDVEAELKRRSAPQTNTSLISSQIESIDKQINKLIDLFQVDSMPLDVISEKIDKLNKEKQSMEKLLERKNKLDKTELQHRFDVLKSFDWDNSSIESKRVVIEMLVQKVIIHDNSIEIILVE

SEQ ID NO: 7651 - protein, 491 aa, synthetic construct
MAKKVTTIPATITKFSQTPINRVTKRRVAAYARVSTEQEEQQTSYEAQIDYYTNYISGRDDWEFAGMYSDEGISATNTKKRVGFQTMVTDALAGKIDLIVTKSVSRFARNTVDSLTTVRQLKEKGVEIYFEKENIWTLDSKGELLITIMSSLAQEESRSISENVVWGQRKRFADGKVTVPFKRFLGYDMGEDRNLVVNPEQAKLVKRIYGMFFQGKAPHTIARILTDEPETLTPAGKQKWNPSTIKSILTNEKYKGDALLQKSYTVDFLTKEKKANEGEIPQYYVKGNHEAIIQPEVFDMVQKQMALRTKGNNRRRSTSVFSSKLICGDCGNFYGSKVWHSNTKYRRTIWRCNHKYGNDEKCETPHLTEDEIKEVFIKATNQLVDMKDEVISNYEGMKEMLFGTAQLESEQGKLEDELNEVAGLIEDCINENARVALDQAEYEKRYNGLVERFDKANGRLEEIKEQITERQARGQQIEMFLKDLEKVGVVE

SEQ ID NO: 7652 - protein, 592 aa, synthetic construct
MKVIQKIEPTKPQIAKRKRVAAYARVSVDKGRTMHSLSAQVSYYSKLIQKNPDWEYVGVYSDGGISGRTTESRNEFKRLIKDCEDGKVDIILTKSISRFARNTVDLLETVRKLRAINVEVRFEKENIHSLSGDGELMLSILASFAQEESHSISNNIKWSIQKRFKEGKHNGRFHIYGYRWEGQELVVEPKEAEMVKLMYANYMKGLSAEFTAKQLTKMGVMAMKGGPFKATSVRQILANITYTGNLLLQKEYTADPITGKSKLNRGELPQYFVENHHEAIIPMDEWQAVQDERQRRRQLGALANKSINTSCFTSKIKCGNCGMSFRRSGKKQPKGKPTYYIWTCRNKSENGVKACDARNIPEKLLKKACAEVLGLEDFDEFDEKVFSDKVEQLTPLEGDILRFKMKDGTTVDKQWTGNLRKDYWTPEVRRAWSERNKRKESSIFNGRFTEFTGFVICGRCGANYRRQSVTYADGTVSRKWHCSNFASDCKPGEKRNSIEEDILKAMVAEVLDIPTFDEPTMDEHLTRISIIDTEVTFHFKDGHTEVKTYEIPKKKSYAQSDEVRAKQSKARKKWWEEKKRGEESNNDTGNNH

SEQ ID NO: 7653 - protein, 455 aa, synthetic construct
MANEIKQVALYIRVSTDQQAKHGDSLDEQQHTLNEYVRQQGNMRVFKTYIDDGISGQKLYRDEFQKLLDDVKKGKIDTILFTKLDRWFRNLRHYLNIQEILDKNNVTWLAVTQPFFNTETAMGRSFVNQSMGFAELEAQMTSERIRAVFDNKIRKGEVVSGKVPLGYDIKDKHLVPNEKAEIVKEIFQYYLETGSMRATVRHLENHFSMTRDYQSVRQMLTNRKYIGELRDNKNFCEPIIDRDVFERVQLQLSKNIRMNKKRDYMFTGLLVCSECGCNYSATAVISRYVRKDGTTNPNERHLYRCTKNRNNVKKCSNKKGIYETTLENFLLENIEKQAEELSVKMQQEPEVKKTKNTNDKIKKKIDRLKKAYLNEVITLEEYKKDREELEALLIPEQDNKISKIDLNSLHNYSTAEFRDGYKQLTVSEKSSLWRQVIKNIVVYPDGNLKINFLGY

SEQ ID NO: 7654 - protein, 470 aa, synthetic construct
MKGESELDKKAAIYIRVSTQEQATEGYSIQAQTDRLTKYVEAKDFILYKKYIDAGYSASKLERPAMQELIQDVQSKKVDVIIVYKLDRLSRSQKDTMYLIEDIFRPNDVELISMQESFDTSTAFGSATVGMLSVFAQLERKSISERMITGRVERAKKGFYHTGGQDRPPAGYQFNSDSQLIINEYEAAAIKDLFRLYNDGLGKSSISEYLKKNYPGKNKWLPSSIDRMLKNSLYIGKVKFSGTEYDGIHEPIIDEVTFYKTQKEIARRKQTNTKRYNYVALLGGLCECGICGAKMANRRAVGRKGKVYRYYRCYSKKGSPKHMMKTDGCSSKAQQQFIIDEAVINNLKNIDVEAELKRRSAPQTNTSLISSQIESIDKQINKLIDLFQVDSMPLDVISEKIDKLNKEKQSMEKLLERKNKLDKTELQHRFDVLKSFDWDNSSIESKRVVIEMLVQKVIIHDNSIEIILVE

SEQ ID NO: 7655 - protein, 551 aa, synthetic construct
MKTPTCIATNGLSINLDNPSPKAYSYVRFSTKRQAKGDSLMRQLDKSREYAAEYGLDLQEKSFEDLGVSAFDRSNVTKGALAAFIRAVEAGAIERGSFLLVENLDRLSRADVLDAMNLLSTLVKLGVRVVTLVDRRILDEESVKEPMNLMYAVLVFVRANEESATKADRVKKAHKRKRDNCSTFAFGQGPGWLQPNADRTGWEVIPERAESVRRVFEYTAKGYGATAIAKIANEERWPVPGRAADWHKTLPNKLIHNRRVLGEFEPQIKEGKQRRPTGELWQTYYPAIVSEELFNAANAAVERRRLLPKRRDNGYHNVFQGMLRCGHCGATLARKSKSGTRNSAGYGLYVCADRDRGLTNCPNWNARELEDALIPPLMTFVAADVLEGTVKQQARAALEIERTELAREGKAIKHLVGTIERIGTSDTISARILALEASIEARRRRVTQLAAQANDPVTSVWSEDVEVAIGEALRAVRDVTLEMAEEREALHQSLLRVVKQISVWPKTHAAVELHQGNGQVFLPLSEQAPIQDALKGLIAAPRLNNDTIATA

SEQ ID NO: 7656 - protein, 552 aa, synthetic construct
MRESKPIGEAKTRAAIYARFSTDLQNERSIEDQLSLCQTYASREGLSVTCTYEDRARSGGSLMGRDGLLQLLDDAREKSFDVVVVEALDRLSRDMEDLAGIHKRLSFLGIEIRAVHEGVVNTVLVGLRGLVGQLYREDNAHKVRRGQAGRIKQGLAGGGLTYGYAAIAGRSGERVVVEAEAQVIRRIFQEYVDGRTPREIAHDLNKERVSPPRGRAWNASTINGNLERGAGILQNELYVGRLVWNKVRMVKDPDSGKRLSRPNPKCEWQIAEVPHLAIISSELFTAAQKRKEERGRTHPSRQRRPRRMLSGLIRCGSCGSGMATNGRDKSGRVRIRCSADTESGTCPDAKTFYLDTVESAVLSGLKAELRAPKVISEYVRTYLEERKRLASASVAKRQGLEQQIGKLNREIDRLVDAIAKGLADPSILGPRSTALGAERKRISEELQNAPPAAKEVALHPAILKRYEEQLGRLEETLAKGVSAGDGEAAEAIRDLVETVTVFRDPERPGGVTVEIAGRLNALLGENAYPNHVKGVWGKMVAGEGLEPPTPGL

SEQ ID NO: 7657 - protein, 530 aa, synthetic construct
MKRVWCLYRVSTKKQLSIDDDIPMQRNACSKFVKDKVDWKITKELSEKGVSGWKKKVDERDELHILKEGAINKEFDVLLVFMFDRLGRREEIALMVNFLVEHGVEVWSTTEGQRTIDQHIDSLTNFISFWQAAGESQKTSQRVREKKKQMSEEGYFQGGAVPVGYKIIETDQKHWKIKDRQIKELAVDEAEAEMVKLIFNLYIDRHMGYRKIVDYLNNNGYRNRDGKVFGVSTVQRILNNSIYIGRKRYKGFDGEEGDTQPYNERLRIISDDVFKEAEKIRNARSGELKEQDKTGIPLVGKLLFSGLAFCKYCGAKLSGNYLYRKQKYKGIDDYYINTIYRYRCPLNKGRLHCNHEQNIWGAKKYDSVIIKQVKEVLSHLDLKLFIESSKEHKQSMINQKERNIKNLKKEYDTFKKQLMTLNSEIAKSLTGESNFTPQQLSGAIEGVEEKIEQITDSLKKLNAEIENDKDNYSDVNYIANELNNWELKFDNADDDLKKAMLSRIIDKVYLGKEEVDITFNLTLQECLQHV

SEQ ID NO: 7658 - protein, 515 aa, synthetic construct
MKTAIYLRKSRADLEAEARGEGETLAKHRTTLLKIAKEMNLNVLAVREEIVSGESLVKRPEMLALLEEIEDNKYDIVLCMDMDRLGRGGMKEQGIILETFKRSNTKIMTPRKTYDLNDEWDEEYSEFEAFMARKELKIITRRMQRGRVASVEAGNYLGTHAPFGYDIHRLNKRERTLTINPEEASVVRMIFDWYANEDMGANAIRSKLNDFGYKSKLGNEWNPYSILDILKNNVYIGKVTWQKRKEVKRPDAVKRSCARQDKSDWIIADGKHEPIIPESLFEQVQEKLNSRYHIPYNTNGIKNPLAGIIKCAKCGYSMVQRYPKNRKETMDCKHRGCENKSSYTELIEKRLLEALKEWYINYKADFEKHKQDDKLKETQVIQMNEAALRKLEKELVDVQKQKNNLHDLLERGVYTVDMFLERSNVVSDRITEITSTMENLKKAIKTEIKKEKVKKDTIPQVEHVLDLYFKTDDPKKKNSLLKSVLEKAVYKKEKWQRLDDFELVLYPKLPQDGDI

SEQ ID NO: 7659 - protein, 515 aa, synthetic construct
MKTAIYLRKSRADLEAEARGEGETLAKHRTTLLKIAKEMNLNVLSVREEIVSGESLVKRPEMLALLEEIEDNKYDAVLCMDMDRLGRGGMKEQGIILETFKRSDTKIMTPRKTYDLNDEWDEEYSEFEAFMARKELKIITRRMQRGRVASIEAGNYLGTRAPFGYEIHRLNKRERTLTINKEEASVVRMIFDWYANEDMGASAIRNKLNDLGYKSKLGNAWNPYSILDILKNHVYIGKVTWQKRKEEKRPDAVKRSRARQDKSDWIIADGKHEPIIPESLFEQVQDKLNSRYHVPYNTNGITNPLAGIIKCSKCGYSMVQRYPKNRKETMDCKHRGCENKSSYKELIEKRLLEALKEWYINYKADFEAHKQGDKLKETQVIQMNEAALRKLEKELVDVQKQKNNLHDLLERGVYTVDMFLERSQVISDRINEINTTMEKLKKEIKTEVKKEKVKKDTIPQVEHVLDLYFKTDDPQKKNSLLKSVLEKAVYKKEKWQRLDDFELVLYPKLPQDGDI

SEQ ID NO: 7660 - protein, 534 aa, synthetic construct
MTAVIYARYSSDSQREASIEGQLRDCKDYAEKNGITVVGTYIDRAYSAKTDDRPDFQRMIKDSGKKIFDVVLVWKLDRFARNRFDAVNYKYQLEKNGVHLVSAMEPISQGPEGIMVESMLIGMAEYYSAELALKVARGERENALQCKYNGGVVPLGFTIGKEDRLYHIDPETAPIVQEIFTRYADGEPAEKIAASLNERGLRTRTGKPFVKNSFFQIFRNRRYIGEYRYKDIVTPGGIPAIVDEDLFDRVQQRFEQNKIAHGRPAKEDVSYLLTTKLFCGKCGTLMGGESGTSHMGNTYYYYKCGNAKRHGKAHCDLKAIRKEPLERFVVDTAIKVIFSDEIIERLIDLVMEAQQKENTRLPVLKDQLRDTEKRLANLLEAIEQGILTPTTKQRLDELEARKEALNTSILEEELKKPVLTREWMRFWFEKFRKGDMRDMEHQRQIIDTFVNSVYVFDDRVVLNFNFTDDSKTISREEVLGSSAVDNAPPQKSSDIRLRIFCLWWAVQDSNRAAARSAVSNQPRGLLLSPRFLEN

SEQ ID NO: 7661 - protein, 452 aa, synthetic construct
MKAAIYIRVSTQEQIENYSIQAQTEKLTALCRSKDWDVYDIFIDGGYSGSNMNRPALNEMLSKLHEIDAVVVYRLDRLSRSQRDTITLIEEYFLKNNVEFVSLSETLDTSSPFGRAMIGILSVFAQLERETIRDRMVMGKIKRIEAGLPLTTAKGRTFGYDVIDTKLYINEEEAKQLRLIYDIFEEEQSITFLQKRLKKLGFKVRTYNRYNNWLTNDLYCGYVSYKDKVHVKGIHEPIISEEQFYRVQEIFSRMGKNPNMNKESASLLNNLVVCSKCGLGFVHRRKDTVSRGKKYHYRYYSCKTYKHTHELEKCGNKIWRADKLEELIIDRVNNYSFASRNIDKEDELDSLNEKLKIEHTKKKRLFDLYISGSYEVSELDAMMSDIDAQINYYEAQIEANEELKKNKKIQENLADLATVDFNSLEFREKQLYLKSLINKIYIDDEQVTIEWL

SEQ ID NO: 7662 - protein, 533 aa, synthetic construct
MKRAAIYARYSTDLQNDKSVEDQIRLCEAYAERIGAQIVTRFNDRAKSGASMFGRAGLSKMIQQAETGAFDILISESPDRLSRDIADLAHIHKTLKFRGVEMNCVNGGVMDTMQIGMYGVVGQMQREEGAKKVKRGMVGVVRSGRHAGGRAYGYEPVPGKPGELRILPDEAQIIVRIFKQYAAGTSPRTIAGALNEEGIAPPRGDKWNASTINGSGTRGYGILRNPIYDGRMVWNRVRMVKDPSTGRRVSRTNDASEHETIEVPHLRIVDEWLFQKVQERKAATGGEHNMMQPRSKRLLSGLLRCGACGGGMVIVGPDRGGNRIQCSTYRESGTCDNRRRFYIDRIEEQVIDSLRMAFADTSVIEAYVKTYEEELKRRRGNAFKSRAAAQRGLNDAKDGITKIVEKISKGLIEDDEAAIMLTGLREERNKFQAILDSVEEPANVIELQPKALLRFRASIESLAKILRSSDGNVPMELGATFRQLVAAVVVEPTPAGEAYSVSLKAYLSSLMHSELSVIKLVAGEGLEPPTRGL

SEQ ID NO: 7663 - protein, 452 aa, synthetic construct
MKAAIYIRVSTQEQIENYSIQAQTEKLTALCRSKDWDVYDIFIDGGYSGSNMNRPALNEMLSKLHEIDAVVVYRLDRLSRSQRDTITLIEEYFLKNNVEFVSLSETLDTSSPFGRAMIGILSVFAQLERETIRDRMVMGKIKRIEAGLPLTTAKGRTFGYDVIDTKLYINEEEAKQLQMIYDIFEEEKSITTLQKRLKKIGFKVKSYSSYNNWLTNDLYCGYVSYADKVHTKGVHEPIISEEQFYRVQEIFSRMGKNPNMNRDSASLLNNLVVCGKCGLGFVHRRKDTVSRGKKYHYRYYSCKTYKHTHELEKCGNKIWRADKLEELIIDRVNNYSFASRNVDKEDELDSLNEKLKTEHTKKKRLFDLYISGSYEVSELDAMMSDIDAQINYYEAQIEANEELKKNKKIQENLADLATVDFDSLEFREKQLYLKSLINKIYIDGEQVTIEWL

SEQ ID NO: 7664 - protein, 522 aa, synthetic construct
MARPRKPKVQSSGRGRSVGGEKAVLYARVSTAEQEKEGFSIDAQVALIREYAERMGFSIAEQYVDVETAKKTGRTQFEAMLKYLRSHPGVRHLLVEKTDRLYRNIKDWVTLDGFDIELHLVKEGTVLSRDSRSSEKFMHGIKVLMAKNYVDNLSEEARKGMLEKAKQGIWPSQAPLGYLNVVGPQGKKIIVPDPEFGPIVRRVFEWFETGDYALKDVTQKARDAGLRYRRSQRPVGISTIHYMLRNRLYAGAFEWAGRLYQGTHDPLVTRETWENVQEVLDGRSASNVRAEPLRFAFTGLITCGHCGCAVVAQMQRGRYIYYHCSGFKQKCPEKYVREETLALAFSEQLARLHMDDEIFSLIERAIRESHSDKSRERVETIARLRLEADRLQQRLDKLYIDHLDGRITADMHDRMAATWREERTGCQRRIDVLHNAEDAFVEDGIALLNLARKAHTTFNLQSQSGKNTALNLLVSNSTWANGQLHVTFREPFDMLEEFMVGNSPSEPPTGSGGSGVSSWLPE

SEQ ID NO: 7665 - protein, 516 aa, synthetic construct
MNNEMQKAIIYCRVSDMKQVRDGHGLESQETRCREFAVNKGYEVVAVYHERGVTGKLMDRPQMLAMLEYLQKHKKRERFIVIIDDISRLARDVETHIQLRKAVSNTGALLESPSIEFGDDSDSRFIELLLANVAGHQREKNAEQTRNRMRARAMNGYWVSRAPIGYEYTELPEHGKIMVPCEPLASIVKEGLEGYASGRFASQTELKRFFEGFSVFPRTPQGRVNFQTVSDMLKKSLYAARINLPNWGLHDIPAKHQPLISYETYQAIQNQVKGHSHAPARKDLHKDFPLRGFVGCACCEKPMTAGWTKGRSQYYPYYFCQQKGCEMYGKVIAKAKIEGDFEKLLGALHPTKSVANLAYDIFKDQWKLREVRYQEEADALKKEMADLDKVIAQTLDKIFCSDSPTLVKAGENRIKDLERDKQVLVEKIAKCGTRLPDFDDIYRTAFEFLANPRKLWSSERFADKRTVAKLAFNGLIPYVRNEGYRTAPIAEPFRLLRRIDGHDNEMVAPPGLEPGT

SEQ ID NO: 7666 - protein, 550 aa, synthetic construct
MVTKARVYSYLRFSDPKQAAGSSADRQLEYAKRWAAEHGMALDAALSMQDEGLSAYHQRHVTKGALGVFLAAIDEGRIPAGSVLIVEGLDRLSRAEPIQAQAQLAQIINAGITVVTASDGREYNRAGLKAQPMDLVYSLLVMIRAHEESDTKSKRVRAAIHRQCKGWQDGTWRGVIRNGKDPSWTRLDPETKTFQLVPERAEAVKLAIRMFRDGHGAIRIMRTLAEEGLQLTNGGNPAGQLYRILRNRALIGEKVLEIDGEEYRLAGYYPPLLSAEQFADLQQATEQRAKQKGTGEIPGLITGLRISYCGYCGSAMVAQNLMNRGRREDGGPQHGHRRLICVGNSQGLGCAVAGSCSVVPIEHAIMSYCADQMNLARLFEGGDRSEALTGRLAIARARVADTTAKIERITDAMLADDAGDAPAAFMRRARELEAALVEQQAEVDALEHELAAVASSPTPAVAKAWADLQEGVKALDYDARTKARQLVADTFERISIYHRGTEPEQTRSWKGTIDLVLVAKRGSSRILHIDRRTGDWRHGEEASIVDLTDD

SEQ ID NO: 7667 - protein, 506 aa, synthetic construct
MRTAITYLRFSSAIQGAEGADSTRRQNDLFKQWLKKNSDAQVVASFSDEGLSGYKGKHLTGQFGDMLARIESGEFSKGTILLVESIDRIGRLEHLETEALMNRILGNGIEIHTLQDGLVYTKDALADDLGISIIQRVKAYIAHQESKQKSFRVSQKWKQRAKLALAGEQRLTRNVPGWIDPDTLKLNEHAETVRLIFKLLLSGESLHNIARHLQSNGIKSFSRRKDANGFSVHSVRTILRSETTIGTLPASQRNDRPAIPNYYEAAIDAATFNKAQEILDKNRKGRTPASDNPLTINIFKGLFRCQCGASVHPTGTKNKYAGVYRCNNHLDGRCDVPPLKRKPFDRWMIDNFLGMIDVGNDGEAEGKIASLQHEVEIVTARIKKATALLLEMDDIDELKIQLKELNQKRTELQTTIDNMRRKTSLTDKELPQLKDIDLTTKAGRVECQLILSKHLKGLTLGKDSVTVTLQNDTEIIVPTDPLPLNDGTSIFEIAEKELLEIDAYQL

SEQ ID NO: 7668 - protein, 545 aa, synthetic construct
MNGATNKITALYCRLSQEDERAGESLSIEHQKDMLLRYAREHHFPNPTFFVDDGVSGVTYDRPGFQAMLAEIEAERVAVCITKDLSRLGRNSALTGLYTNFTFPQYGVRYIAINDNFDTIDPNSTDNDFAGIKNWCNEFYARDTSRKIRAVNKAKGERGVPLTTNVPYGYLKDPDNPRRWKIDPVAADVVRRIFSMCMDGRGPKQIANQLKADKVLTPTAYKTLQGIKSPNKKPEDPYGWGDSTVVRILERREYTGCTVNFKTYTNSIWDKKQRDNPIEKQAIFPNAHERIIDDDVFEKVQEIRQQRHRMTRTGRSSIFSGLVYCADCGSKMLYGSSNNGDLDQDFFDCSLHRKSKEKCNGHFIRVKVLERLVLKHIQAVMGYILRHEDYFRTIMEEQLRVESCEQIRIRRKRLESNERRIAELKRLFIKIYEDNASGRLTDERYDMLSQTYEVEQKQLEAEAITLQQEIEVHERQNENIEKFIQKAHKYVGIEELDGYALRELISAIYVDAPDKSSGKRVQHIHIRYDGLGFIPLNELMKKETA

SEQ ID NO: 7669 - protein, 604 aa, synthetic construct
MIKIIGYARVSTTKQDLSRQKLKIKEFCENNNYELIEIIEDFGISGVVADRKGYIELQSKTYKDADMIVISELSRLSRQEDVTETVYNIQQIINKGLSVILLDSPSKIYEANKLLDITEILILTIKAWAAAQERLDIKKKNQDGKQALFQAYPYAVVDQKIPYGYKAVPNPNGKRPKYILEEVPEEVENIKRLFALVNSGKTLGAVARYFNERNITFRGYYSTVAILSNYIHSDIYRGIRRRTQRLGREEPYTIKVRIKPIISEEDFMKAQELIKNNYKNTPTGKVNHNPLKGIIRCRCGRAMTVKDKKPAAGISKLTYRCSCVDRKSHPDFCKYNIDEVSYDLTNEILYSLFKSMHTAEYINFFRNQTDNRVTELQEEIAGIEKRLSALYLDKENLSNESQDNANKFLLTTNPTLLNIIQEKQNQLDEKIKSIDKEIIRYKKSQSKKMADIERIKDNNGKEKLQNLSIEEQGELYHKYLERVNYIPVTTMQGYYIVQFLNGIKFYIAITKVRSIAMASLLLDNWTIDKKGIITANYDTLKSSDMKNFSIEMIRKTKTMTLQEYLKSDLAKERALHLDLSYRERYLEELHKAGLDGRLRPFKKE

SEQ ID NO: 7670 - protein, 506 aa, synthetic construct
MRTAITYLRYSSAIQGVEGADSTRRQNDLFKQWLKKNSDAQIVASFSDEGLSGYKGKHLTGQFGDMLARIESGEFPEGTILLVESIDRIGRLEHLETEALMNRILGNGIEIHTLQDGLIYTKDALADDLGISIIQRVKAYIAHQESKQKSFRVSQKWEQRAKLALAGEQRLTKMVPGWIDPETFKLNEHAETVRLIFKLLLDGESLHNIARHLQSNGIKSFSRRKDANGFSVHSVRTILRSETTIGTLPASQRNDRPAIPNYYESAIDALTFSKAQEILDKNRKGRTPASDNPLSLNLFKGLFRCQCGASVHPTGTKNKYAGVYRCNNHLDGRCDVQPLKRKSFDRWMIDNLLSMITVGDDGESERKIASLQHEVEVVTARIKKATALLLEMDDITELKAQAKELSRKRTELQTTIDSMRRKASLTDKELPQLRGIDLTTKAGRVECQLILSKHLESLTLGRGQVTVKLSNGTEIIVPTDPLPLTDGAAIFEIAEKNLLNIDTFQL

SEQ ID NO: 7671 - protein, 577 aa, synthetic construct
MERKAAIYLRVSTTDQNYERQRDELEATVKYEGYKLVKVYEEKKSAVLDMDTREELTKMRQLSKADVDAIFFWDVTRLSRKSIDFITLVEEFSNKGICLYFKNERLTTLQDNGEMHPMAKLQLYILGVFAQMDAENLKAKFKSGKERSLAIGNAYTANPPYGYKLKNKKLYIDEEEATIVRTFFDWYLEGKPLREIEMLLNSKNIPTRKGELWSKAMIIKMIKNPVYKGEPVYKNRNKDGEVIKERTFNAPIIIEPAKWELAQIQKEKNKTYADKGRTRKALLRGLLVCGNCEKPYNVVLTGAGFINYACSDNRASINTKVGCTNGGISAGYLDYICWETIKGIYMYQNFKQKFQEEKAKNMALLDENKSQIKNYIDNISKLEKQKDRVREGYRKGIYDDISAAKDISILTTEIEKNKSLIKKIDGENELLKNKISQSLEHYKITDKQPVYEEKLAIVKDLIEIIKLYSYGMYKRVIKLDLKMGLSFNILYNSNHAISSYAVIDDNVATFNKENLKILPNSLADKISDFTVTSDNNEIFGEEVFGRYNFDELWNICKNYKLLKPLPKLTEEDKYKQK

SEQ ID NO: 7672 - protein, 706 aa, synthetic construct
MSRSSKITALYERLSRDDDLNGESNSITNQKQYLEDYARRNGFTNIRHFTDDGFSGVNFNRPSFQELIKEVEAGNVATIIVKDMSRLGRNYLQVGFYTEVLFPQKDVRFLAINNSIDSNNASDNDFAPFLNIMNEWYAKDTSNKIKAVFDARMKDGKRCSGSIPYGYNRLATDKQTLVVDPVASAVVKRIFLLANEGKSPRAIAELLTEEKVLIPAAHAKEYHPEQYNGTKFSDPYLWGMSTIRAILSRQEYLGHTVLRKSVSTNFKLHKRKNTDEDEQYVFYNTHEPIISQELWDSVQKRKKRANRTAAKGTHSNRLSGYLYCADCGRRMTLQTHYSKKDRSVQYSYRCGGYASKVNSCSAHSISADNVEALILSAVKRLSRFVLNDEEAFAKELQALWNEKQTEKPKHNKSELHRFQKRYDELSKLIRGLYENLVSGLLPERQYKQLMKQYDDEQAELETKIEEMEKELTEEKVNAVDIKHFISLIRKCKEPTEISDLMFAELIDKIVVYEAEGVGKARTQKVDIYFNYVGQVDIAYTEEELAEIKAQEEQIEMERLAKQRKREKAYREKRKAEKIAENGGEIVKTKVCPHCQKEFVPTSNRQIFCSKDCCYQARQDQKKADREAEKGNHYYRQRVCAVCGSTYWPTHSQQKFCSEECKKQNHNEKSLEFYHKKQKEKSKCKDLLQTKEPVSSTNSSEIITIPA

SEQ ID NO: 7673 - protein, 528 aa, synthetic construct
MLDNSNVAPGKNKTLRCAIYTRKSHEEGLEQEFNSLDAQRESAEHYIEAQRMRGWTALPDRYDDGGFSGGNMERPGLRRLLADIDAGKIDVIVVYKVDRLSRSLLDFMKMIDLFNEKGVSFVSVTQHFSTTDPTGRMFLGILITFAQYEREVIAERIRDKVAAAKRRGKYCGGVPILGYDVDRDNKKLLVNPDEARTVQYIFRRFIQIGSAKKLGQELNEQGYRTKAWTTKKGKVREGSEWNTAHIYRLLNNRIYIGEIAHKDRSYPGEHEGIIDRATWDKVQAILEDNKPVKVSMARTKMVAPLKGVIRCGHCGCAMGPTYARKNGRHYTYYICQKDSKRTVSRCPLKRIPAGDIEQAVIEQLSAVFRTPTLVAKTYFAARDIEQAERERLFKQKAQLEMELSQAREQALELMKPGSDQPGKTEMLTTVNRQAVELSKQLTHVSERCRAYQGNSITEQDVSEAFQNVEGFWEDLFPMERNRLIRLLVDKVEIRETGIDMELRTNGLTTLIAELAGLACEVTERRASR

SEQ ID NO: 7674 - protein, 604 aa, synthetic construct
MIKIIGYARVSTTKQDLSRQKLKIKEFCENNNYELIEIIEDFGISGVVADRKGYIELQSKTYKDADMIVISELSRLSRQEDVTETVYNIQQIINKGLSVILLDSPSKIYEANKLLDITEILILTIKAWAAAQERLDIKKKNQDGKQALFQAYPYAVVDQKIPYGYKAVPNPNGKRPKYILEEVPEEVENIKRLFALVNSGKTLGAVARYFNERNITFRGYYSTVAILSNYIHSDIYRGIRRRTQRLGREEPYTIEVRIKPIISEEDFMKAQELIKNNYKNTPTGKVNHNPLKGIIRCRCGRAMTVKDKKPAAGISKLTYRCSCVDRKSHPDFCKYNIDEVSYDLTNEILYSLFKSMHTAEYINFFRNQTDNRVTELQEEIAGIEKRLSTLYLDKENLSNESQENANKFLLTTNPTLLNIIQEKQNQLDEKIKSIDKEIIRYKKSQSKKIADIERIKDNNGKEKLQNLSIEEQGELYHKYLERVNYIPVTTMQGYYIVQFLNGIKFYIAITKVRSIAMASLLLDNWTIDEKGIITANYDTLKSSDMKNFSIEMIRKTKTITLQEYLKTDLAKERALHLDLSYRERYLEELHKAGLDGRLRPLKKE

SEQ ID NO: 7675 - protein, 486 aa, synthetic construct
MVRELPTMKLRAAIYCRVSTDEQARHGFSLEAQQESCMRYIKDFGHDLFKIYVDDGYSAKNMNRPALQEMLEDIRNKRIDIIIIWRLDRLTRRALDGLRMVDELFTKFGVSFATITERHDLTTAQGRWMFTVSLANAQNERELIGERVSFGQAKKASTGRRVSLGPIYGYDNVTGKLVVNENEAKIVQQIFNWYVYKGWGYGRIASQLNSDEVPAKKTQWVDSTIKGILGNITYIGKNAWTPKNSETIITEGEHVPILEEDIFTLAQERLKRRGAMEMSRSSYHFPFSSIVKCGVCGASYHANKTKKDKDNFSYANYRCANRKPGKCKQPDISEIKLSKLFFDYFNNLTIEAEEYTPPLTEDDIKKVKKETTRIEREIKKLENRKNNLLDDLGDKIITREEYRGKVEDINSKLAKLQEEMNIIEPPEAAAASQSPEEIIGFVKNLEADWKFMKNEDRKFLVQMIFKRIVITNESDWKIKEVVPAAE

SEQ ID NO: 7676 - protein, 671 aa, synthetic construct
MRQSTLRQVLTNTESTTRQYALRQKAIALGWPAEQIVTIDTDQGQSGASAADREGFQRLVAEVSMGRAGIVLGLEVSRLARNNADWHRLLEICAMSGTLICDEDGLYDPTDFNDRLLLGLKGTMSEAELHFIRARLIGGQLSKARRGELQMSPPVGLLYDPTGKVVLDPDIGVQQAIHHVFSLFARTGSARATVQQFNADKLLFPVRVRTAAHKGELAWMPLQHWRVPRTLHNPRYAGAFAYGRRRERLAGNGKKSYQLVPREQWITLIRDAHPGYISWDTYETNQRLLLGNATAHGADRAAGPAREGTALLQGLAICGRCGRRMTLRYHTRRGAQIPDYQCMNRCIQDGGQRCQAIPGGVVDDAVGGLLLDTLTPHALEVALTVQAELDTRAAEADALRRGHVERARHRADLARRRYLAVDPDNRLVADSLEADWNDALRALQTAHEDYERASAAATAALNDELKDRIRLLATDFPALWSNPNTQQRDQKRMVRLLVDDVTLHKTDSIHLHVRLRGGQTHSLTIEIPPTGWQARQTHPDTIKALDGLLDTHTDAETADALNAAGHRSGENKPFTAGIVVHIRRKYHLPRHAERLRTQGLLTANELAQRLCVHRTTIKNWNRAGILNSHKANDKNERLYQPPTPGDPRLTTRQGSPLRKRVHTPPALGGAL

SEQ ID NO: 7677 - protein, 683 aa, synthetic construct
MNKITAEHLSRLACVYVRQSTQGQVQNNLESQRRQYALVERARQLGWDRVEVIDDDLGRSGSGTLRPGFERLLGLLCDGEVGAVLSIEASRLARNGRDWHTLLEFCSVVGALLIDAEGVYDPVQMNDRLLLGMKGTISEMELASFRQRAHEAMKQKAKRGELYMHVPIGYVRTVDDRLEKEPDERVRAAIDLVFRKFAELGSARRVYFWLGEQGIEMPAVTSAGSAERHEWKAPRYHSVLSLLHNPIYAGAYTHGRSKTRVRIEDGRKRAVRTHQRRPEDWAVLIRDHHEGYIDWDVYCANRELMAHNTNGHGSAVRGSIRSGSALLSGLLRCGHCGAKLSVNYPGPTSIRYQCTTHILSRDHACCVMFGGLGADQLVAEQVLRCLQPLGLQAAVQAIEQLQSVDDERLAQKRLALQRARYEVNRAQRQYDAVDPANRLVAGSLEKRWNDALAVQSRLEEEVAELMRQRPDALSDETRQALMALAEDIPRLWEHPDTTPDVRKRIVRTVIKEIVVTSDGDSVRFIVHWQGGDHTELSLKKTPIGAHRYVTSAETIELITSLARMQPDERIAATINRLGHRTAHGQTWTAARVCSIRKGHSIAAYREGERQERGELTVDEAATALNVTHTTVLRLIHQKELSARQVCRNAPWTIRQADLDEFLAVRTEQGPSTHVAGQLGLDIQ

SEQ ID NO: 7678 - protein, 623 aa, synthetic construct
MARAYSYVRFSTPEQSKGDSLRRQQALSEAYALENSLTLDTTLTFHDLGVSAFKGGNVERGRLGAFLEACDTGLVAPGSYLLVESLDRLSREAVMEALQLFLSILNKGIIIVTLGDSRLYSKGGDNAMDLIISITIMSRAHEESLTKSKRQRAAWNNKRANIGTKKLTARCPLWLKLNADRTEFSFIPERVEVVREMIGLAKNGMGQAAIAKMLNERGAPSFSGNDAGWYPSYIQKILTSKQLYGEFQPGETQNGRKLVAGEPIDNYYPPLLTKDEFYSLQAFRSQNYVGGGRAKKGSTVPNLLSGLLKCGYCGSTMVIAGAAAKRIKTADGETIRPPKKILVCDSARRGMGCYAVQWGFNEFETAFMSFCRGVNLDGLLADLRKNSELPAPIKLEDQVKAEEQKIIDLQKAIDKLFDLYLGTDGQAQAAVQTRLSKLTLEKSNAEVTKERLLKEIQQRKDSGTDSHEVARLTKSLIEQMGSVNDEERFRVRAALSAQLRRFIDKVNLYAAGRLYSKDFIRKQKAALIASGISKANASKYCDENYPTEPKRQGRGNRGRYASRADIGRFFAIATKNGGFRVVYPEFNDPTVAIVQGGFGDGGPSLTAIRDDPYGLPHTLLQDE

SEQ ID NO: 7679 - protein, 541 aa, synthetic construct
MPKAISYIRFSSRIQASGDSTKRQNKYINEWLKNNPDYQLDESLRFQDLGISGYSGANAKSGAFGEFLAAVESGVIEAGSVLLVESLDRVSRQDIDTARERLRKILLAGVDVVTLADNSWYKKESLNDPLSLIKAVLIMQRANEESATKSKRLRSAWDAKREEAAKGKIMSRRCVAWLRVSDDMSHFELIPDNVKAVQRVFQLRLEGLPFVRIARQMNEEGFYTLNQHKPVKGAWSHTTVKALLDNRSVIGFKVPSNCTVTKGVKEIPNYYPAVISEEHFYAVQQLKQGSGRRPTSDKPLLTNLFKGVMRCAECGFVTIVNCATEKWHGVYRCSMRYEGRCHAKSINRRLADKALVQGLLYNTNRLSLNRDNGSAIGSLQSELEQIQKQRERLIKLAMLADDTESMAKDLKALNSQIKDAENAISLLHQREQSSQLETISHLDLTVKKDRIEAQIIIKRIVKEIRLNTAGKKCDVFLHNGLKLLNFPLDRVVDGAQWLEVLPLIDGDEFDFEGFTTKPQHIALEEAPEWVKYMEEQSNQPL

SEQ ID NO: 7680 - protein, 575 aa, synthetic construct
MTKMAYSYTRLSTEKQINGHGFTRQREAIEKVCCQYGWQLSDQTFNDLGVSAWKGANATTGALSQFIDLAKKGAIRPNSVLIVESVDRLSRQQVDKSLRLMLELLEVGVSIFTLSDSKLYTTNSDSVMLDLMMWLMTAQRAHEESEIKSLRVRAAKKKNKELIRKGVIVTRKCPEWLTVSDDKSCFLVNNERAEIVRKIFTWYSQGFSTKPIALKLNELGIPYWGKSSTWSYRHIRSLLKHRGVIGEIQLLKRIDGRDVSDGDPVEDYYPAIIDRGLWATCQQIKSSKTTAKGRIVERGMANLFRGLLKCECGSGLAINSSTVKGRTYRFLRCSQLKTTGCQAKNWHYEKTERILLIALRHSLSSFCEEDHAVSLRESQHYLARINEELQEKERQAENAINYLLDKPSRLLEARLQTLEDDIARLKAIQEQAEHRLEAVHYEKSTALDKVEELQRVLEDIANDDDSRHKANGLLRRLIDTVTLGSISNPRSKEFMELSGNECHGLIVIKRRDGLEVRVEVLKNYELSISWEGDEFTVIECSPTQQPNSQHVPQKFINVGEQTVDLWDDEGWVASS

SEQ ID NO: 7681 - protein, 514 aa, synthetic construct
MNNNKALAVLYVRFSTKKQEAGDSQRRQIESAEQWCERNNAELSAQTYEDLGVSAFKEGGKRPALEDLINAIRMGKIPRDSYLLIEDHDRLSRRGWRYTQDLVYQLVQLGVRLVMLKTGVVYDANNINNIADNIVLMISAERAHQESERKSHLIKASREKARRDKKVTGKLPAWISRDGDGFTFNDKKATIQELINCKLSGKSHQSTAKHLNSLKMTTGNDSAWSASGVRAIVQNHALYGAKAYFDTGKDGRMNKEPIEIVSDIFPALITYEQYQVLNKRQQAGRTSKRGAYSRLLKCGACGGAMTTRTSNYKGKPRAYKMCVKATEGSCNQVERIREPEVYLNEALHYLKYESSSTLYISRTSEYQQRLETLNATVDLLTKNGSIEALARVYTDIKEVSDLIEGSKVLDQNNVDVKVDFSLISSIEDVEQRNIELRKVLREIRFYCIEKVGQTSKWKVVIEQINGIKKYLVLDQKYGFGNTVVDYASLLKQGTEDNREPWEIEDSEEWESYSY

SEQ ID NO: 7682 - protein, 528 aa, synthetic construct
MYTPQSLSEHYSQITTPQTEQPLAILYSRFSSRNQVGNDSINRQLEGALKFCEYHNLKLSEANYSDLGISAYKDNVREGLELLLNAVRDGTIPANSWILCHTTCRLSRKGFQHVLKLVSELVATGCKFCTINDNQVYDSTNINKLSSALPLIISADLAFSESEKKSLMIKHAKEQTRKNRKIVGKQPYWITLQDGKPVLNDFSTIVKTIIDLRLKGYSAQRIAKQLNADGHLSPTGKSWGAAAIRKTIDNHVLYGAKEYSEMKDGKLVPVEIVEDLYPALCSKSIWLQIKYEKGTKEVGKRSKSSPFSKLLRCACCGSAMTTRSTYQKGVKYDYRVCIRSTEGSCDQKSRFRDLDNIILGELKHLKYEVKTHATVEVDSIKVFQDKLTLLNQTKELLQSNPTALAAIYADIAKTEQELHEAKRTKELLESQPNEVNFQAIVDVEDQSQRNVLLRRIIESIEVKRIDKEKLVSQVRVVVRFKNSHTQTFVVCYRYRGYDIKWLTDTEKYKEQLNAFVNDAVKQLEEWER

SEQ ID NO: 7683 - protein, 531 aa, synthetic construct
MAIAYSYIRFSSSQQSQGDSLRRQIQLAEKYCIENNLTLSDTNFRDLGVSAFHSTNSQEDSGLGKFLSALSQGRINEGSYLLVESLDRLSRAKVQTALRQMLNIIDLGVKIVTLMDNRIYDQESDTTDLIISLTIMERAHNESKTKSERIKAAWAHKRQNPKTTNRHSSTPFWLSLNPDKKTYSLKEKYVEIVRKIYQLSIDGWGVVKIVRHLNESNIKAPKGGSWATTTVSRVLTSKAVLGHYEPKQNRKSLNFVIEDYYPPIIQEDTYYLSKQRQNERSKPEAAGRKTDYPNPLNQIAKCKLCGSSMYYENKSKSLKYLTCREFKKGNCTNKPIRIELIYRFIYEVFNSPIFHQCQAKLVEKSNQKGSNRLEELTAKQTEEENALRGLLSLSNDFSNTIIQEEIKVRSERIESFKKQIENVKAEQAVEHTRSVHINFTEALQLAVSAFRFPLGEVEVEELSREELFNTRVRLNRTLKRAFNSLSIYHSGESKRITIETEVMEGFTEGLKYETTRQSIKDPVSSRIWSVC

SEQ ID NO: 7684 - protein, 653 aa, synthetic construct
MFDYDKSRFNGICIPYSRFSTTEQDKVGRKSLERQLEEAKRYARENNLYINEELMFADKGVSGFAKQGHLSKTFEKGQMSLILEVLEDVPFKERENIYLCFHAFDRFSRQHPEVAYEQFSKILKRGFNIVTTIDDCFYSSKEADLESMLISIIKMSSAHYESEVKSVYVSDAHRRRRETLEYLYNHPTQKGKHKHIGLKQSTTPRWILESEIIYDFVDENGVVRKDSFSKFSLDEAKAVIINQIFDWKIQGLGHTKICQLLNQKKIPTFEDGNCRKAKQWHTFAISNLFKNKSTIGTFTLKTIEHEEYFCESERIFKTRSNKVDATSEMENYFPAVVTVEKYETALKVIAMNNKGEKISEPEDKTHVFSKVLRCTCGGRLVFKGTRKTGKSEKSDWFEYLRCEKAILKDGCDAENIIYKDFEMAFLRFATSSNYTVFSTTQSKLKTKLKRLSIKQSHLNSEKEQLLLEAKGLKKTFESIVTQNLDATLLLDLISKNEASLNTVRNELVKIDEQIKGVEREYEKSGKPIDKRTIKKELRSEDYPKRLLMRRAVNQQLRKNVVHMEVCSTKLLKFVIVCFDDYVIRTYAYQDEFSTDLMFNSIKINVENLDESEVYNLITHLFKEVRISLSGGNAVITNFDLKVHLSGVKEKYLK

SEQ ID NO: 7685 - protein, 674 aa, synthetic construct
MIGAEKLKTELFDYDKTKFNGICVPYARFSTKGQSKVGKKSLERQLSKAREYAKRNNLYINEDLIFTDKGVSGYSNQGDLSKAFKKGQMATMLLLLEDVPPTERENVYITFHNFDRFSRMSPDAAQAHFNKILNRGFKIVTTIDNQLYDRRDKGMSNMLISIIKMTTAWQESLNKSIYIKDALSRKKKVIEYLYTHPTQKGKHKHIGIVQPSIPRWIDQENITYEYVAADGSKRVDTFKKFSLNERKAAVVRQIFELKIAGLGYTRICQKLNNDGVEVFDQGKFKKAKKWHSYAVQNIITSDKVLGNIRLMEMVAEEYHCKETDEIKTKKVKQEVTSRLENYYPAVVDEETFRLANILKFQEKKGKPLGRIGERTNIFSTFMSCYCGASLQYSRSQINKRSKNAAPIYREQLRCTNALVKNGCFDDYINYVELEQAFFKYVNHIDFREICVVGDKSLEAEISNLQAEIKALNDEKKELSKKNSGLEKTFESAISQGLNADYVLIALNDVKKSSELIETKINDLKVRISKLKVSIDSKESEYLDIVEYSKQIKNSSTETKIMMRKKLNEFLHSKIKWMEICSSKHSKFVILCFHDEVIRTFAYTDNYANDLMFNTIKLTYEVDDSHLNYELFLIYIDQIKRSLRGETEVVSNADLINALQRLKRQFYKSKGVVNV

SEQ ID NO: 7686 - protein, 559 aa, synthetic construct
MKTKLYSYIRFSSMRQNDGSSYERQIRMAREVAAKYDLELVNDYQDLGVSAFKGANSKTGALSRFLDAIGRSVPVGSWLFIENLDRLSRADIVSAQELFLSIIRRGITIVTGMDNKIYSLDTVTANPMDLMFSILLFIRGNEESQTKRNRTNSSALIKIKAHQENPQNPAVAIEEVGKNMWWTDTTSGYVLPHPVYFPVVQEIVELRKNGRSTAEILDHLNETYTPPPAVSNKKHSKWSRAMVERLFHTRALIGIKEVSVDGVNYELKDYYPRVIDDATFYHLKKNIGARAWNFGDKEEVKPIPLLSGIGLLKCDHCGCAMVKVKGTNKRSDQYRYTCDATRSRRLDCEHPNWSFRGDQLEKAVLQLLADKIWIAEDKANPVPALKVQVDEISRKIDNLIALSAMTGATKELADQITTLNSERETLYNQIKMAEEEMYSVDSQGWEKLAEFDLEDVYNEERLKVRFKIKQALKRIGCSRIDRNKNLFVLEYIDGKTQRVVIENSRGTRKGRIFIDLKTINDRQILESNGLVLHPCLDMLTDKNWKPEEEIPGPLQEFGI

SEQ ID NO: 7687 - protein, 536 aa, synthetic construct
MVPSMINRNPLQTSHKKHALAYIRISSQRQINGESPETQQQAISNFAANNDIDIIKTFYDEAKSGKNTDRPALKELIRYADKHKDDIDHVIVYKMNRASRDMTSYITGFLLPLKRLGISIRSATEPTDDSVYGQFMEMFNVLVGQMDNETKRAFTVDNMTNLSLQGWWQGPAMLGYDIHKIPNDVGKLRPTLKPNRMAPLVKQVLERFSEGDITKAELTRYAASIGLRSRYGKKLSEDRIHAMIKHAIYAGYVANKQTGWELVDGKHEAIISPDTYEINQRLLYGKRKRAGEVRQKFNPDYPLKGLVLCPNCMKPLYASAPTTGAGGKSPRYHCSRKQCKGKCKSIGASIMHEDFEKMLQRIKPDDRLVALYKEVLVTEAANQLGNLNGKISKARSQLDTIAENRLNAIKKFNADQLTVDEKTELVNAYDDDKAIITDELRQLERQQTIRETDIDIALDIMRDADKQWLLASPSARVRFQSILFPKGLVYDYENHRFGTSEISSLYRVVATKKDLPEAEKSFLVAGAGFEPATFWL

SEQ ID NO: 7688 - protein, 544 aa, synthetic construct
MHDQTTTIRRAAIYARYSTDMQRERSIDDQVALCREYARKNGLRIIQTYNDRAQTSASLVGREGIMNLIDDAKARKFDVVIVEALDRISRDQEDLAGVFKRLSFANVEIIAVHEGVADAVQVGIRGLLGSMFLSDLKHKVRRGMAGVVNDGRVAGGNAYGYDVVLGKPGERTINEEQAAVIRRIFREYVGGASPRDIAGRLNSEGVPPPRGSKWNASTINGSKNRSYGILVNALYNGQIVWNRVHMVRDPDTGKRVSRFNPESEWKIAEAPHLAIVDRETYDAAQARKADRTKLVEQGASTKKAKRLLSGLLRCSICGAGMASVGFNGGRLRVQCSQNRESGSCDNNRKYNAERIEHAVVTGILSKLEDEEAAERYIRDYVAERRANIDNATRSASQIEAKLAKVAGEQERLITLFQTGVLDLDRVKPRLTELEDQRKALEDEAASAREAVPVIELHPAAVERFIKLLSRAKAEYENYEMLKDPEKIEAMRELISHVIVSDSAANGYELDVFTYLSALTGDYAPGGLGGALVAEEGFEPPTQGL

SEQ ID NO: 7689 - protein, 582 aa, synthetic construct
MDKKHAQPLAYSYVRMSTDMQLKGNSLERQKEKSKEYALRNDLHLVENFEDIGVSAFKGRNVKDGMLGEFISLIENKTVPSGSYLLIESLDRLSRENIFESIPLFIKILKSGIKIVTLIDEQVYGAENADFKDLLYPMIVLSRAHEESVAKSFRVGKAWANKRKNIHQRKLTKVCPAWLKLNTDSNSFEVIPGRDDIVKRIFDLADSGYGSYSIGRILNNEAVPPFGEDSKGWHASYISRILNNRSVLGEFQPHKLVNGTAQPDGDTVPDYFPQLIDEEQFLRIKHARRKRQVEGAGRKGPVYRNLFSRIAKCAYCASPMRFVDKGPPPKGGQFLRCTNAERHFGCSASNWRYDHFENVFLYFVHELDLIETLKRADEQSERYTLEQKLVSINENIRGKRELLNTTFDMLQTSNASKDFIQSKIEEISSEILELENQKGAVEAKLEKDAALAPVDDQQIKSLIKELQDADDGDLERKRRVVANRLQMIIKSLTLAPDGLRKDAEKLVLSQFGSSEALFDFFETGALSGEVSTGMSFSVVLLDGIMRRVTVSRREPLKVIQLIAVDKHGLIIETEQTHESLKI

SEQ ID NO: 7690 - protein, 525 aa, synthetic construct
MPSAFSYVRFSSGKQAKGSSEHRQRAMLGQWLEQHPSFTLSDLRFEDLGRSGFSGEHLDHGLGQLLAAIDSGAIKSGDVILVEAVDRIGRLEPLEMLPLFSRIVKAGVSVITLEDGHVYDRSSVNETSLFLLVAKIQQAHEYSNRLSRRINASYTARREKAKAGLGIKRETPVWLTTDGQLVPHVAPHIAQAFQDYADGLGERRICRKLRESGLEEFSKTNATTVRRWLKNKTAIGYWNDIPDVYPHVVDPALFYRVQQRLDAPKVDRAKPSAHYLTGLVKCAVCGRNYNFKQRKHTDPAMLCTSRARLAGEGCSNSKTYPVIVLDQVRKLTSLPFLQHAMESASSQADPSSQRLAVIDGELAEVSRQIGEATKALLAVGLVPEIQESLERLKQARTVLEEERAALLLPQAEKLTPAQLEAFSNGLLDDEPMKLNHVLQTAGYSMVVHPDGSIDVDGKSFVYEGASRKERVYKLRLIGEDKRWSLPILTPQMATYKSLFMAAVRLPGDPSEEELRRFEEAKHSER

SEQ ID NO: 7691 - protein, 472 aa, synthetic construct
MEDSSNKSVGIYVRVSTDEQAKEGYSISAQKEKLKAYCVSQGWASFKFYVDEGKSAKDTHRPSLELLLRHIEQGIIDTVLVYRLDRLTRSVRDLYTLLDYFDKYNAVFRSATEVYDTGSATGRLFITLVAAMAQWERENLGERVKMGQNEKARQGQFSAPAPFGFIKKGKSLVKNHEQGEILLEIIDKVKKGYSTRQIANYLDDSGILPRRGYRWHPGTILTLLKNPILYGSFRWGDEIIEDTHEGYISKDEFNHLQEILKERSIVKKRDSYSVFIFQSKIICASCGNRLASERSGYLRKKDKKYVENINYRCQTCAQNRHPSIMGSEKKFQKALVKYMQNVTPKLEPVIPEEKKHDYEKVHQKILKLEKQRKKYQKAWSLDLMTDEEFEQLMYETKKALKSAQNELAEAHSSEYQNSQIDIERAKEIVKMFNENWSVLTNEEKRSIVQELIKHINFTKEDGEIIITHIEFY

SEQ ID NO: 7692 - protein, 559 aa, synthetic construct
MKTKLYSYIRFSSMRQSDGSSYERQIRMAREVAAKYDLELVNDYQDLGVSAFKGANSKTGALSRFLDAIGRSVPVGSWLFIENLDRLSRADIVSAQELFLSIIRRGITIVTGMDNKIYSLDTVTANPMDLMFSILLFIRGNEESQTKRNRTNSSALIKIKAHQENPQNPAVAIEEVGKNMWWTDTTSGYVLPHPTYFPVVQEIVELRKNGRSTAEILDHLNETYTPPPAVSNKKHSKWSRAMVERLFHTRALIGIKEVSVDGVNYELKDYYPRVIDDPTFYHLKKNIGARAWNFGDKEEVKPIPLLSGIGLLKCDHCGCAMVKVKGTNKRSDQYRYTCDATRSRRLDCEHPNWSFRGDQLEKAVLQLLADKIWIAEDKANPVPALKVQVDEISRKIDNLIALSAMTGATKELADQITTLNSERETLYNQIKMAEEEMYSVDSQGWEKLAEFDLEDVYNEERLKVRFKIKQALKRIGCSRIDRNKNLFVLEYIDGKTQRVVIENSRGTRKGRIFIDLKTINDRQILESNGLVLHPCLDMLTDKNWKPEEEIPGPLQEFGI

SEQ ID NO: 7693 - protein, 507 aa, synthetic construct
MKRVISYIRFSSERQAKGDSLRRQSKMVNDWLKAHPEYYLDQDLSFRDLGVSGFTGKHLKGGLGDFLTAIEKGLVKAGDTLLIESLDRLSRQDVDQASELLRNILRSGVDVVTLSDGEHYTSESLKDPLALIKSILIMQRAHEESLRKSERIQAAWDAKKEAAKAGIKVSKRCPAWLKLNDDRKSFSVIPEKVETVKRCFQLRLEGKSIWEIVRTLNDECHQSMNQYKPGKFGQTSVQDLLKNRSVIGYFTPKGCGEIAGYYPSVIDETTFYKVQQLSHSRYGRKPASDKPLSVNLFKGVIRCSECGHALIITGFSDTRNGIYRCPLRNENRCSAKGLSRKQTDGTLLTLLSRLDRFDSDTTNTIDTLKLHREHLSSNIEKLVQLSLEIEDLNAITSKLKQLKGELSQVDADIEKETQRLKSIDVGCLSDCDLTTKAGRIEAQLIIKSAVKEVVLNTAKRRCKVTFHNGRIIDLPITENPSEDVTEAIQSLSEVIEKGLIDVDEVIV

SEQ ID NO: 7694 - protein, 502 aa, synthetic construct
MDKICIYLRKSRADEELEKTLGEGETLLKHRKALLKFAKEKKLNIVEIKEEIVSGESLFFRPKMLELLKEVEAKMYTGVLVMDMQRLGRGDMKDQGIVLETFKNSHTKIITPMKTYDLDNDFDEEYSEFEAFMSRKELKMINRRMQGGRVRSIEDGNYISANPPFGYDITFINKNRTLKPNPKEAEIVKLIFKLYTDGNGAGIIANRLNALGYSTKNCREFESSSILFILKNPVYIGKVTWRKKEIKKSKNPNKVKDTRTRNKSEWIVADGKHKPIISDEIFNQAKEILKNKYHVPYQLKNGAVNPLAGIITCGVCGSKMVLRKYGNRLPHIICMKKCGNKSARFDYVEKALLNALETLLNNYESNMEKINKNNSKIDTYKIQISVLEKKLSTLNSQKMKLFDLLEQGIYDNNTFVERSNNLADRSNKVSTEMNSLKELLKKEDKSKNLNLSKIRDAIKEYKSSKDITEKNQLLKSILIEAKYIKSKNQRNDDFDLQLYTRF

SEQ ID NO: 7695 - protein, 544 aa, synthetic construct
MKAAIYSRKSKYTGKGESIENQIQLCKEYGLKYLEMSKEDFIVYEDEGFSGGNTKRPQFQKMLKDAKERKFNILICYRLDRISRNVSDFSNLINDLNRYSVDFVSIREQFDTTTPMGRAMMYIASVFSQLERETIAERIRDNMIELAKTGRWLGGITPTGFQSEAIIKVDSGGKERKMFKLSVVEEEINVVKLIYNKYIELKSITKVEKYLIINKINTKNGLDFQRYSLKFLLGNPVYAVADKNMYEYLISKNYEVYSELKDFNGIHGLIAYNKTCQNKEQSINRFRNSSEWIIAVGKHQGVIPSDIWIEAQNLLEQNKSKAYRKVKSNQSILSGVLRCAYCGSYMRPKAVQRKNSDGEQVFYYLCEMKEKSKKTRCNVSNINGNVLDKLIINELKKIIKEKFPLFQDMNFKKTLIECNYMGSENELIEKKISEIDLSIMNIMSSIEKGQPESVLEIMYKRMEKLDKEKKDLNKRLSQANSVGKNSKSNSINMEFIYKSLCSFNDSSWELMNVEDKRNLIKSVVDKILWDGKKIDMLLLGSEIS

SEQ ID NO: 7696 - protein, 531 aa, synthetic construct
MKVAIYSRKSKFTVKGDSIENQVEMCKNHIINRIGKNVDFLVYNDDGFSGKNLHRPKFQKMLIDAKAKKFDTLICYRLDRVSRNIADFSNLINTLQNLNINFISIKEQFDTSTPMGRAMMYIASIFAQLERETIAERVSDNMLEMAKSGRWLGGQTPLGFKSKPILYFDYENHEKKMFVLSPIEEELTVVKLIYKSYLKFQSISKVTKYLIQNSIKTKKGNLIWSKRSVKDILNNPVYVRADENVMNFLSNKGINVIGIPDNKHAILTYNKKKGIKKFRQTNEWIASISKHTGIINSKTWLKVQKIMIKNKSRAPRIGSTQNALLTGLLICKQCGNPMKIIHGPLDKEGKKLFYYKCSLKEKSGNSKCCNSNIRTDEIESVVIQKLHSISINKDILLNSLKSFRNLDKNTEIQNIKKIVKHKQDKIDNLIKFLSLSPSISENVVHEIEILNKDIKELNLKLEKIIKTKADFVDNEEVSNLILESLKRVYINNFFSIEEKKLILQKIVDYITWDGDNGIVDIHLINEASFLH

SEQ ID NO: 7697 - protein, 558 aa, synthetic construct
MKVAIYSRKSKFTEEGESIENQINMCIKYAENMLNLTDYEIYEDEGFSGGNTNRPHFQKLMKDIKNKKFTHLICYRLDRISRNVADFTSTLEILNKHGVSFVSIKEQFDTSTAMGRAMMNVSATFAQLERETIAERIKDNLRELSKTGRWLGGPAPLGYKSVQVENNDLKGKSRKKHVLQIEDNDINIVKLVFELFKKYKSFQKVSLALENQGVYSRKGRVFSRELVKQMINNPVYVIADKVILDFFRNYDCEIYRKDSVNGSNAIMPYNRRKENGSFAKIEAWLISVGEHPGIISSRDWIDCQNICKEIKLKASNRQCTSQEALLSGLVICAHCGSSMAPRKQLNKCVNSNINIYRYYTCNLKNKAGNRCKNTSLNAYEAEEYVVNTIKNMTKDDILDMYLDSKHKAAIKVNNNNLIKNLAKQIETNKQMISNLSKRVGSSNDEDLISSYEDEIKQLKQENRKLDEQMIKLEYENDNIQDIKNDISQVIELYNNFKRFYDVTEKFEDKKRLIASVVKFIVWDSSTNSIKVVPIGSSLTRRDFGNVAFKSTDQKKWPM

SEQ ID NO: 7698 - protein, 504 aa, synthetic construct
MKAAIYARYSSDNQREESIDAQIRAIKEFASHNNIQIVKIYTDEARSATTDDRPQFLQMIKDSEFNIFNTVIVHKLDRFSRNRYDSAFYKKKLKDNHVKLISVLEHLDDSPESIILESVLEGMAEYYSINLSREVMKGMKETALQCKHTGGTPPLGYDVNPDKTYCINEKESNAIRLIFQMYASGTGYTPIIDKLNDLGYKSKTGKSFGKNSLYGILTNEKYRGVYIFNKSSKKINGKRNSHKIKSEDEIIKIEGGMPAIISEDLWKRVKIKMDSNKINKGANTAKAIYLLSGLIYCGKCGSAMTGNRRYAGRNKSLYETYECSNRKRTKQCDMKAINKDYVEQVVIDDLYNNIFSDSAIENIVPDIFAFISEQNKIINEDIKIYKKELADIQTKIDNMLDAIANGFYNSSMKEKSDQLETRKTTLLIRINEAEREAKLNSPTEDMIKKYLKKDSDIKQKSLENKKKVIQTHVQKITVYEDRITTDTIVSLIGGGDGCRTRVRK

SEQ ID NO: 7699 - protein, 541 aa, synthetic construct
MPKIGAKVYSYLRFSDPKQAAGHSADRQAQYAKAWAAERGLVLDESLTLRDEGLSAYHQKHIKQGALGVFLQAVDAGRIPEGSVLVVEGLDRLSRAEPILAQAQLAQIINAGISVVTASDGREYNRQSLKAQPMDLVYSLLVMIRAHEESDTKSKRVKAAIRRQCEGWVAGTYRGLIRNGADPHWLEWDGAAWQFVPARVEAVRFALDCYRQGLGAKRTLELMQEKGMDPAELKLGGQQLYRLVHLQPLRGGKRISVDDDEFILEDYYPRLLSDTEFAELSALTGQRHRRRGKGAIPGVVTSIGLTWCGYCGSAMEAQNQMSKVRPDGTLMPGHRRLACSVTAEHSECRVHGSCSVVPLERALMDYCSDQMNLQRFMEPVDQATALRARLVEARTEVQKVEQQLERVTDALLAGESEGAAPLAFVRKARELEQELQVRQASVQQLERELAGLARYQSPADAARWASLAEGVMAQDAESRERVRQMMMDTFSQIVIYLRGIRPAGRKAPFMDVLLISRSGQRRWMRLDRKSGEWAVGNDRPV

SEQ ID NO: 7700 - protein, 644 aa, synthetic construct
MLRPICYERVSSIQQIEGGGGLDDQRSALEGYLDKNAGLFENDRLFIQDRGVSAFKNSNISSESQLGIFLQDVQNRKYGEGDALIVMSLDRISRRSSWAEDTIRFIVNSGIEVHDISASTVLRKDDPHSKLIMELIQMRSHNESLMKSVRAKAAWDRKIIEAVQNGTVISNKMPMWLKNVDNRYQVIQEKADLIIRCFEWYRDGFSTGEIVKRIADPKWQMVTVSRLVRDRRLLGEHKRYNDEVIHNVYPKVIDDDLFLTANRMMDRVMLEKNKPAEDLLLESDVVQEIFQLYESGLGSGAIVKRLPKGWSTVNVLRVLRDKNVVTQKIIDNLTFERVNQKLSMNGVANRIRKDITIAQDDYITNLFPKILKCGYCGGNVAIHYNHVRTKYVICRNREERKICDAKSIQYIRIEKNILKCVKNVDFQKLMIESTGSETSVLDGLHEELSSLRREENSYSDKINERKLAGKRVGIHLNDGLTEVQDRIEEIEKEIINAQTVREIPKFDFDMDEVLDPMNIELRAKVRKQLRLVLKAVKYWMFDKRIFIQLEYFNDVLSHMLVIDNKRGGGDVIYEMSIEERKGERIYTVHENGHAVFIASVTIGTDIWSLALSRTRTIDTIGNYLSLLAREGFEIFVNEDQIDWF

SEQ ID NO: 7701 - protein, 547 aa, synthetic construct
MKLLVTYIRWSTKEQDSGDSLRRQTNLIDAFYAKHKDDYYLLPAHRYVDKGKSGFHQQHKAQGSDFRRMFENVMSGAIPEGSLIVVENFDRFSRADIDTAIDDVRQILRKGVSILTLGDGELYDKSALTDPVKLIKHIIIAERAHQESLVKQKRIAQVWNHKTQLARELKKPMGKQAPGWLELSEDGSHYIVDEDKASLVNIIYDKRLSGMSMFAICKWLNEQGYPTINQRKVRISKTKKPDGNWSALSVKHILTSRSVLGYLPAKISTEDRKTVLREEIEGFYPQIVTDSKFYAVQQLLEETGKGKTSSGEHWLYVNILKGLIRCKCGLVMTPTGIRKPVYQGTYRCNGNKESRCSYGTVSRKLLDTQLCSRLFSKLSQLHDEATDTAKLDELQRRLNTVDSELEKLTETLIQLPNITQIQEALRVKQEEKDELIVQLSREKARLKSVSSLDLSGLDMESVEGRTEAQIIIKRLVKEIVVSGNEKLVDIYLHNGNMIRGFPLDGKDDHTLTLEEATDEMQSLDDMLIFGEPVTRIYPAGDMEEVDA

SEQ ID NO: 7702 - protein, 514 aa, synthetic construct
MKKVYSYIRFSSTKQAFGDSHRRQSKSIQDWLSSHPDHILDESLSFEDLGRSAFHGDHLKEGGALRAFLEAVKQGLIPSDSVLLVESLDRVSRQSISHAQETIRDILEHGITVVTLSDGETYNRQSLDDSLALIRMIILQERSHNESVIKSDRIKKAWSHKRQQFEQDGTKITGNCPGWLKLNSDGKSFSLIPHHVETIHRIFDEKLSGKSLHAIARDLNLENIPTITNKKVDTGWTPTRVRDLLLKESLIGVAYGVSDYFPPAISKEKFHAVQMIRGQGKGKKPTSQQPSSIDILKGLCKCAECDSTLRQRNTKKTPEGRYPRGYLECRNRLLGRCNSKAFNRSLIEDILIQKVFPTLQYLSLKSNGDNISVTTLKADITSLEKGINNLISLAEKGLGDLDTLAQRITNNRVELESKKKDLRQAEAIQSLRSDNDIQDSDRKTVEGRIKLQLAIKSFVKEIIFDYYKQEITIRLLNGKSFSGISVAREDKDFNHSSMFEVLQKSLLDIDEVHL

SEQ ID NO: 7703 - protein, 559 aa, synthetic construct
MKTKLYSYIRFSSMKQADGSSYERQKRTAAEIAAKYDLELVTSYQDFGVSAFKGANSRTGALSRFLDEIGRSVPVGSWLVVENLDRISRQSIIEAQELFLSIIRRGITIVTGMDGKVYSKESVNANPIDLLLSVMLFARANEESQTKRNRTNSSALIKIKAHQENPQNPAVAIEEIGKNMWWTDTTSGYVCPDPVFFPIVQEVVELRRNGRSTAEILDHLNATYTPPPAASHKRHSNWSRAMIERLFHTRALIGIKEISVDGVKYELKDYYPRVLDDAEFYHLKKSIGVRACNYGDKEEVKPIPLLSGVGLLKCEHCGSAMVKVKGTNKRPNQYRYSCDAMRSSRIACVHTNWSFRGDQLEKAVLQLLADKIWIAEDKANPVPALKVQIDEISRKIDNLITLSAMTGATKELADQITTLNSERETLYNQIKMSEEEMYSVDSQGWEKLAEFDLEDVYNEDRIKVRFKIKQALKRIGCSRIDKYKNLFVLEYIDGKTQRVVIENSRGPRKGRIFVDLKTINDRQILESNGLVLHPCLDMLTDKNWKPEEEIPGPLQEFGI

SEQ ID NO: 7704 - protein, 508 aa, synthetic construct
MKKAIAYMRFSSPGQMSGDSLNRQRRLIAEWLKVNSDYYLDTITYEDLGLSAFKGKHAQSGAFSEFLDAIEHGYILPGTTLLVESLDRLSREKVGEAIERLKLILNHGIDVITLCDNTVYNIDSLNEPYSLIKAILIAQRANEESEIKSSRVKLSWKKKRQDALESGTIMTASCPRWLSLDDKRTAFVPDPDRVKTIELIFKLRMERRSLNAIAKYLNDHAVKNFSGKESAWGPSVIEKLLANKALIGICVPSYRARGKGISEIAGYYPRVISDDLFYAVQEIRLAPFGISNSSKNPMLINLLRTVMKCEACGNTMIIHAVSGSLHGYYVCPMRRLHRCDRPSIKRDLVDYNIINELLFNCGKIQPVENKKDANETLELKIIELQMKINNLIAALSVAPEVTAIAEKIRVLDKELRRASVSLKTLKSKAVSSLGDFHAIDLTSKNGRELCRTLAYKTFEKIIINTDNKTCDIYFMNGIVFKHYPLMKTISAQQAISTLKYMVDGEVYF

SEQ ID NO: 7705 - protein, 558 aa, synthetic construct
MSKKIALYSRVSTSEQSERGYSIHEQEQVLIKEVVKNYPGYDYETYIDSGISGKDIEGRPAMKRLLQDVKDNKIEMVLSWKLNRISRSMRDVFNIIHEFKEHGVGYKSISENIDTSNASGEVLVTMFGLIGSIERSTLISNVKMSMNAKARSGEAITGRLLGFKLKLNPLTQKNDLVIDENEANIVREIFDLYLNHNKGLKAITTVLNQKGYRTINQKPFSVYGVKYILNNPVYKGYVRFNNHQNWAVQRRSGKSDKNDVILVKGKHEAIISEEVFDQVHEKLASKSFKPGRPIGGDFYLRGLIKCPECGNNMVCRRTYYKTKKSEERTIKRYYICSLFNRSGSSACHSNAINAEVVERVINVHLNRILSQPDVIKQIASNVIEELKQNHSKQTEIKYDIDSLEKQKAKVKTQQERLLELFLDDEMDSEMLKAKQSQMNEQLEVLDQQIKEAQQINQSQDDVPNFDKLKGRLILMITRFSVYLRKATPEAKNQLMKMLIDSIEITTDKQVKLVRYKIDESLIPQSLKKDWGSFFMPKFQFEIDGRNNYFIDQITTFTT

SEQ ID NO: 7706 - protein, 491 aa, synthetic construct
MKVLESYAVYVRVSTDRDEQASSVENQIDICRNWLERNGFNWDEKRVFKDEGISGTLFVDRPSIQLLLQKAKAKEINMVVFKSISRLARDLKDSLEIREVFLAHHVRIISVEEGYDSIKAGKNDMAFELWSLFSAQYSRTLSSSITAALAVKVRRGEHIGKVPYGYNRENQKLMINEEEAQVVQMMYKWYLEGWGYKKITNELNRLGIKSKTKKNWQMTSVQRILQNPIYKGTFILNQYTSVKVGGKKKQIRNPKEKWFVFPNHHPKIVEEEIWNQANRKKNNKNKTKITAWNEFRNLAKCAVCGSNMVIVQSHLKKKDGERTEWKYLKCSQYRRAGKHGCVNHVPIQYGDFRQFIINLLVEKGEFVTLRLQNTVEKGQEKKIKKLQQLMSTNQQKKKALLDLYLEELINKEEFEKKRHDLEAEITKANHELLVLQNSDAVQINIKTIKQAFEQLQHQEQDLLHVFQILIQKISIHQDGTVDIVYTFGKGN

SEQ ID NO: 7707 - protein, 525 aa, synthetic construct
MKTIRDVLEKGKKGAFYARVSSDRQTIDAQRHHVYEFIKNYECEIVKEYVDPGESAFKKKLIKRPQIMALLRDVEQGKYDFVITYADDRLARSEIEHVQIRVIMKEAKTDVILTSTGELYTERDIITQLIREGGTRYEVERISARTKDAYEQRTDYGQWMGGPVPFGYVQDENTKNFFILEDEKEIVLKIYQLYQNGEGFADIAKILNEQKAKTNTIHWKKERVKHILTNPIYAGYVTFGRLKPGSGNSIEGLSKWKMAKCEEIPPIMTKEEWLATFQMFEKKRNKELPPKQLKTEYVLRDLIYCKSCDAPLLPKNQETRGKNGKKYGIKKYMCSNKLCKVWFSTDELHALVFDSVIKEVTDKVISKSQTELMYEMEQILEKDIKQIKKEIQRLKKQVDNCLVWIKDAEREIDELYNQKKKLVEVNPKIDPLLDVMLDYRLHLLHEIRETEELIAKKEAKMKHIEDVDSNQSMLQKNVLQAFRIEFTNLQKDMKRVRQLLVYLIDKIIIDQNGKTEYILKINLEQ

SEQ ID NO: 7708 - protein, 548 aa, synthetic construct
MKVAIYSRKSVFTGKGESIENQIEMCKEYFSRLNRNDVEYFIYEDEGFSGGNINRPRFQQLLKDIKKNSFDALICYRLDRISRNVADFSTTLELLQEHNVDFISIREQFDTSTPMGRAMVYIASVFAQLERETIAERIRDNMLQLSKTGRWLGGVCPLGFTSEKITYVDSEYNERSMFKLSPLEEEMNVVRFIFSKYLATSSIHMALKELLASNIKGKHGGDFASMSLADILKNPVYVQSDSSIKEYYESLGVNFFGEPNGCGIMLYNKKNSKGKLRDMSEWIAAVGKHKGIISSSDWLKVQYSLDRNSKKNNPRQGTSVKALLSGVLKCSICGAPMRVCYGRLRKDGKRNHYYMCTMKAHSCKSRCENPNAKGLELEQEVINRLINYNEETLLRKLTSYADELKNSTPNDMIKNIDKSIDEKKAEMDTLMSQLGKTNNPATQNFILKKADSLSNEIMDLENKLNGIHKKKEQNSIEMRNIEIIMSSFSEFTKLCSTIKDVSNIEDENIKIALRNLINRLVSKISYNGFTKEVVIDIMGSQDNCSPSG

SEQ ID NO: 7709 - protein, 490 aa, synthetic construct
MKNIAIYIRKSVKGDDNSISLEAQTEVIKHYFKNENKFTIYKDDGFSGGNTNRPAFQKLMHDATQNKFKAVACYKLDRIARNTLDFLTTFNTLKEYGIDLICVEDKYDPSTPAGRLMMTLLASLAEMERENIKQRVTDSMLNLARSGRWTGGTPPFGYKVITIDGGKYLELEDKNNILYIFDEFINGKGILKLSSEFNCDKKKISRILHNITYLKSSTEANTYLKQTLKYEIVGTPNGCGYLPYGKNKVINGKKVKNIDGLKIAAISKHKAIIELETFIKAQEKLKTFEGRKAPRISNKSFLAQLIQCTCGSNMLIVLGHKKKDGTRKLYFSCPNKCGNTFGDVKEIEEDTLLTLKDVNFFEKINKNKPTINNKDSSRIKASLLKELENKKKILDGLVQKLALVDSDLANILIDKMETLNENIKELQSKIDLLEKEEISLSYNKEDLNLKEKNRKHFIKEFENMNMQEKQTSIRKVINKITWTGENIIIS

SEQ ID NO: 7710 - protein, 502 aa, synthetic construct
MNNKICMYLRKSRADEELEKTLGEGETLSKHRNALLKFAKEKKLNIVEIKEEIVSGESLFFRPKMLELLKEVEAKKYDGVLVMDMQRLGRGDMKDQGIILETFKNSNTKIITPQKTYDLNNDFDEEYTEFEAFMSRKELKMINRRMQGGRVRSVEEGNYIATNPPYGYDIGFINKSRVLKVNEYESNAIKLIFKLYLDGNGASFIANELNNLGYKTKLGNNFSNSSVLTIIKNPVYIGKIAWKRKDIKKSRTPGKVKDTKTRDKSEWIIADGKHEAIIDMNTWDKTQEILKGKYHIPYQLTNSPANPFAGLITCGVCGKKMVMRKARGINRLMCIYKCGNKSTRFDLVESDCFEALKEHLKNYTAEVENELIEENTNIYTSQISQLKKELTTLNNQRLKLFDLLERNLYDEDTFLERSKNINDRIETVSSTLKSIEKLLKKKSKSSYQEDIQFFQSVLDAYNETKDISKKNSLLKSILYKIEYTKLNGSKEHVIKVFPKLRK

SEQ ID NO: 7711 - protein, 500 aa, synthetic construct
MKMKSVLYARVSTEDLEQNNSYIQQQLYQDDRFEIVKIFSDKASGSSVDGRESFLEMLKYVGISKEGNNYFVEHRTEIECIIVANVSRFSRSVVDARLIIDALHKNNVKVFFVDLNKFSDDADIFLQLNMYLMIEEQYLRDVSKKVKAGMQRKQSTGYILGSNKIWGYNYVTKDDGKGYLVPHETESLMVKNIFKEYITGAGTRTLAKKYKLSSSTILGILKNTKYCGYMGYNLKSDNPTYVKSPFIEPLISTEAFEEVQRIIKGRCNSESGRGRRIKVRNLTGKIKCECGANYHYKQRETEWCCGREGVEGRTKGCGSPQFNTKLIIPYLEKNMDNIEKNLQFNLNREIKDINVGSFDRLNQRKEELIRQQDKLLDLYLDEDKLKNISKEMLERRSKLIKEEIEEVEEKLVILNDVNSHLNNLRRIKVEYKNEIKNIRRLIEEKNLDEIEKLISKIQLETIVNIINFRKELRIKEIQFSCFNELYNTNFIFAPEPKKVK

SEQ ID NO: 7712 - protein, 521 aa, synthetic construct
MSIPPNTKSAVVYCRVSSLRQLKEGHGLVSQETRCREFARHRGYEIAEVFRDEGVSGGMIDRPGMLAMLSFLRSKKSGGTHVVIIDDISRLARGLQAHIELRAAIGQAGGKLESPSIEFGEDSDSMLVENLLASVSQHQRQKNAEQVVNRMRARFMNGYYVFSAPAGYKYERVAGHGKMLVPDEPKASIIRDVLEGFACGRFASQIEIKRHLDSFPQFTMRCSEKVHLQRVKDILERPVYAGYIDAPKWGIGLTKGRHEPLISFETYGRIQERLNGRTKGGIRKDTSEEFPLRGIVCCAACSNPMTAAWSKGRNARYAYYFCHTKSCDQFRKSVRKEKIEGDFDELLDTLRPSEAIMTTLRLMVEQAWEQRIKGQAEGLAALKADRTLIERKLGQIMERLVEADSPALVSAYEDQIRKLQAQKVSLEEKLVRAETPEVHVHTGYRTALSFVANPRKLWDSEHLVERRMVPKLLFGDEMLYSRNEGYRTGGIAYPFRLLSQLSAGKYGLVGPGGLEPPTRRL

SEQ ID NO: 7713 - protein, 540 aa, synthetic construct
MRFDGGPTHNITRAVIYCRVSSKAQTKRGDGLGSQETRCREYARYKGYDVMRVFTDDLTGQRADRPGLLSMLSFLEADRRNPHVVIIDDLTRFARNVRVHFELRQAIAMAGGILESPSVELRDDADGELHEYILASVSQHQSRKNAEQTLNRMQARCMNGYWVFQPPVGYKYEKREGHGKLLVRNEPLASIVQEALEGYACGRFDTQVEVKRFLEGEPDFPKDLPDGQIRNQRVNDILTRVTYAGYIEVPNWDIPLRKGHHEGLITLETHQKIQDRLKGKVKAPARKDINEDFPLRGFVLCGDCGKPLTACWSKSKTGKKHPYYLCFNRACVSHRKSITRDRLEGEFEEVLHGLKPSTSLFDVAKAMFKRGWTIRLTQSGEKTENLKRDLLVIDKQIEQLVDRIVESDSPTAISAYERRIAKLEKEKLIAAEKLESGAAPLRTFEQMFELAMAFLANPWKLWASGHLEDKRTVLKLAFREQLAYSRESGFRTPKTSFVFKALDMFRMGTSEMARPKGFEPLTPRFVVWCSIQLSYGRVIA

SEQ ID NO: 7714 - protein, 604 aa, synthetic construct
MIKIIGYARVSTTKQDLSRQKLKIKEFCENNNYELIEIIEDFGISGVVADRKGYIELQSKTYKDADMIVISELSRLSRQEDVTETVYNIQQIINKGLSVILLDSPSKIYEANKLLDITEILILTIKAWAAAQERLDIKKKNQDGKQALFQAYPYAVVDQKIPYGYKAVPNPNGKRPKYILEEVPEEVENIKRLFALVNSGKTLGAVARYFNERNITFRGYYSTVAILSNYIHSDIYRGIRRRTQRLGREEPYTIEVRIKPIISEEDFMKAQELIKNNYKNTPTGKVNHNPLKGIIRCRCGRAMTVKDKKPAAGISKLTYRCSCVDRKSHPDFCKYNIDEVSYDLTNEILYSLFKSMHTAEYINFFRNQTDNRVTELQEEIAGIEKRLSTLYLDKENLSNESQENANKFLLTTNPTLLNIIQEKQNQLDEKIKSINKEIIRYKKSQSKKIADIERIKDNNGKEKLQNLSIEEQGELYHKYLERVNYIPVTTMQGYYIVQFLNGIKFYIAITKVRSIAMASLLLDNWTIDEKGIITANYDTLKSSDMKNFSIEMIRKTKTMTLQEYLKSDLAKERALHLDLSYRERYLEELHKAGLDGRLRPLKKE

SEQ ID NO: 7715 - protein, 527 aa, synthetic construct
MSKKKSKEKIIEYSKLEHKVAAVWTRVSTGKQADNNGSLESQKRICDEYAACKGIRIKEYFGDTNESAQTEGKLYRDMIEKVAKDKEINVILVASYDRFSRTGPEGIMTKAYLKAKGIYVVSATQATDPDSAAGTFMENIIFLFNQFENSLRRDKAVIGMTDCLRKGNWFSKPPLGYNKVKVEKDHILTVNETGRILRNAFIWKATEGIGDIEIVQRLKELGLSIDRKHLNKILHNPFYCGYIQHSLLGDEIIKGNQEILIDEATFNKVNGISNTGYEHKKITEPFPLKRHIICSDCGGYLTGYTVKARGKDYYKCNKKGCKSNHSTEKLHQKYINLLNEYNIPDEYIPILTDVLRKVFEEYNQNKGETKKVLLKRKTECENQINAVKVRLGLGEINNEIYTATMGELNSRLAEVKRGLEDAGKNLSNMMKYINQTIEMSCKLGSLWNDSNFVDRQKVQNLVFPSGIYFDKEKDDYRTENENEVFKIFRRFTETYKDEKEKATTDFARLSPSVGMRRLERPTPTSRT

SEQ ID NO: 7716 - protein, 549 aa, synthetic construct
MTIAYSYLRLSSKIQLNGQGKTRQLEASRQAAIENGWQLSEMTFEDLGVSAYTGKNVTTGAFNQILRLIESGVIKAGSVLIVENPDRISREGVNESAALMLQILASGVQIYTIFDKKLYSGSKDTALIDLLMWGVQAQRAYDESKTKSKRVRDARKRAREKARAKGKSSVTVLPSWLRRVKGEDGDTYEIIEEKANLIRQLFKLKLRGYGYVQMNKELEKMGLPYVHTATIVHYLKSQSVIGIYQPITKAEGEADVRIPVGDPIENFYPPIVDRETFFKVQAMFSKPQKGRIANKHFNLWRCRIKCKCGSTMHLQRVTKSRNKNDYEYFYLRCPKTALQACPNSFGGVDYPRFTKLALMSIDCLNWDALTNDSKLNDLVAKRTTLEGEKELLEKRIESLLDQLELTPSAFISKRLASLEEEYERINKELAATNHDVEVEESLEGMLKNESKGVECILGMSLEEISTLKPIHLDIWGRLDHLVMGEHEEGCPEVQVIDRDGAVVSTIRMDKKLTRATIESNYSQLAEVAIYDVRQVKKKIVDEAELVEDN

SEQ ID NO: 7717 - protein, 451 aa, synthetic construct
MRSVITYLRYSSAIQGAEGADSTRRQNDLFKQWLKKNSDAQVVASFSDEGLSGYKGKHLTGQFGDMLARIESGEFPEGTILLVESIDRIGRLEHLETEALMNRILGNGLEIHTLQDGLIYTKDALADDLGISIIQRVKAYIAHQESKQKSFRVSQKWEQRAKLALAGEQRLTKMVPGWIDPDTFKLNEHAETVRLIFKLLLSGESLHNIARHLQANNISSFSRRKDANGFSVHSVRTVLRSESVIGTLPASQRNDRPAIPNYYEAAIDAATFNKAQEILDKNRKGRTPASDNPLTINIFKGLFRCQCGASVHPTGTKNKYAGVYRCNNHLDGRCDVPPLKRKPFDKWMIDNFLGMIDVGNDGEAEGKIASLQHEVEIVTTRIKKATALLLEMDDITELKTQVKELNQKRTELQTTIDSMRRKTSLSDKGLPQLKDIDLEVAEVVNKNWPPS

SEQ ID NO: 7718 - protein, 507 aa, synthetic construct
MKRVISYIRFSSERQAKGDSLRRQSKMVTDWLKAHPEYYLDQDLSFRDLGVSGFTGKHLKGGLGDFLTAIEKGLVKAGDTLLIESLDRLSRQDVDQASELLRNILRSGVDVVTLSDGEHYTRESLRDPLALIKSILIMQRAHEESLRKAERIQAAWDAKKEAAKAGIKVSKRCPAWLKLNDDRKSFSVIPEKVETVKRCFQLRLEGKSIWEIVRTLNAEGHQTLNQYKAGKFGQTSVQDLLKNRSVIGYFTPKGCEEISGYYPAIIDETTFYKVQQLSYARYGRKPASDKPMAVNLFKGVIRCSECGHALIITGFSDTRNGIYRCPLRNENRCSAKGLSRKQTDGTLLALLSRLDRFDSDMTNTIDTLKLHREHISSNIEKLVQLSLEIEDLSAITSKLRQLKNELSQVDADIEKETQRLKSIDVGCLSDCDLTTKAGRIEAQLIIKSAVKEVVLNTAKRRCKVTFHNGKVIDLPITENPSDNVTEAIQSLSEVTERGLIDVDEVII

SEQ ID NO: 7719 - protein, 506 aa, synthetic construct
MRHVITYLRFSSATQGAEGADSTRRQNELFKQWLRKNSDAQVVASFSDEGLSGYKGKHLTGQFGDMLARIESGEFSEGTVLLVEAIDRIGRLEHLETEALMNRIIAHGIEIHTLQDGLIYTRDALSDDLGISIIQRVKSYVAHQESKQKSFRVSQKWKQRAKLALAGEQRLTKMVPGWIDPDTFKCNEHAETVRLIFKLLLDGESLHNIARHLQSNDIKSFSRRKDANGFSVHSVRTVLRSESVIGTLPASQRNDRPAIPNYYEAAIDASTFNKAQEILDKNRKGRTPASDNPLTINIFKGLFRCQCGASVHPTGTKNKYAGVYRCNNNPDGRCDVPPLKRKPFDKWMIDNFLGMIDVGNDGEAEGKIASLQHEVEIVTARIKKATALLLEMDDIDELKIQLKELNQKRTELQTMIDNMRRKASLTDKELPQLKDIDLMTKAGRVECQLILSKHLKGLTLGKDSVTVTLQNDTEITIPTNPLPLNDGSPIFEIADKELLDIDAYQL

SEQ ID NO: 7720 - protein, 528 aa, synthetic construct
MPAHIPQTPETAPTKALIYCRVSSSKQATEFHGLDSQEARCRSHALHMGYEVEAVFPDDVSGAGDFMRRPGMVALLSYLDAQPDRKNYVVIFDDLKRFARDTEFHIKLRKAFRMRGARIECLNFRLEDTPEGKFIETILAAQGELEREQNSRQVVQKMKARVMAGYWCFSPPNGYRYEKVAGHGKLLVRDEPLASIIKETLEAFACGRLESVAEVKRFLESQPAYPRDHRGEVHFERVAELLNRMLYAGYIEVPKWGMSFIPAKHEPLVSLATWQRVQERLKGTPKAPVRKDLNEDFPLRGFVCCASCNQPMTACWSKGRTKHYAYYLCDTRDCPDRRKSVRKEIIEGEFETLLAALKPSAHLFHAIYEMLRDQWNDRLARSEEMARAVAGELQRVEVKVRQLVDRVMGASTSALAEAYEARLRELHEHKAALSEKAASMGKPQASFAETYRTAFAFIANPCNLWHSPRLEDRRAVLRLVFAERLAYQRGSGYRTAQTALIFKLLGDKNMQMEEVVGPAGLEPATNPL

SEQ ID NO: 7721 - protein, 538 aa, synthetic construct
MSKSAPLSSTTLQSTSAVIYCRVSSAAQMQKGHGLASQETRCREFARMKGYEVVQVFTDEAVSGGLINRPGMQAMLSFLRANRKCGGFVVLLDDISRIARSIQVHLELRSAIAETGARLESPSIEFGEDSDSILVENLLASVSQHQREKNAEQTRNRMRSRLMNGYWPFIACMGYRHVSKPGEGRVLVRDEPLASIIQEAMEGYACGRFRSQAEVARFLERHNAFPKSAGGKVRYQLANTILTKPLYAGYVENPDWGVELRKGKHEGLISFETFERIQKRLKEGSYAPMRADISEDFPLRGAVSCACCGKPLTACWSKSKTGARHPYYMCFAKGCERKGKAIRRDVIEGAFVDLLDGMTPRQNLFDLAHAMFKRAWSLRLDQARAMKLFNDNEVAKIDKQIGVMLDRIVDALSESVIAAYEKRIAELERGKLLLAERRANIGRPKRTFEEMFEHACSFLASPLNIWKNPNPVARKLVLKLAFAERLQYRRDTGFRTPKTTLPFKVLGDFLSGERMMAEREGFEPSIRFPVYTRSRRAP

SEQ ID NO: 7722 - protein, 532 aa, synthetic construct
MIADLYIRVSTDEQADKGYSQRDQEERLRLHCDRLAITIDRVIFEDHSAKSFDRPEWKNYLQSFKRSRGYREERLILFTKWDRFSRNTSEAYQMIGHLKKNNILPQAIEQPLDLSIPENKVLLAIYLSTPEVENDRRALNVTNGMRRAIKEGRLMGIAPYGYVNKCTEDGRKYVAVKEPEASNIIWAFEQVAKGHLPTAKVRVEMNKREGKNISSNAFMVALRNVTYCGKIYVRAYKNEEEDIVPGKHEALISEELFLKVQYVLKKKGTKDLRLPGGRIINEERYPLRGLLLCPNCGKNLTASSSKGHTKHYYYYHCTTACGFRHHSDKVNKLFKEELSKYDFPTGVLEILKKIIVKNTKSTSENFDGERSTLKSRISELNDRISKARDMYLSDKIDEEDFRDIKNRYKGELDDLEYKLSLLVKSERKEGVEDKIGKALKIVGNISERYINASPIDKRAIVSLIYPEKIIFDGSDFQTSKINSFVDSIFLIRKELSKQKKGDLNSKNLNPRLVIPLGFEPRTHTLKVYCSTS

SEQ ID NO: 7723 - protein, 519 aa, synthetic construct
MKKITKIDTVAQVKPAKLKVAAYARVSTSSEEQLLSLENQKLHYEQRILANSNWEFVEMYFDEGISGTKIDKRNGLKRLLQDCETGKVDFILTKSISRFSRNALDCLEIVRRLIDLNIFIEFEKENINTQTMDGELMLSILSSLAESESRSLSQNTKWGIEKRFQDGTYKIGYPPFGYDWLDGAMVINKEQAVVVKDIFADILKGTSTGDIAEKLNQQGVTTKRRKTWHGTTIRGIIKNEKYIGDALFGKTFTDDSFKRKVNRGDKNQYFMEGHHSAIIDKETFEQAQQMLVQNAKSKNIVQEDDKYQNRYSFSGILKCGECGGTFKRRIQTKNKNEKYVAWACTTHLKDKHSCSMKFIKDEQIKLAFITMMNKLVFSHQILLKPLLADVRSTTYTVDNTQIVVLDDELEKLKQQQDNLVQFVANGYIDRPTFVKEQNQLTKQMDDLENKRKMLTVAISKGFDNLESLEELVKFTKQDQMLTSFEDTHFVIFVDEVVILSRTELVFKLKCGLKLKERLV

SEQ ID NO: 7724 - protein, 517 aa, synthetic construct
MYCMYLRKSRADIEAEARGEGETLKRHEKILFDLAKKMKINITKIYREIVSGETISARPVMQRLLTDIENGMWEGVFVVEVERLARGDTIDQGIVAQAFKYTNTKIITPMKIYDPQNEFDEEYFEFGLFMSRREYKTINRRLQRGRIESVKEGKYLGTIAPYGYKRKRLEKQKGYTLEIIPNEAKIVKLIYDWYTSSNRIGVSIIARKLNEMKIPTRKGGDWTTSTIRGILSNPVYIGKIRWNSRPQIKQVVNGEIIKKRPRANKKDWILVDGLHEAIIDDDTFNLAQKYLSENPTLPIPTRYVTKNPLAGLIVCGICGRKMNRRPYKNYPDTLMCVGPTCTNVSSHLYLVEKKLLNVLEAWLNNYKLDLASKEKKQESNLEIDIIKKSIKNLDKELETLNKQSNSLHDLLEQGVYSVETFLERSKIINDKINIVKTNKKELEEKLNKIYITEKNKKILIPKIERVIELYWKLKSAKEKNELLKEVIDKAIYIKKEGGRWSNKIDDFTLDLYPKLPE

SEQ ID NO: 7725 - protein, 547 aa, synthetic construct
MKLLVTYIRWSTKEQDSGDSLRRQTNLIDAFYSKHKNDYYLLPAHRYVDKGKSGFHQQHKNQGSDFRRMFENVMSGGIPEGSLIVVENFDRFSRADIDTAIDDVRQILRKGVSILTLGDGELYDKSALTDPVKLIKHIIIAERAHQESLVKQKRIAQVWNHKTQLARELKKPMGKQAPGWLELSDDGSHYIVDEDKASLVNLIFDKRLSGMSMFAICKWLNEQGYPTINQRKVRISKTKKPDGNWSALSVKHILTSRSVLGYLPVKLSTEDRKTVLREEIEGFYPQIVTDSKFYAVQQLLEETGKGKTSGGEHWLYVNILKGIVRCKCGLVMTPTGIRKPVYQGTYRCNGNKESRCNYGTVSRKLLDTQLCSRLFSKLSQLHNEATDTARLDELQRRLTTVDSELEKLTETLIQLPNITQIQEALRVKQEEKDELIAKLSREKARVKSVSSLDLSGLDMESVEGRTEAQIIIKRLVKEIVVSGNEKLVDIYLHNGNMIRGFPLDGKDDHTLTLEEATDEMQSLDDMLIFGEPVTRVYPAGDMEEVDA

SEQ ID NO: 7726 - protein, 534 aa, synthetic construct
MQQVAYSYTRLSSAKQLAGHGATRQRETIEKLCEARGWTLSDKSYDDLGISAYHAKNRTQGALGLFIEAVEQGVIASGSILVVESIDRLSREEVDRSLRLMLTLLDLGILIFTVSDHKLYRSGSPNAMLDIMTWLIVASRANEESVVKSKRIRDAKARHKAQARETGRIITRQCPKWLKVNHDKTQFIVDTAMAQTIKSIFKWYSEGLSLRSICDKLNAHGATWKPATITSLLVNRKVLGEFQPLVYGEDGKSNPDGDVVCDYYPRIIEDDLFTRCKLLRDTRKAQGRKSSEPYANLFKGLLRCTECGSGIGLSTDRNGGRVYKNLRCANRSATKCSAPRWKYEVVETMIVVALQNLPWDTGSHSASEALCASLRDSIDLLDAEYQGCTEKAENALEALIALPTNKMLQAKAETLDNQVQALSERLAKLRDDLEQAERVRLVETLDHVDMNLVLDSLYSDDEESRPRVNLMLHKQVSVISLTSLKDDPKLHGRIDIELTSGHTAGIEVWKGYSGYSVTLSDGTQYWSEIKHIAH

SEQ ID NO: 7727 - protein, 514 aa, synthetic construct
MKDNKGLAYLYIRFSTKKQEQGDSLRRQIEVAEKWCSENNIELSAQTYEDLGVSAFKEGGKRPALEDLIAAIRMGKIVRGSYLLIEDHDRLSRRGWRHTQELVHQLVLSGVRLVMLKDGKVYDSSNIDNIFDNIMLMLSAERAQEESERKSRLIKASREKARRDKKVTGKLPAWISRDGDGFTFNNKKATIQELINCKLAGKSHQSTAKHLNSLKMTTGNDSAWSASGVRAIIQNHALYGAKAYFDTGKDGRMNKEPIEIVSDIFPALITHEQYQVLNTRQQAGRTSKRGAYSRLLKCGDCGGAMTTRTSNYKGKPRAYKMCVRATEGSCNQIERIREPEVYLNQALHFLKYESSSTLYVSRTSEYQQRLETLNATVDLLTKNGNVDALARVYTDIKEVSDLIEESKAQDQNNVDVKVDFSLISNIEDVEQRNIELRKVLREIRFYCIEKVGQTSKWKVVIEQINGIKKSLVLDQQYGFGNTVVDYASLLTQGTEDNREPWEIEDSEECESYSY

SEQ ID NO: 7728 - protein, 646 aa, synthetic construct
MMALIPYARVSSGKQLDGLSMSLQGDSKLLKDLEKKYDTTVSDLVYNDEGVSSYKGKNVSHGELGRLLTDIERGVIEKGDIIVVRHLDRLSRLRLTGAMTIYNKIMEAGVLIHTTMDDRLYEPDDQIAHILATLAFNTANEESAKKSHLTNTYAAHRIQQFLSNEKPDNGTAYDIGIGRHPFWIEINNRVIQKGKHFTLARIMFEKAMQGYGVARLQKFALEQGLELSYSAVGKMFRSHTVFGDLHITHQGKKHTLKSYYPALATENEYYKVRAIKDRLTKESNAQRKHVSILAGMQKLYCGCCNSSVGISRNTKQDINYYSCINKLEKCYQPLRQDIIDNIVLNAIDIHIFNVDSTDTTVVDGLELEFSEKKKQHESAVERYMLLGDSAGDSAVNVIHQLKSELDDIQGKIETEKSQAASYAIDYDAITSFHDAMADYKAQQDKITEYVHGGSELKQEIKDVLKLILKRITIDHRHMITIEMLDGSISYLYLLRRKDGKRVHDRYYVPIKVHDKETVNIIRTSTPELVNWVTQSELDKLDIYYEDVTNPFLTIERNRHVRDLEQEFFDLLQGNVYEWKRAGIIKAGATTTQWQDFKDADVSKYGFTKAECTITTRHYTKQHKTIIYRDFNKSELANHFDCKRIEF

SEQ ID NO: 7729 - protein, 471 aa, synthetic construct
MTTVLYYTRFSSSKQRDGSSIERQLRLCDSYRLTHKLPSPNHTYTDKGTSAYHSKQLEGELGQLLHDLKNSVYQKPITILCEAIDRISRASIRDSQTIINSITEHADLVTVSDGKVYTHSDDSLETSLIQLVKSATSREESDKKSKRAKEYWATCKENGIAQNSVCPKYLKLNADKKGYTVKDDIADEIRGIYKLLKAGQGIKKAHQSFPSWSPSSIARLRKDERIVEHGIISDTDFWKVQSTLKTTRKSGAKNSKNLFRSLFECGECGSNLVYVAPRPSRPTWSGHLMCKNRQAKGRAACPNSKNINYNKFEPIFLDFLESVSSELFKSNLAEVEAKKSQLEALVMQHEQLETKVDNLYDALGESPTHRGKAKIDQVEAQLSKLESIKEKLEAEVQGYTDIQLEQPSTDLEREEFNTQLLHAFKSITVKYPTEDNLWFTFDDKFEISSDFTRWELIHIDTNEQPIVLEFE

SEQ ID NO: 7730 - protein, 514 aa, synthetic construct
MPTPQVRAIVGARVSKVQGLEKTSHLTQRDKGEAYAESQGWSVVGTFEDLDVSAIKLSPWDRPDLKQWLSDRPDEWDALIFAKTDRVFRSANDCVTLAEWCKNNRKILVLVDDGIKLDYFSPEDAKDAFAGAMSKVFLILASVFAEIEGQRFLQRARDRVAFIKQTDRWGQGNPPFGYQIIKHPSGKGKALDLDPETQKILHRIAAELLDGRSLMSIATRLNKDGVLSPLGHYRKRTGSDKGTDMRWTTSRVKWVLSRPIVQGLKMYKGKVVLDGDGEPVRVGPPSFDDEAWNQIQTELEKRSTGPRRKMFTSNPLLGVAKCRICGGNMQQVIKKNDDLTYRYYVCTRRPSPCPRVLVNADAAEELVSERFLAAHSQRRVKEKVWQAGSDHSAELEQTIATIESLREDRALGLFTSEADQQMYRQQMAALVAKRDALAELPVIKSGWIDVDTDRTYADVWETASVDEKRKMLTDAGAVLWVTNRNDYDTGDFDALLGEGDTGKEFLASTVLEQL

SEQ ID NO: 7731 - protein, 529 aa, synthetic construct
MTDFIVYGRVSTKTQLNDGKLGKEIQLSPVQKIVDDHNGRIVSQYFDEGLSAYKGEHMADGAGLKEICEDVRNGRYKKGTVLLMYSLDRFSRQEPDEATHYFTGLKMKEVSIWTYIDGLQKYDNEWSLFEAIIKLKAAHEESAKKAARLRDTWNKKFELLASGQAVKMTAYPFWIAFDEAARKYVYNDFAEIAVTVLNDYLNGVSRSLIVKRLNASHTPFYTKSKHPTKPQLWTRDHLKKLFNNTAVYGQFESKRNTVVIENVFPPLITKEQYETIQSMKRVRKAKQSDNYPNLFNGLLKCGYCGGSLTRRKSSNGSYSYLCVSAERCSRKKSIAAKLLDPKVLKYLQDLDWSFMNNDQDKKPFLEENIAQKQKDIAAIEGQLDSNFDEYLLQLRRKHVDERAALVLELEQYQVTQQSYDFDAQILLNAANDMRLKASKAMQLLIERIEVFTSGQIDLGVDPMDKKQVEQWKKRNKDAIYCDVYFHKWNEGKQESRMIGISHDYVADMTGTPLIIDKRAFDAFKKFKSS

SEQ ID NO: 7732 - protein, 530 aa, synthetic construct
MRKVYSYMRFSRPEQAKGTSIERQSHFAEQYALEHGFELDKSLTMMDKGLSAFHGVHKKKGAFGQFLAAVTAGKVKSGSVLVVESLDRLSREDPLIAQSALSDLILSGITVVTAADNQVYSREEIQQNPFKLIMSLVVMIRANEESETKQRRSNAFLKSALNQYQTNGKVRRLGADPSWLDFNKDDGTYSFNERIEVIRQILGLYNQGFGSLKIARRLTEENVPTLSGKRSAWGQTTVANIVKSHALYGMKRINVQGVDYDLEDFYPELITKSKWLALQQHRTKRSKSMHGRGETVHLITGHGKGFTTCGYCGGGLGAQTQKQYKRSGEYSKTVTRLHCLTHKETSSCCSSVFLEPIENAVLFAACIGVEPQSLVPTANNVNYSALIDDIENKVKHIVEQVAEGAPWHLFKDSHDRLNSEKQKLIKERDSQKPDVNQSDVQKWVEKLIELADKARADNKDARLKCRTLINSVCKSIVIQLRGHDLKSEPLITITFVTDEQFEFKVGKDGAVRFIDNDMAVNKRLKPLLTE

SEQ ID NO: 7733 - protein, 622 aa, synthetic construct
MFKPSPYPEVYSYRRFSNIEQEKGSSLARQDKYAYDIAEKYGLTVNKDLVLTDKGLSAFHAEHKTKGSFGVFLSLVKSKHVKSGSYLIVESMDRMSREQVFQAHATMTELITAGITVVVAKEGKVFNRKTMSADPLGTMLYAILEMQRSHEESLRKQGFSVDYIYQQVANFKDGLVSDVAGSLPFWLSRKPKPHPKVKTGFELNEHKITALMIVSLYLNERMGLGAIRQELRRLGIKSPTGKAIWGVSTISSVLANPTLCGRKVFTISYLKHGEAENENFDLHNYYPALISEGEYEAIQALKKRKYNAMSGDKSAVSDDALVYLLTDYGNKSFCSKCGKSIGSQPQKQKSRIRRRLNCSTEKESKNCCKSIIQDYLEDAFLVAVSRHIDYDLINKDIDSTAKLTIDEKIKEIDQQMNNILDTLTIISDGEKRATEKAKYQDLEKKKDELKKESGEFETYRISSESIKAFISNVQAARDYQNRDARLIVKDVLVKSIKKISVHMEAEPLSFYGYEKILDDCLVNVIDVEFYSGREISIFVSSNKDDSKLLFTRIHDDFVDDARGSYTSAQLDNWNEHGFDALLECLDEAQITNDPSDPENIWGGYDLAGALAEMVTEELIDSE

SEQ ID NO: 7734 - protein, 546 aa, synthetic construct
MKAVIYARVSTQDQALGFSLATQKELCEKKARALGALEVEVVEDAYTGTELNRPSLDYVRQLVAAGKVDLVVVYDPDRLSRNLTDLLILCREFDKAGVRLEFVNFDWQKTPQGMLFLQMRGAFAEFEHALIKERTQRGKAKKAASGKIRCYAKPFGYDWDAERDTLVINPQEAAIVKQMFEWLTDPLEPLTPWQITQKLGQVYPQGPRGKGWVHSSVVRMLKNPVYTGRLRRKDEQPDWKPVLVPAIIDQETFMRAQEMLARSKRFNPKTTRRRFLLQRLLVCGECGRRLTVVTHNNPQRAKYSYYTCPGRYPTKFDDQGRVGRCGLPPWRTEEIDKTVWDTIASIIKNPELFYQYITSEKLETASIPRRRLEEARKRLEQVQRVIERIDRAYFILEALPEEDYKRYRAEQEGELVRIEEDIKRLEAVINAQEQVQKGVEFLRQYAENLARSVDELNFFQKQNITRELVQRVKIYADGSLEIEGYFNIPFTGPGKNVSDHCEEPTTLTTQKNLKEPLSSSVLTCTHRKKGHPKVTEGIIHLTILAV

SEQ ID NO: 7735 - protein, 594 aa, synthetic construct
MKVTFYARVSSDSEEQKKSIQSQISYFNDYIERNGYERVEEGIFYRKDGTCELTEGYYVDEGYSGAKSYRHRKAFQEMMKDAKQRKFEMLFVKDIKRFGRNVRETLECIAELKKNNIGVYFDDIQANTLKKDDEFKINMFAALAEQESTSKSSSVHFGKMQGFKKGKWGGKKPYGYNIKEGKLVIKDEEAKIVKIIFDLYINQGMGLRSIAMKLNEQGIPTQSGKNVWDQSLISKLLSNKVYTGEIRNHRTRKTDINLNIIEKVPPEKQIIVQDESIRIIDDELFNRVQIEKDKRLKMHGNFNLKKTLVIHEDGSEEFVSKNTLKRSDTRYSNKHIFSNLLKCGNCGGSLRRKVQNNPTKTYILWFCRNNDQFGKYKCSERNLQHEQELLENIQEEIRAYKDLNIIWERYFSYYLYLKYETTESDESISELNEGLKKLENRRQQILDLYLEGKIEKEHYEVVYEQVNNDISDIKEKINRQVYKEKMISEDVLRFKHFIEKINSVDVDNLSNTTLREIFECIVINTKDGFRDYSLKWKFMGTSFDELDLALKENIRFRKKRIGIQNNGTVEEELSEEEVEAMMSEIELYAEPYLI

SEQ ID NO: 7736 - protein, 493 aa, synthetic construct
MRVAIYIRVSTDMQAEEGFSIEGQRSRLISFAESQDWVIHDFYVDDGYSAKDLKRPDMQRMLEDMEKKLFDVVLVYKLDRLTRSVGDLHSLLKTFDLYGVKFKSATEIFETTTAMGRFFITLVGAMAEWERGTISERVRFGVEQMVAEGRRPGGVVPYGYTQDEQLIPEEAALIREVRDLYMSGKGYKSVAMIMNRSGKLRRGREWTDATVAYTLENPYYAGIIRISSKTPAGTYVNSKRDERVKCVYGKGSHEPIFTQEEYEELKKFMKRKAQGGFSKVGEYWFSGVLRCGRCGAAMFGRMTTKRTTTKGTVRTQYYICSNRHHSKTCDLPIFRQTHIEHLVFQYINQIQEDMEKLNEEAMKIFADEGKKKSAIDSAKRELSKVAERREKWQYMFVEGLIGKQEIRKRMAEEDEREKEIRQRIAQEQKAFSGIPRIEELVGLAEGWAYFDDQEKKEIIHTVFDKIVVNTDLRKIKGVKNKFFDAYIQEISFN

SEQ ID NO: 7737 - protein, 564 aa, synthetic construct
MNMHSPDVAQRAALYLRVSTTRQAEHDVSIPDQRKQGEAYCASRGYRLIETFVEAGASATNDRRPEFQRMIEAGTSKPAPFDVVVVHSFSRFFRDHFELEFYVRKLAKNGVKLVSITQEMGDDPMHVMMRQIMALFDEYQSKENAKHVLRAMNENARQGFWNGALPPIGYRIIAAEQRGSKTKKKLEIDPLHADTVRLIYRLFLEGDGNSGPLGVKAITCHLNERRIFTRDGGRWGLAQIHSILTRTTYIGEHRFNTRSHKNREKKPESEVAVMAVPPLIDRETFDAVQAKLKSRNPMLVPARVTSGPTLLTGICFCAKCEGAMTLRTGKGSAGGMYRYYTCSTKARQGKTGCEGRSIPMDKLDDLIASHLEERLLQPERLETILFSLLDRRQERAERRREHLAELNRRITETDQRLNRLYDAIESGVAALDDSALKERIAGLKALRDQATADAERIQATLDSAGNQAITPDMIETFSSAARAGLRLEGGGYRRDHLRAFAQRVEVADTEVRITGSKSELLRTLVAASSVKSAAFGVRSSVLKWRTRHDSNVWPPPSEGGALSS

SEQ ID NO: 7738 - protein, 547 aa, synthetic construct
MKLLVTYIRWSTREQDSGDSLRRQTNLIDAFYAKHKDDYYLLPAHRYVDKGKSGFHQQHKAQGSDFRRMFENVMSGVIPEGSLIVVENFDRFSRADIDTAIDDVRQILRKGVSILTLGDGELYDKSALTDPVKLIKHIIIAERAHQESLVKQKRIAQVWNHKTQLARELKKPMGKQAPGWLELSEDGSHYIVDEDKASLVNIIYDKRLSGMSMFAICKWLNEQGYPTINQRKVRISKTKKPDGNWSALSVKHILTSRSVLGYLPAKISTEDRKTVLREEIESFYPQIVTDSKFYAVQQLLEETGKGKTSSGEHWLYVNILKGLIRCKCGLVMTPTGIRKPVYQGTYRCNGNKESRCSYGTVSRKLLDTQLCSRLFSKLSQLHDEATDTAKLDELQRRLNTVDSELEKLTETLIQLPNITQIQEALRVKQEEKDELIVQLSREKARVKSVSSLDLSGLDMESVEGRTEAQIIIKRLVKEIVVSGNEKLVDIYLHNGNMIRGFPLDGKDDHTLTLEEATDEMQSLDDMLIFGEPVTRIYPAGDMEEVDA

SEQ ID NO: 7739 - protein, 465 aa, synthetic construct
MKLRAAIYVRVSTMEQAEEGYSISAQTEKLKSYANAKDYQVVKVFTDPGYSGAKLERPGLQNMIKSIESKEIDVVLVYKLDRLSRSQKNTLFLIEDVFLKNHVQFTSMQESFDTSTSFGRAMIGILSVFAQLERDAITERMQMGAKERAKAGMWRGGPQSRLPFGYRYIDGVLLVDDYEAMIVKYMYTEFIKGTPLTKIQSKVAAKFPVKETLIYPSIMKNILQNNIYIGKIKYAGETYEGLHEHILDTETYDKAQQLWEHRNTNKKKYFESKYLLSGILYCGHCGGKMASTGAGLLKSGERVTDYICYSKKGTPSHMVVDRNCPSKRHRVNRLDPKIVELLKTITFEEMQKDNSFTDNTTTIKSEIESLDTKISKLLDLYQDGLVPIDVLNDRISKLNDDKELLQETLISQKKQIHPEEIAKNIQTAKDFDWANSDSAAKRAMVRALINKVELTNEDMKIEWNI

SEQ ID NO: 7740 - protein, 479 aa, synthetic construct
MRTALYVRVSTQEQANEGYSVGEQEERLKAYCIAKGWTVYKVYTDGGFSGANIERPALKQMLIDIKNKKVNAVVVYKLDRLSRSQKDTLLLIEDEFLKNGVEFVSMSENFDTSTPFGRAMIGILSVFAQLEREQIRERMQMGLDARAREGFWHGGGYDPIGYDYIDGYLQINEYEAIQVKKVHELFQKGLPIARIQKMMREKYTTKHGSWVNHSTVRNALTQPIYTGKIEWKGELYEGKHEAIIDEDTFNKSVKRYNEISWNKGDGKNKKRPFQAKHVLTGLVYCNHCGARYFAKGNYSGRGENRKYRPYYTCYSRAKSAKNMIIDPNCKNKSYATVDLDRIIFDEINKLAFEPTLIREIESDKPEKENNNAAIETRIKEIDKQVERLLDLYQMGTSSVDDVLSRMDKLNSEKQALTDELEVTEPEVPNLSQDEAEKLLVEASEILESDDLIKKRELVHSLIDSIEIDGEDIIINWAFV

SEQ ID NO: 7741 - protein, 506 aa, synthetic construct
MRTVITYLRFSSATQGAEGADSTRRQNELFKQWLRKNSDAQVVASFSDEGLSGYKGKHLTGQFGDMLARIEAGEFPAGTILLVESIDRIGRLEHLETEALMNRILGNGIEIHTLQDGLIYTKDALADDLGISIIQRVKAYIAHQESKQKSFRVSQKWEQRAKLALAGEQRLTKMVPGWIDPDTFKCNEHAETVRLIFKLLLDGESLHNIARHLQANNISSFSRRKDANGFSVHSVRTILRSETTIGTLPASQRNDRPAIPNYYEAAIDAATFNKAQEILDKNRKGRTPASDNPLTINIFKGLFRCQCGASVHPTGTKNKYAGVYRCNNHLDGRCDVPPLKRKPFDRWMIDNFLGMIDVGNDGEAEGKIAALQHEVEIVTARIKKATALLLEMDDITELKTQVKGLNQKRTELQTTIDSMRRKTSLSDKGLPQLKDIDLTTKAGRVECQLILSKHLKGLTLGKDSVTVTLQNDTEITIPTNPLPLNDGSPIFEIADKELLEIDAYQL

SEQ ID NO: 7742 - protein, 563 aa, synthetic construct
MLILKGDERLTTEQIMGLIGKINAIIYVRVSTTDQAEKGYSLESQIERCKERALTKFKYKESELIALVEPGGMGDDPNRPALNHALYLLEKGLGKKFIVLHPDRLTRDNTLQGIVSRKIWGMGVDIEFIEFEVDPTNPESMLMYNIQGSIAQYNKAKINANSKRGRVAKAKKGEFPSFKRLFGYKFNKETDLPEYDEEERQVLLEMKDMLLNRDMSSNEIAKELSKRGVPAPDGDTWYQATVSRILKNEDYTGDFYYGKSKVVQINGEAKQVPTPEEEWILIKIPPIWDHETRDQILNKLKENYKGRSRKTRDYLLKGKAKCGRCGSACGSGFTSKTKSGVYKYYSCRRKNAKAYQNGKKIIDCPGKNWRVDIVDDVFWKWFKKLLKNPTDFLEQFLSETSNEKKIEELQHKVNNLTKQIEEIDSEVSNYVILFGKGKINEDMFDKLTQPLEQKKEYIETELEIINSQINANKDVEDKNQKLKEYVSSFSEMVDKDLSMDEKRKFIDFFIEKVTLFDDDHMEIVWKGDGLNNNDDKVSLYNEGGAMKLNNSHKRLNYVQTYGG

SEQ ID NO: 7743 - protein, 479 aa, synthetic construct
MRYAVYVRVSTDKDEQVSSVENQVDICRYWIEKNGYEWDQNAVYFDDGISGTAWLERHAMQLILQKVRKNELDTVVFKSIHRLARDLKDALEIKEILLGHGVRLVTIEEGYDSYYEGNNDMKFEIYAMFAAQLPKTLSTSISAALSAKVRRGEHTGTIPFGYDRIDKKLIINDEEALLVKEMFDWYEDGRGYRMIANNLNKKGCRTRFGNLWSEASVKTIVTNSLYTGEHVMHKYKTVKVDGKKKTVKNPKEKWLVFENHHDAIISKEQWERINPVSDVKGKKTKSDYRNEFRGIVWCAHCGKRVRAIYAGVRSKYERVYMKCSTYKAYGTCVNHIPVRYEDFRNLILERLKQKQEYIETRLVAQIKDKLQEKIAKSKKTIKQLGSKKEKLLELYMDSFIDKETFVNRNRKLEDEMTAQELQLLKLKDKDIQNRETKDIQDAFMLLQEEQDLHKAFQKLIKKIVFNQDGKLDIEYTFDF

SEQ ID NO: 7744 - protein, 531 aa, synthetic construct
MARPRKPKAQQTGRGRPAGTEKAVLYARVSTAEQEKEGFSIDAQVALVREYAERVGLLIVEQYVDVETAKKTGRTQFEAMLKYLRGHPGVRHLLVEKTDRLYRNIKDWVTLDGFDIELHLVKEGTVLSRDSRSSEKFMHGIKVLMAKNYVDNLSEEARKGMLEKAKQGIWPSQAPLGYLNVVGPLGKKIIVPDPDLAPIVTRVFEWFETGDYALKEVTQKARAAGLRYRRSQRPVGISTIHYMLRNRLYAGAFEWAGRLFQGTHEPIVTRETWENVQEVLDGRSASNVRAEPLRFAFTGLITCGHCGCAVVAQMQRGRYIYYHCSGFKQKCPEKYVREEALAKAFSEQLARLHMDDEVFSLIERAIRESHTDKSRERVEAIARLRADADRLQHRLDTLYVDSLDGRISSDMHDRMAATWREERAVCLRRLDALHNAEDAFVDDGIALLNLARKAHSTFNLQSQNGKNIALNLLVLNSTWANGQLTVTFREPFDMLEKIVSGAPPAEPPTGSGGSGVSSWLPGPDSNRRPSD

SEQ ID NO: 7745 - protein, 529 aa, synthetic construct
MRKVYSYMRFSRPEQAKGTSIERQSNFAEQYALEHGLELDKSLTMMDKGLSAFHGVHKTKGAFGQFLAAVTAGKVPSGSVLVVESLDRLSREDPLIAQAALTDLILSGITVVTAADNQVYSREEVQQNPFKLIMSLVVMIRANEESETKQRRSNAFLKSALNQYQANGKIRRLGSDPSWLDFNKDNDTYSFNERVEVIRRILNLYNQGIGSLKIARQLTEENIPTLSGKRSAWGQTTVANIVKSHALYGMKRINVQGVEYDLEDFYPALITKSKWLALQQHRTKRSKSMHGRGEVVHLITGHGKGFTTCGYCGGGLGAQTQKQYKRSGEYSRTVTRLHCLTHKETSSCCSSVFLEPIESAVLFAACIGVEPQSLVPTVNNVNYSALIDEVENKVKHIVEQVTAGAPWGLFKDAHDKLKLEKQKLIKERDSQKPDVNQSDVQKWVNKLVELADKARANDKEARLKCRTLINSICKSIVIKLRGHDLKSEPVVTITFVTDEQFEFKVGKNGAVQFVDNGMAVNRRLKPLLT

SEQ ID NO: 7746 - protein, 655 aa, synthetic construct
MKPTIITYLRYSSKQQADGLSEFRQSEINRKFVEKFCAEHDVDLNEVISLKDLGVSAYRGLNLTLGSFSQTIKKFKSGEIKKRFNEDGEINTYLIVESLDRITRTGPFKSTQIFTELLEYTNIVVLADGEKKIYSKKSIDSTHGMMDLFMALISLQRSHTESLMKEYRSRKSWEKKREDLLNYFTLPEEERVGLERPKNATAMCPFWLTAKKDGRGYDFIPENKKVMDFLIEKLLDGNGMTRAVRLLNDEIDAGNLKPKLKKANRKTRHFRAAAYSGLFNSEISTVKGDYLLTESYYPTEDDVEQGKYPEKHLGKRVRKEVAVLKNYYPALMTESQAAYIRKMMDERRSAGTKPNKSIKNLAQGILRCPNCNSTYIKSKDRKNVYLRCNLAREGLCNAKVIKHGVFEHNLLQFCKGLNINKIISNQSSDQVIDSSLKELEQKMMPLKVKKSKLEDDIEQIVKNISSIKIPSLLEKVQDDYLKKENELKKVVQEIDLIETSIMKLQQQIAMSDGDNSLQELIDLTLDENADDEIRQRFNVELKKVVKSMTVLYRDTEDNPFGYHMISIQFLDGVHRLIPVHEKMTDKIHNILPYQDAVKVDSVDFSETVILPEDYVEGREKGKYPNLDGMAKYYQENPTKYLRLKHKMDQVHEIHA

SEQ ID NO: 7747 - protein, 644 aa, synthetic construct
MFNFDKSKYKGICVPYARFSTDVQDEIGRKSLERQIEEAKRFSNEYGLFFDEDIAFVDRGVSGFALSGDTAKTFQKGQMQLMLELLEEVDVAEREFIYITFHNFDRFSRMSPDVASRYFEQILDKGFNIVTTIDNEVYKRNSGNLEQMIISIIHMSTAYYESEVKSIYISDSRQRKRDVIEYLYNDEMQKGKHRHVGIKACCPRWIKTKDIFYEYVGKDGSVKKEALKRFEIDEERAKIINYIFDLKIQGLGNGKICQVLNEQNIPVFHSGKYTKAKYWNLSTISNYLKNENVIGHSYLYHKAKEEVFNEKTQTFSTKRVRKIATDKLYNYYPAIMSEEKFNQAKEAVKANSVKVDRSKSSEKPHMFSNLMRCSCGTRLHYKLTKKNNVKKVDDYFEYLKCERSALNDGCTGENINYKNFEAQFINFIRYIDVNEILDHANGVEAETEGLTELQEREAAINLKITGLTKTYQSLINAGVDGSDVLVELEKAKGELQEVEFEKSKLLNSMKSQTSSSSESIKQKKSALKSKVFAEKVEARRAVNELLKQKIRWMEVYATAYAKFVIVCFVDNVIRTYAYQDEFATDLMFNTIKINTDGLKGYEADELMVLMIKTVRESLAGMNEVITNTDLKIKLAAVKSEYMNK

SEQ ID NO: 7748 - protein, 664 aa, synthetic construct
MFSFDKSKFKGICVPYARFSTKGQSKIGKKSLERQIEEARRYAKSNNLYINEDLIFADKGISGFAQQGNIAKAFKKGQMQVMLALLEEVPYQEREFIYVTFHNFDRFSRMSPKQARTYFDLILQKGFNVVTTIDNQLYTRHDKDLGKMLISTIKMTTAWEESQVKSVYIKDALARKKKVVEYLYTHPSQKGKYKHIGVVQPNMPRWIDHEKIELTYTDESGSKRTDSFKKFTLNKEKAKIVNYIFDLKIQGLGYARICRRLNEEGIPTFDQGKHRIAKKWHVFAVQNLICNEMVLGHITLHTHNEEEYMCEIDKVFKKRKIKQTATEKLYNYYPAAVSEAKYLEAHKNTIQQDKPKKLGRIGERTNIFAQILLCECGGTLQYRRTKKNKKKSESVSVNEYLQCNNAFVNHKCNSQTINYTMLETAFFRYVNNIDFKKICSTTNSKHALKIIDLDTDIKELTDEIESLKLREAGLAKTYMSLASAGLDGSTALIDREKTKKEIAEKVLELENLELKKKGLEIEADKDNREFVDINDYMLNKDNYSSDEKIIIRKKINDFLHSKIEWMEVVSTERQKFVIIAFHDTVIRTFAFDDRCANDLMFNEIDVDLSGLNRVQASNLMFTLIKAIRNSLKGVEAVITKADLISYLQHIKQDYLNNIGEQASV

SEQ ID NO: 7749 - protein, 508 aa, synthetic construct
MKKAIAYMRFSSPGQMSGDSLNRQRRLIAEWLKVNSDYYLDTITYEDLGLSAFKGKHAQSGAFSEFLDAIEHGYILPGTTLLVESLDRLSREKVGEAIERLKLILNHGIDVITLCDNTVYNIDSLNEPYSLIKAILIAQRANEESEIKSSRVKLSWKKKRQDALESGTIMTASCPRWLSLDDKRTAFVPDPDRVKTIELIFKLRMERRSLNAIAKYLNDHAVKNFSGKESAWGPSVIEKLLANKALIGICVPSYRARGKGISEIAGYYPRVISDDLFYAVQEIRLAPFGISNSSKNPMLINLLRTVMKCEACGNTMIVHAVSGSLHGYYVCPMRRLHRCDRPSIKRDLVDYNIINELLFNCSKIQPVENKKDANETLELKIIELQMKINNLIVALSVAPEVTAIAEKIRLLDKELRRASVSLKTLKSKGVNSFSDFYAIDLTSKNGRELCRTLAYKTFEKIIINTDNKTCDIYFMNGIVFKHYPLMKTISAQQAISTLKYMVDGEVYF

SEQ ID NO: 7750 - protein, 559 aa, synthetic construct
MKTKLYSYIRFSSMRQNDGSSYERQIRMAREIAVKYDLELVNDYQDLGVSAFKGANSKTGALSRFLDAIGRSVPVGSWLFIENLDRLSRADIVSAQELFLSIIRRGITIVTGMDNKIYSLDTVTANPMDLMFSILLFIRGNEESQTKRNRTNSSALIKIKAHQENPQNPAVAIEEIGKNMWWTDTTSGYVLPHPVFFPIVQEVVELRRNGRSTAEILDHLNATYTPPPAASHKRHSNWSRAMIERLFHTRALIGIKEISVDGVKYELNDYYPRVLDDAEFYHLKKSIGVRACNFGDKEEVKPIPLLSGVGLLKCEHCGSAMVKVKGTNRRPNQYRYSCDAMRSSRIECVHTNWSFRGDQLEKAVLQLLADKIWIAEDKANPVPALKVQIDEISRKIDNLITLSAMTGATKELADQITTLNSERETLYNQIKMAEEEMYSVDSQGWEKLAEFDLEDVYNEDRIKVRFKIKQALKRIGCSRIDKYKNLFVLEYIDGKTQRVVIENSRGPRKGRIFVDLKTINDRQILESNGLVLHPCLDMLTDKNWKPEEEIPGPLQEFGI

SEQ ID NO: 7751 - protein, 480 aa, synthetic construct
MLRNRASLYVRLSKAAGETNASLEGMIKELRELCAKEGLREVALHVDDGLSGGFRDRPEFQKWVADARQEYADVLMTPHVDRLTREGLNVAASLLDVVEGKDSTTGRVIHHPVRLLDAKGIDSSHGDSFRFRFVLQAEVARSERERMRDRTRLSVRRLRRAHRWPGGTPPYGYKVIPNPDGPGNALGLDPDEAAVVREAARAVLAGDALTLVCRRLNHEGSRPRRAAEWSRVSLQRVLTGDAVLGRITVNGALLRDDEGEIETPYPAVLTVDQSVALREALAPDPARPKSSGRHPARLLSGLLYCHGCPSKMTVSRRSGGVVYRCQTRSQGGVCEGPVSVSAPLIEDYVTGVYLDAAGSLPYLREEVHVSNASELALVESDIAEAVRLLASEATAEGFARLQQLQARKAELANQRPERLVTFVDTGKLTREVFETALVDDQRAMLSAAFEEIVIGPGQRGPKRLSPERVTIRWAADEPDV

SEQ ID NO: 7752 - protein, 497 aa, synthetic construct
MKRAVLYLRLSSISEDSTSIERQRADLQGLAEREGWDVVETLTDDGISGRKARANAAAALRMLRDGEADVLAVWKLDRWTRQGLGAIGALADTLDATPGATFVAMQDGLRSNQPAWRLIAAVLSEVARTEADNTAKRVASSIAHRRTVAHRYTGGATIPFGFDSVPAPDGVGRVLVHDPEEAVVVREIARRLLESDVSLTKLAIELTARGVPTSRSPKRRARKLGKPDAGLDAGLWRAHTVKDLVTQDLALGRVTHRGALVRDEDGLPATVWEPLLDRATVERLRARYADAKRGPVTRVARKARLLSGVAFCGHCDSKLWVSTQGSRPIYQCAKPREYGECTGYPRVDAVNLEALVVSEFLAFRGPFPEMREEQTVDSRDDSADLQDVEAALREATAALLEDDADPAALMRRIDALKARRTELRASAASATVTTRLVPTGRTLADAWHADEDLDRRRAVLLEALDHVAILKSTSPDRRSRALDRERVVFRWSDEVEV

SEQ ID NO: 7753 - protein, 561 aa, synthetic construct
MSKEKIKVYLYTRVSTSIQIDGYSLEAQKSRMKAFALYNDYEIVGEYEDAGKSGKSIEGRIQFNRMMEDIKSGKDGVSFVLVFKLSRFARNAADVLSTLQTMQDFGVNLICVEDGIDSSKDAGKLMISVLSAVAEIERENIRVQTMEGRIQKAREGKWNGGFAPYGYQLVDGKLFINEEEAVAIRTIFDQYVNTTIGANGLSKYLENHGIRKIPRQNGKNPLFDAGLIRKILKNPVYNGKIAFGRRTLEKVHGTRNEYKQVEQDEYLIAEGIHEAIISDELWQAAQVKLKSQAKKYEHVNKGKDIRTHLLSGIVKCPVCGVGMFGNKCIKKRKDGTKYKDFYYYGCKHRQMMRGHKCTFSKQIREELLDDAVAEVIIKIVSNPKFASMMQEKINMKVDTSEIEKEIDNYQKELRKSHSTKFKLIEEIDNLDADDKHYKRRKQDLDDRLYRMYDKIEELESFLIDAKAKKQTIEAEKLTGDNIYKVLIYFDKLYKVMNDVERRQLITALISEIQIYEEKQPNGQWLKSITFKLPIIDEDLNIGLDNDEQVETVVLMSKVGVE

SEQ ID NO: 7754 - protein, 522 aa, synthetic construct
MGNVMVIPAKRQVGNTVKQSEQKKLRVAAYCRVSTDSDEQETSYEAQVTHYTEYIQKNPDWELAGIFADDGISGTNTKKRDEFNRMIDECMSGNIDMIITKSISRFARNTLDCLQYIRQLKDKNIPVYFEKESINTLDAKGEVLLTIMASLAQQESQSMSENIKLGLQYRYQQGKVQVNHNRFLGYTKDENGNLVIDPEQAEIVKRIYREYLEGSSMDKIASGLMADGILTGAGKEKWHTSTINKILRNEKYMGDALLQKTYTTDFLTKKRIKNNGTVPQYYVEGDHEAIIPKDLFMQVQAELVRRRAVHISPTGKKRGFSCNHCFAQMIFCGDCGELYRRVHWNNHGCKSIVWRCISRLEPSSAEMNCTNRTVNELLLQEVTVKAINQILTESDTFLKQLQANIAKAVVSADTLSPDGIQARLEELQKELIKKANNKQDYDAIADEILRLREQKEQSEVDSHHREETMNRIKELQDFISKQRTDITEFDEALVKKLIEKITVFADRFTVEFKSGLAIEIEA

SEQ ID NO: 7755 - protein, 519 aa, synthetic construct
MKKVTKIAETANSKVKLKKVRVAAYCRVSTDSDAQLESLEAQKTHYENYITSRDDWEFAGLYYDEGITGTKKDKRPELMRLIGDCKAGRIDFIVTKSISRFSRNTTDCLELVRNLLDLNIPIFFEKENINTGSMESELFLAILSGMAESESVSISENSKWSIQKRFENGTFKCSYPPYGYDWDGEQMVINPEQAAVVKEIFAALLSGKGTHAIADDLNRRGVSSKRGGRWTATTIRGMLSNEKYVGDCLFQKTYSDSQFVRHNNHGEQTQYMVTDHHEPIISREDFEAARIFISQRASEKGVTKGTDKYQNRYAFSGKIICGECGDTFKRRIHSCTDHKYIAWCCNTHIKDKDRCHMLFVRDDALKQSFTTMLNKLIFSHRQILKPYLESLKTSSPDDSLHRIQQIQTLLAQNTEKRETLTMLMTQGIIDPVLYSQETNELLSQADSFRDEIEALKNEVSGDVNKVTETTALIHFAEKSAMLQEFDKDLFDRYVKRIIVHSRNDIRFELKCGLTLRERK

SEQ ID NO: 7756 - protein, 483 aa, synthetic construct
MAREIIRIPASKRMAGKQVTEKKKIRVAAYCRVSSEQDQQLNSFENQVAYYTEYIEKNPDYTMAGIYADEGISGTNTRKRSEFNRMIEDCKAGFIDMIITKSISRFARNTQDCLHYSRMLKDMGIGILFEKEHVDTTAASGELLFTILASLAQDESRAISENVVWGKQSLFSQGKWSMCTSRFYGYDKDEEGNLIKNPEQAKVVKWMYSAFITGMNPDIIARTLNEKGIPGALGKPAWKVSTVKQTLRNEKHMGDVYLQKWYTPDFLSHKIAKNEGQLPMYHIKNDHEAIIDKEIWEAVQIELDRREAFMKEHKLTTLGQFTDKRPFSHKVICGCCGHTYSRRTLTRSWGKVITWECGQRYREKGKRHCVESDVLYERELFDGFVAAWNKILSRRKTNMRKWERMLNSENALERVRAKQFIAITDGMEPLTKMDISLVSKVFEHCIYHSSGDTEYHFLDGTVIIIRTKSVRNKAYFLKSIFPE

SEQ ID NO: 7757 - protein, 539 aa, synthetic construct
MKVQKIETRKRELQKKRVCAYVRVSTDSNEQEDSFVNQTVYFRRFITANPAWEFAGIYADQGITGYSENRPQFQKMLQDARKGRIDMIVVKSVSRFARNTETVLKASREMRELGVAIFFQLQNIDTMTQEGELMLTILAAFAQAESESNSSNVRMTIRNKFKRGEPYFNLSRLYGYTEDENGEIIIDEEQAKTVRLAFELSEKGIWASKIAGYLNEQGIPSPKGCKWGGGQIRKMLRHEAYKGDRILQKTYNDGHRKTCKNTGELDQWHLTDVHPAIVNRKQWDAVQKVLDDRSQAYAHKIPVKSIRHSNQSTYPLSGKLFCPYCGCKLYHKWNQDQSFEYWMCSTRLKWSPESCPGVYVPAKFLKGWEGIDEELVVVQYKDEYGMDRVEAYPKIEWEQDHTYPNEFHRPEKSKKKKTQKRNVVRRKHPEKPESGKNRYTRNTYLHSGKLFCPYCGEVMVHGFTGGVPYWKCKTAKNWYKSQGKRCQMRSLPAEISDTWGELKKPVTVIPFTDDIGNSFFTYMDKEEYEASDECPYGKD

SEQ ID NO: 7758 - protein, 559 aa, synthetic construct
MKTKLYSYIRFSSMKQADGSSYERQKRTAKEIAAKYDLELVTSYQDFGVSAFKGANSRTGALSRFLDEIGRSIPVGSWLVVENLDRISRQSIIEAQELFLSIIRRGITIVTGMDGKVYSKESVNANPIDLLLSVMLFARANEESQTKRNRTNSSALIKIKAHQENPQNPAVAIEEIGKNMWWTDTTSGYVCPDPVFFPIVQEVVELRRNGRSTAEILDHLNATYTPPPAASHKRHSNWSRAMIERLFHTRALIGIKEISVDGVKYELKDYYPRVLDDAEFYHLKKSIGVRACNYGDKEEVKPIPLLSGVNLLKCDHCGSAMVKVKGTNRRPNQYRYSCDAMRSSRIECVHTNWSFRGDQLEKAVLQLLADKIWIAEDKANPVPALKVQVDEISRKIDNLIALSAMTGATKELADQITTLNSERETLYNQIKMAEEEMYSVDSQGWEKLAEFDLEDVYNEERLKVRFKIKQALKRIGCSRIDRNKNLFVLEYIDGKTQRVVIENSRGTRKGRIFIDLKTINDRQILESNGLVLHPCLDMLTDKNWKPEEEIPGPLQEFGI

SEQ ID NO: 7759 - protein, 511 aa, synthetic construct
MESIAYLYARFSTKRQEDGDSLERQTLAAQEWCARNSVKLSDKTFEDLGVSAFKEGTRPALSEFIQATQTGRVHRGSFLLVEDDDRLSRRGWKVTQDLMHELVNLGITVVLLKTGRKYDADNIHDIGDNIILMVNADRAYKESERKSHLIRAQRKRARENRKVTGKLPAWIVRADTETGFDFNDKISVIRELIEVRSQGHSFQYVAKQLNAKNYTTGTGAKWSASGVRSIIQNHALYGAKAYFDTDKSSGRMNKHPIDIALDVFPLVINFEQWLSLQQKSKTGKGGRTSKRGAYSQLLRCGNCGSGMVQRTTTYKDQKRLYRKCISAVEGKCTQVEAVREPEIYLDKVLKDLTYKVIESGFVSKTPELKQQLETLEKTQDILIQNGMAEQLADLYVKMNEIKSLIDKSMEADRKSAEPVETSFSKILDIHDSTKRNIELRKLLDSVTFVLHAKVKTRSQWHVIIKQMNGYETSFLLDQKHGFGNTKIKFVANQEKLAKLESLTPEMEPWEQ

SEQ ID NO: 7760 - protein, 580 aa, synthetic construct
MVKIAAYARVSTSSEFTNQKNSLKTQIEYYQSYANDKEEMELYKIYHDSLSGTGWEKRKGFREMLYDAGLNIGVTEAGTEVLELSNRRPLFNRIVTKDISRFTRNVADDRIFKLLKDKGVYVDFTNAQLSTEKSSEEMMLQILATFSQRESKDRSEKVMFGLTESAKKGHIRMKDNLYGYRLNKELNTLITLPDGTKALTNTLEIIHKEAEVVRKIYQLYIEGNGLRKILQYLETSNILRDGKHFSQSTINRILCNPMYKGTLVRNKLAAPLVFSNKKSATLKDEKEWNTFEDRFPAIVDEETFEKAQHARLGRLNQNRKGIKTQYGKYSGKVICKNCGKSYVQNTDKFGKLFMNCATKKAKGSKACSAKNIKNDWLDEAVNAFLGTSIENSILLFKNSYIYELKNFKLELYGGIDNQKLEEAEKLKLKIEEVAERKIRLGTLYVMGNFDEITLKEMATQLDIEHRILTEKYQHCILSNEGIEEAIKEIDDTINNIKRFSLLNELTDENDLMSQISKIYIEETHGTIYLKDDMSSDSDSKHKLHFLFEFKLFERLNKIVEKYKAIGKIHTDNIITVSREL

SEQ ID NO: 7761 - protein, 506 aa, synthetic construct
MRSVITYLRYSSAIQGAEGADSTRRQNDLFKQWLKKNGDAQIVASFSDEGLSGYKGKHLTGQFGDMLARIEAGEFPEGTILLVESIDRIGRLEHLETEALMNRILGNGIEIHTLQDGLIYTKDALADDLGISIIQRVKAYIAHQESKQKSFRVSQKWGHRAKLALAGEQRLTKMVPGWIDPETFKLNEHAETVRLIFKLLLDGESLHNIARHLQSNGIRSFSRRKDANRFSVHSVRTILRSETTIGTLPASQRNDRPAIPNYYEAAIDASTFNKAQEILTKNRKGRTPASDNPLSLNLFKGLFKCRCGASVHPTGTKNKYQGVYRCNNHLDGRCDVPPLKRKPFDRWMIDNFLGMIDMGNDGESERKIAALQHEVEIVTSRIKKATALLFEMDDITELKTQVKELNQKRTALQTTIDSMKRKALLTDKKLPQIRDVDLTTKAGRVECQLILSKHLESLTLDEGFVTVKLQNGTKIIIPTDPLPLNDGTSIFEIADKKLLDIDVYRL

SEQ ID NO: 7762 - protein, 512 aa, synthetic construct
MIVAIYVRVSTDQQAEKGYSLDTQLSECRKKAHELPNALSVEEFIEDGYSGAYLERPALDRMRNVLREKRFGAVIVYDPDRLARNLTHQLLITDEIESSGAQLHFVNFEWQNTPEGKLFYSIQGAVSAYEREKIRERMQRGKRGKALSGKVIANNRPYGYSWDAENSIYTINSKEAEMIRQIFSWVVDDHMGIRAIATRLAKLQYPTRTEKNSWSMGTVHDIIRRETYAGIHWVNKEYKTKIGQNKFKRGTRKPSEWIAVPVPAIIPRETWEAAQRQLQINKRITKQPFDYQYLCRNLIVCPLCGQHMRSVLSGGRRKPYYVCKTGRSISGKFNLVSTEKCPARQIPAKDLDESVWVYISGILKNPEIMSDELSKSNKQEDNNSLQEAILRLNAKEERLHQERDKVTLLFRQDLIDLSMVEKQLTEIKNSLANIKTQRKILEKDLEDSFSPIRPDNLMAKFKDLVLLADTEDPNLRRHVILSVVKKIEAQRIDQRNVGLSLGAEIKTNITFG

SEQ ID NO: 7763 - protein, 505 aa, synthetic construct
MIAKWLLDHQDYELSKLNYSDLGKSGFHGEHVKEGGNFGKLLKAVMDGYIKRDDVVLVEAIDRTGRLPALQMLSDVIAPILRAGVSIITLDDNTTYTEASVGGPHLFMLVAKIQAAHEYSRTLSRRVEDSYKKRRKDAKEKGVAPKRMTPVWLNSDGTVREDVAPWIKTAFELYVSGVGKSTIAKRLRESGVDRLAKTSGPSVEGWLRNKAVIGKWETLIGTPEHHVIDDVYPLIIEPSLFYKAQVHAEKMKTQRPVKTANHFLVGLVRCGACEKNYIVQNLHGKPHSMRCRTRQSQNDCTNSNCVPKPVLDAIYRYTSVTAAVEAVQQQQMGVNEKEIVTREAELLTLAKRVEGLAEAVKQAGPMPELIEALKQSRIAREAAENALVILRSTVVAPAGTGWNEMGKVWKLEADDAQRLAAMLRMVGYHITVQTSGEITSSHSDVLYRYIGVDRALDKYKLLVNGKLALIPKGYVDDYPYHEPFQEVEGEMTWNETDYENLRLQY

SEQ ID NO: 7764 - protein, 595 aa, synthetic construct
MATAVIYLRVSTKGQATRGNEAEGFSIPAQRDACERKTQALGATVVREFVDAGESARSADRPELQRMLKYLAANPTTYVIVHKLDRLARSRADDVQITLAIQASGSTLVSVTENIDSTPSGALLHGIMSSIAEFYSRNLANEIMKGTKQKALSGGTPTIAPIGYLNVRETVNGREIRTIRTDPDRAHHIRWAFEQYATGDWTLRTLSTALNSRGLSQRPTPNRPARPLPTNKLHKVLRNRYYLGYVTWQGIEYPGSHEPLIDPATFDQVQHTLTAHQRSGERSSRRKHHLAGSLYCGRCNSKLIYAVSTGRHGGKYGYWFCIGRHTLRNGCHLPYLPEERVEAAVAGLWHTTQLPTATIETIRASLTDDLAVYGAHTDQELTLLNRRIKEVERERLKWADLAMDGTVPRDIARDKQAALATQLGQLEHQRTSLTSTNIDHTEVINTALDLLGRCSDAYEHATEATRRDLNQAYFERILLDSTDGEPIIKSAEQTEIIELIATAEREPELTTSGKADLALTTYSTVKGSKIASLVELRGLEPLTPTLPVWCATSCAIAPCLVVCSDEVTPRRRALKISTLRAADILCYFLHTPNLR

SEQ ID NO: 7765 - protein, 518 aa, synthetic construct
MDRVCMYLRKSRADLEAESRGEGETLAKHKKALLKTAKQLNLNIIKIREEIVSGESLMHRPEMLELLKEIENKQYDGVLVMDMDRLGRGNMQEQGLILETFQKAKTKIITPRKTYDLSDEWDEEYSEFEAFMARKELKIINRRLQGGRIRSIEEGNYIATLPPYGYVIKDLDNGRTLEPHPDQAPVIKMIFDWYTNSDHSRRLATGHIANELNSLGYKTYTGKSWTGNSVLNIIKNAVYAGRLQWKRKEIKKSITPGKVKDTRTRDKAEWIDVLGKHEPLISMETYQKAQEILKKKYHVPYQLLNPVRNPLAGLIRCGHCGAAMVYRPYTRQAAHLMCSNKHCHSRSARFDYVEKRVIEALRMWLEQFKANWEAYTPKEDKGTEMLDIKRKSIILLQKELEEMEQQKNRLHDFLERGVYDEETFLDRSQLLSKKTNDIRLSIEEIKVDLQLENKREEAQKNIIPIMENVLDVYYKDDDAERKNVLLKTVLDKAIYKKEKHQRNDDFELVLYPLIKPFI

SEQ ID NO: 7766 - protein, 490 aa, synthetic construct
MKVLESYAVYVRVSTDRDEQVSSVENQIDICRNWLERNGFNWDEKRVFKDEGISGTLFVDRPSIQLLLQKAKAKEINMVVFKSISRLARDLKDSLEIREVFLAHHVRIISVEEGYDSVKAGKNDMAFELWSLFSAQYSRTLSSSITAALSVKVRRGEHIGKVPYGYNRENQKLVINEEEAKAVQMMYKWYLEGWGYKKITNELNQLGIKSKTKKNWQMTSVQRILQNPIYKGTFILNQYTSVKVGGKKKQIRNPKEKWFVFPNHHPRIVEEEIWNQANRKKNKKNKTKITAWNEFRNLAKCAVCGSNMVIVQSHLKKKSGERTEWKYLKCSQYRRAGKHGCVNHVPIQYGNFRQFIINLLVEKGESVTLRLQSNVEKEQEKKIKKLQQLLSTNQQKKKALLDLYLEELINKEEFEKKRSDLEAEIIKADHELMVIQKGNHVQIDIRTIKQAFEQLQKQEQDLIHVFQTLIQKISIYQDGTVDITYIFENS

SEQ ID NO: 7767 - protein, 525 aa, synthetic construct
MKTIRDVLEKGKKGAFYARVSSDRQTIDAQRHHVYEFIKNYDCEIVKEYVDPGESAFKKKLIKRPQIMALLRDVEQGKYDFVITYADDRLARSEIEHVQIRVIMKEAKTDVILTSTGELYTERDIITQLIREGGTRYEVERISARTKDAYGQRTDYGQWMGGPVPFGYVQDENTKNFFILEDEKEIVLKIYQLYQNGEGFADIAKILNEQKAKTNTIHWKKERVKHILTNPIYAGYVTFGRLKPGSGNSIEDLSKWKMAKCEEIPPIMTKEEWLATFQMFEKKRNKELPPKQLKTEYVLRDLIYCKSCDAPLLPKNQETRGKNGKKYGIKKYMCSNKLCKVWFSTDELHALVFDSVIKEVTDKVISKSQTELMYEMEQILEKDIKQIKKEIQRLKKQVDNCLVWIKDAEREIDELYNQKKKLVEVDPKIDPLLDVMLDYRLHLLHEIRGTEELIAKKEAEMKHIEDVDSNQGMLQKNVLQAFRIEFTNLQKDMKRVRQLLVYLIDKIIIDQNGKTEYILKINLEQ

SEQ ID NO: 7768 - protein, 531 aa, synthetic construct
MKEIIKIDSTMRKTGFEKKTRVAAYARVSSDSDEQLLSLEVQKEHYENYIKSNPCWEYAGLYFDEGISGTKIGKRESLKQLLKDCQSGQIDRIITKSISRLARNTVDCLEIVRKLTGLGIYLYFEKENIDTEHMSSELMLSILSSIAQSESKSISENNTWAIQKRFENGTFVISCPAYGYKNENKKMIIVPEQARVVKEIFNMALSGMGGEAIARVLTDKKIPTKKGGSWTSSTVNAILTNKTYTGDVIFQKTFTDDNFNRHKNCGEKQQYVIENHHEAIISHETFNLVKEIIAWRRSENNIVCGSGKYNKLYAFSGKIRCGECGSKCKRRIIYQHNKAYGIWVCITHLEDIHACSQKSVMESYLKISFLQMLNKLKAGYVQMLTPLVESLRGVNNKDGLNKVIELEEKIAKLQEQEQVLSKLLAGGYIEMDSYYLESNQLKTEMDTCLKEKLKLSNSLNGNLTHLNEVQKLQRFVSVTEVFSEFKDEDFLDFVDDVVVKSRTRFLFILKCGLELEEEVKETWHASHMVTE

SEQ ID NO: 7769 - protein, 525 aa, synthetic construct
MNANVTIIPPRKIAGNTVDKHEDKPRLRVVAYCRVSTDSEEQATSYDTQVQHYTDYISRNPLWEFAGIYADDGISGTSTKKRVGFNDMIHDCMSGKVDMVITKSISRFARNTIDCLKFVRQLKDKNIPIIFEKENINTMEASGELLLTIMASLAQQESASLSQNVKLGLKFRYQEGKVQINHNWFLGYTKDDEGNLVILEQEAKVVRRIYREYLEGASLRDIAEGLEKDGIKNGAGHLKWNLSNIKGILQNEKYIGDALLQKTITTDFINHVRIKNDGTEPQYYVKDSHTPIIPRDIFFKVQEEMVRRANMFSGEENKKRRVYSSKYALSSLCVCSKCGDIYRRIAWNNRGVHSVVWRCCTRVENGPSACDAPTVKENELQSAIVKAINKVFSIPDEVLDTLNNNIREIIAGNNLSEIETVDKKIADKQATLLTLLKAKKDYTKIADEIDELKGKKQQLLIEKAGQEDAKRRIREMEDFLKNERHDISEYDEKLVRKYIKKIKVYEDKFSITFKSEISVDIERAS

SEQ ID NO: 7770 - protein, 521 aa, synthetic construct
MKVPVWCYARISTLKQIDGFGIQRQINTINQFLQCVELDHRLPFTLDVDNVTQMVAEGKSAFRDKNWNEKTKLGQYRKMVMDGVISDSVLIVENIDRLTRLDPYMAIEIISGLVNRGTTILEIETGMTYSRYIPESITVLVMQCNRANGESKRKSIMMQKSHANRYGKVSKVRPRWFDVVEIDGIKQYRPNETAKAIQRMYNDYINGIGAAHIVRTYGNTDNGKAWTLVTVLRALSDKRVADDARYPPIIDKKIYDSVQALKAATNKKGNTHQKNMLNIFSGMSRCPVCNQSIIVKRNSHGNLFTVCLGKRTNKTCEARSISYFALERPLLTAIRGLDFSEVYKHEDKNVLTLRDQWIQNERDIAAFRERLSKASRYEKFVILDELETMNREQEELTIRLKSVDVPKDIQLTFDDDKLDLDTNYRIELNNRIKKLIQYINIVREDVTKSSYTIYCTIKYWTDVISHLVIIDVNIKRTGTGGTNTLTTTLRSVSSLNMDGTVSGNPDSDAWEYWKSFLDNLK

SEQ ID NO: 7771 - protein, 506 aa, synthetic construct
MRHVITYLRYSSATQGAEGADSTRRQNELFKQWLRKNSDAQVVASFNDEGLSGYKGKHLSGQFGDMLSRIESGEFSKGTILLVEAIDRIGRLEHLETEALMNRIIAHGIEIHTLQDGLIYTRDALSDDLGISIIQRVKSYLAHQESKQKSFRVSEKWKQRAKLALAGEQRLTKMVPGWIDPETFKLNEHAETVRLIFKLLLDGESLHNIARHLQSNDIKSFSRRKDANGFSVHSVRTVLRSESVIGTLPASQRNDRPAIPNYYEAAIDAATFNKAQEILDKNRKGRTPASDNPLTINIFKGLFRCQCGASVHPTGTKNKYQGVYRCNNHLDGRCDVPPLKRKPFDRWMIDNFLGMIDVGNDGESERKIASLQHEVEIVTTRIKKATALLLEMDDITELKAQVKELNQKRTELQTTIDNMRRKASLTDKELPQLKDIDLTTKAGRVECQLILSKHLKGLTLGKDTVTVTLQNDTEITIPTDPLPLNDGTSIFEIAEKNLLNIDTFQL

SEQ ID NO: 7772 - protein, 482 aa, synthetic construct
MGELGAGFVRVSTGSQDESSQVKILTEESAQRGITIVKWFRLHGYSASHGAQEPALREVIADIARGDYSALLVTESSRLDRRDDLDAQAEILLGIRSVGGDVISIAEPQFGKTDFAGRVVTLVAQHANAEKSATVRRTTYRGISMIVANGGHHGPLPAFWATRGDRYAKQAFCVDLDKVRDIYARVADGESLSSVGRVYDLYPASVKNLVRFPANHTGVVECRYTHEGATEVWGHQVAPVVESPLWWRANKVLAANLTDGRGNKGGRPVAQAANWLSGILGCPSCGAKLHVHGGRTPAGNQRAPKLRCGGHAKRRIACGVFTGCDATPVIDVIDAMLSGDVTPVLAFQRVAGNSHELDEMRAELARIQGRLSVTEDDDELDELVATRKALRVAIDGFAVVPDVYDYAETGQTVGQMWAAGDTEVKRGMVRAIRESWGLALSEHGGQWGITVGTGFTGAGGADDVVDLGNGLCFRREGAHATL

SEQ ID NO: 7773 - protein, 457 aa, synthetic construct
MRCAIYRRVSTDEQAEKGFSLENQKLRLESFATSQGWEVVEDYVDDGFSGKDTNRPALQRMFSNVDKFDVILVYKLDRFTRSVKDLNEMLETIKKNEIAFKSATESIDTTTATGRMILNMMGTTAQWERETISERIKDVFGKLRENGIFSTGHPPYGYRCSGNKSIEIVEEQAEMVRYIYELSKTMGLFKISVELNRKGIKTRRNNKFGQSAVKRILHNPFYCGYMEVDNKWVPIKNEGYTPIISEEEFKTTQKILTKRTKAQTRSRSVSYYPFSGIVLCPECQRAMRGDRAKYGDYYYRYYRCVYGRENINCTNRKRIRAEQVDKAFAEYISRSFENTTIKLDSRDIKSDIEYELKHLDSKIERLSDIYIEGDITKSKYNEKMNSLLNEKEKLKKDLTSCKEHVDAEFVRNQINKLESIWNLIDDKTKSESIRSIFDTIKIKQDKNTVTIMDHTLL

SEQ ID NO: 7774 - protein, 484 aa, synthetic construct
MKYAVYVRVSTDRDEQVSSVENQIDVCRYWLDQHGYDWDENSIYFDDGITGTVLLERHAMQLILEKAKKRELQMVLFKSIHRLARDLKDALEIKEILIANGIRLVTIEEGYDSHYEGKNDMKFEMFAMFASQYPKTLSVSISAALSAKVRRGEHTGGRLPFGYSDCEKKYVINEEEAEIVREIYDMYSKGIGYIGIAKILNERGIPSKTGGKWQMSSVQRIIKNPIYKGDYILNQYTTVKISGRKKQIKNPEEKWTIFKKHHPAIVSEEQWELVNKPRSAKKRRPALWNEFRGIMFCAHCGSAMQVVYSAKKKKDGTKEEWRYLKCSRYKRYGSDECVRHAPIQYHEFREFILENLKEKEKQLETEFNLNEESSNAEKKNKLQREIQRIEEKRKKLIDLYMEELIEKEEFLSRRNELEKTIKEKEVQFVSMEDKSEVKRTQDEFRKAFALLDESKNLYEEFKRIIDRIEIFENGDIKIVYRIEM

SEQ ID NO: 7775 - protein, 467 aa, synthetic construct
MKCVIYRRVSTDMQVEEGISLDMQKLRLEQYAKSQGWVVVNDYCDEGYSAKNTERPAFQKMIKDMKKKQFDIILVYRLDRFTRSVSDLHSILKIMDEYNVKFKSSTEIFDTTTATGRMFITLVATLAQWERETTAERVRDSMHKKAELGLRNGAKSPMGYDLNKGNLYINHTEAEIVKYIFEMFKTKGIISIVKSLNSRGVKTKRGKIFNYDAVRYIINNPIYIGKIRWGDDILTDIAQKDFETFIDKDTWYTVQQVQDSRKRGKVRLHNFFVFSNVLKCARCGKHFLGNKQVRSHNRIVMSYRCSSRHHKGTCDMPQVPEDVIEKEFLNLLEDAIVDLDDTEEKPIELSNLQEQYNRIQDKKARLKYLFIEGDIPKNEYKKDMLTLTQEENIIQKQLANITDTASSLEIKELLNQLKDEWYNLNNESKKAAVNAIVSSITVEVTKPARVGKNPIAPVIKVTDFKIK

SEQ ID NO: 7776 - protein, 515 aa, synthetic construct
MKTAIYLRKSRADLEAEARGEGETLAKHRTTLLKIAKEMNLNVLSVREEIVSGESLVKRPEMLALLEEIEDNKYDVVLCMDMDRLGRGGMKEQGIILETFKRSNTKIMTPRKTYDLNDEWDEEYSEFEAFMARKELKIITRRMQRGRIASVEAGNYLGTHAPFGYDIHRLNKRERTLTINSEEASVVRMIFDWYANEDMGASAIRSKLNNLGYKSKLGNEWNPYSILDILKNNVYIGKVTWQKRKEVKQPDAVKRSCARQDKSDWIIADGKHEPIIPESLFEQVQEKLNSRYHVPYNTNGIKNPLAGIIKCSKCGYSMVQRYPKNRKETMDCKHRGCENKSSYTELIEKRLLEALKEWYINYKADFEKHKQDDKLKETQVIQMNEAALRKLEKELVDVQKQKSNLHDLLERGVYTVDMFLERSNVVSDRITEITSTMENLKKEIKTEIKKEKVKKDTIPQVEHVLDLYFKTDDPKKKNSLLKSVLEKAVYKKEKWQRLDDFELVLYPKLPQDGDI

SEQ ID NO: 7777 - protein, 453 aa, synthetic construct
MKSKKAVVYARFSLDNQRDESIDAQLRAINEYEDKNNIKIVNQFIDRAKSATSDKTPEFQNMIKFCEADTTGISMVIVHKLDRFSRDKYDSAMYKQKLKVKGIRVVSVLENLDNSPESLILESVIEGMAQYYSANLAREVAKGQKENALKALHNGGDAPLGYDVAHDKTYTVNEEEAQAVKIIFDRYIKGYSYSKIIDELNDLGYKTKRGNKFGKNSLHGILNNEKYTGVYVFNKTQRKGVDGKRNGHEQKSEDEIIKVEGGIPVIIDKEVFEQAQEMIQKRKKTPGAHKATTTYLLTGLIKCGECGHAFQGHKRKDSYGNEYVSYRCGCRKQKRDYLEEFILQELEKNILNDEAIPALSKALNEKLNYKNESNAELLKNLDQKLEKVNKEISNILNAIMNGIVSSMLKDKLDELEQVKLNLDLKMNELKIENKVVRWCRRNRRTNKKYVLKI

SEQ ID NO: 7778 - protein, 553 aa, synthetic construct
MPRSTARRVTSPRTRDAFASTLPATVRVGIYLRRSTDDDHQRYTLDAQEDRLRSYVDSQPGWEITLRFSDDASGASTDRKDLHRALAAARAGLIDVLLVYRVDRLSRNLRDTVQLLEDLDEAGVVFRSATEPFDTSTPMGRMLLQMLAMFAQFERDTIIDRVVAGMERKAREGRWMSTQAPYGYHVDKPTWTLIPHEPEAAIIRAIFELYTRRRLGARAIATTLNDRGHRTRSGNQWTGHQVLRYLDNRVYLGESSFRDIVVVDTHQPIIDRAIFDEAQRLLTARSEAHSRRASNASDYHLTGRMRCPRCGKTMLGTRATGRQGRKYRYYTCFTRNRYGSDRCDAPRLDADAIDHAVLEALADFYRRQHTLIADAIKRAQQAHRNARGDLRAELTTVDTELTQTNRAIDRYLTAFEHGTIDEETIGERLAKLRTQQKQLRQRHTELTDQIAREPVTPAPTDLDAIAVNITIVIKTGTNQQRKALIEALIAEVKISGPDRLIPVFRIPQPDPDDDQPPTLTAVAAHPPATTAPKGTVRAMNTRVRSEGLEPPTF

SEQ ID NO: 7779 - protein, 452 aa, synthetic construct
MLRVALYIRVSTEEQVLNGDSIRTQIEALERYSKENNFNIVDKYIDEGFSATNLKRPNLQRLLRDVEKDKVDLVLMTKIDRLSRGVKNYYKIMETLEKHKCDWKTILENYDSSTAAGRLHINIMLSVAENEAAQTSERIKFVFQDKLRRKEVISGTIPIGYKIENKHLVIDKEKKYIVKAIFDEYEKSGSVRTLIETINNLHGELYSYNKIKNILRNELYIGIYNKRGFYVEDYCEPIISKKQFKQIQRILEKNKKTTPNKNIHYHIFSGLLKCKECGYTLKGNSSNVGEKLYLSYRCSTFYLNKNCIHNVTHNEKHIENYLLTNLKPQLHKHMVKLEAQNEKIRQNKKSNKKDEKKKIMKKLDKIKDLYLEDLIDKETYRKDYEKLQSQLDNITEEQEGQIIDTSHIKKFLDIDINEMYSDLSRVERRRFWLSIIDYIEIDNNKNITINFI

SEQ ID NO: 7780 - protein, 460 aa, synthetic construct
MDNIKRVALYIRVSTEEQALHGDSIRTQTEALEQYAKDNNFIIVDKYLDEGYSATNLKRPNLKRMIEDVKNNKIDLVMITKIDRLSRGVKNYYKIMETLEKHKCDWKTILENYDSSTAAGRLHINIMLSVAENEASQASERIKFVFNNKIRRGEVISGSTPFGYKIVDKHLVIDEEKAEIVRECFISYEKLTSMIKVLQHINNSFDANFSYNFIYKLLKNNIYTGTYIHNDLVVENFCNAIISSEQFNTVQKLLSKNTKVYNNKYLNSLGMQYIFSSMVICKCGRKMSGTYCLSSDKKIYKYYRCHVSQTTKKCSNTKRLSEKKLEAFLLKNVRRQLEEIAFGYESNNNKSKNKNNNNQLKNKIKKQINKLQDLYFDDLIDKEDYKLKYQKLNAQLIKLENNNSEEKKSIINLKNIRSFLEINFEKIYSDLSDQEKRTLWTSIIDTIVIDENKNLTINFL

SEQ ID NO: 7781 - protein, 525 aa, synthetic construct
MKTIRDVLERGKKGAFYARVSSDRQTIDAQRHHVYEFIKNYECEIVKEYVDHGESAFKKKLIKRPQIMALLRDVEQGKYDFVITYADDRLARSEIEHVQIRVIMKEAKTDVILTSTGELYTERDIITQLIREGGTRYEVERISARTKDAYGQRTDYGQWMGGPVPFGYVQDENTKNFSIVEDEKGIVLNIYRLYQNGEGFAGIAKKLNEQKVKTNTIHWKKERVKHILTNPIYAGYVTFGRLKPGSGNSIEDLSKWKMAKCEEIPAIMTKEEWLATFQMFEKKRNKELPPKQLKTEYVLRDLIYCKSCDALLLPKNQETRGKNGKKYGMKKYMCSNKLCTVWFSTDELHALVFDSVIKEITDKVISKSQTELMYEMEQILEKDIKQITKEIGRLKKQVDNCLVWIKDAEREIDELYNQKKKLVEVDSKIDPLLDVMLEYRLHLLHEIRETEELIAKKEAEMKHIEEVDSNQSMLQKNVLQAFRLEFANFKKDMKRVRQLLVYLIDKIIIDQNGKTEYILKINLEQ

SEQ ID NO: 7782 - protein, 487 aa, synthetic construct
MLPYGVYVRISTDRDEQISSVENQIDICRNWLERNGFTWDEQCVYKDEGISGTLFIERPAIQVLLQKAKNKEINMVVFKSISRLARDLKDSLEIREVFLAHNVRIISVEEGYDSTKAGKNDMAFELWSLFSAQYSRTLSSSISAALAAKVRRGEHIGKVPYGYNRENQRLVKNEEEATVVQMMYKWYLDDWGYKKITNELNRLGIKSKTKKNWQMTSVQRILQNPIYKGTFILNQYTSVKFGGKKKQIRNPQEKWFVFPNHHPKIVDDKIWDQANMKRNNNSKKKITAWNEFRNLAKCAECGSNMVIVQSHVKKKNGERTEWKYLKCSQYRRAGKHGCVNHVPIQYGDFRTFVINLIVDKGNSLVLNLQNIIEEGKEEKIKKLQQLLSTNEHKKKSLLDLYLEKLINKEEFEKKRKDLELEIMKVSHELFILQQNNVVQTDIKTIKEAFEQLQKQERDLFHVFRTLVQEIMIHQDGTVDIIYTFESG

SEQ ID NO: 7783 - protein, 507 aa, synthetic construct
MRYNLACNNGLGVPSNGGEEVKVATYVRVSTVFEEQDSSIINQEEGLQDYYRKKGWVLYETYGERGSSFKKREAYDRLIRDGKTKRFQIILVKSLSRFGRNIGKLNTDITNLVEIGIRFVALSEGIDSNNNDWQGKLAMYSMVYHMQSQTTSEFIRIAERARAKRGEFTGSYTPYGYQRVNKKLNLASDDTPSIVQKIFNLYQEGILGMQAIANLLNDKMVPTPAQKHGRKRGNTLWGQSTIEYILTNPVYVGDLVAQREQAAALGSSKRKKKNKEEQVIMENNHPPLISREQFQVVQDLIQRRSHNKVSGLPNLFTHLMFCADCGSGMHCVKRPYGKTHYMCGKYKLRGKGFCSRHSIYEHELVELILTDIKQLKGGHVESDYLRRELQKEAESKKRTSSSEITFLKKEVEKLENRKQNAEDKWLDGDITKDQYHEILERLSETLLTAKQKLSNIQKENENKKLTLPDITKLTSFEKLDRELLLMLVKKIEVKESGNVNITYNFKV

SEQ ID NO: 7784 - protein, 505 aa, synthetic construct
MVAKADETPIGKIKVAIYIRVSTDMQVEDGFSIEGQRTRLNSYADSQDWKVFDTYIDDGYSAKDLKRPAMMRMMEDMEEKKFEVILVYKLDRLTRSVGDLHGLLNTFDRYGVKFKSATEIFETTTAMGRFFITLVGAMAEWERGTISERIRFGVEQMVAEGRRPGGILPYGYTQEGVLIPEEAEQIREIRDLYMSGMGYKTIAVRMSREGKLRRESEWTSATVGYTLENPFYAGIIRMGSKTPEGLYVNTRKSERVKCVYGKGSHVPIFTDEEYEETKQFMKRKTHSGYSKIKIYWFSGVLRCGRCGGAMFGHLSTRRTTSRGVVRTPHYICSNKHHSNKCDLPMFRQSHVEHLIMEYINKVQEDTDKLKSASLEMIADEGKKTTEIDKAKRDLLKVSDRREKWQYMFVEGLISKEDIRRKMAEEDVAEQEAKQRIANNQKSLSGIPRVTELAGLAEAWEYIDDEEKKEYIYTIFNKIEVNTDLTRPKGTKDKFFDAYIQDVTFN

SEQ ID NO: 7785 - protein, 515 aa, synthetic construct
MKTAIYLRKSRADLEAEARGEGETLAKHRSTLLKIAKEMNLNVLAVREEIVSGESLVKRPEMLALLEEIEDNKYDVVLCMDMDRLGRGGMKEQGIILETFKRSNTKIMTPRKTYDLNDEWDEEYSEFEAFMARKELKIITRRMQRGRVASVEAGNYLGTHAPFGYDIHRLNKRERTLTINSEEASVVRMIFDWYANEDMGANAIRSKLNDLGYKSKLGNDWNPYSILDILKNNVYIGKVTWQKRKEIKRPDALKRSCARQDKSDWIIADGKHEPIISESLFEQVQEKLNSRYHIPYNTNGIKNPLAGIIKCAKCGYSMVQRYPKNRKETMDCKHRGCENKSSYTELIEKRLLEALKEWYINYKADFEKHKQDGKLKETKVIQMNEAALRKLEKELVDVQKQKNNLHDLLERGVYTVDMFLERSNVVSDRITEITSTMENLKKEIKTEIKKEKVKKDTIPQVEHVLDLYFKTDDPKKKNSLLKSVLEKAVYKKEKWQRLDDFELVLYPKLPQDGDI

SEQ ID NO: 7786 - protein, 551 aa, synthetic construct
MATKARVYSYLRFSDPKQAAGSSADRQLEYAKRWAAEHGMALDAALSMQDEGLSAYHQRHVTKGALGVFLAAIDEGRIPAGSVLIVEGLDRLSRAEPIQAQAQLAQIINAGITVVTASDGREYNRAGLKAQPMDLVYSLLVMIRAHEESDTKSKRVRAAIHRQCKGWQDGTWRGVIRNGKDPSWTRLDPETKAFQLVPERAEAVKLAIRMFRDGHGAVRIMRTLAEEGLQLTNGGNPAGQLYRILRNRALIGEKVLEIDGEEYRLAGYYPSLLSAEQFADLQQATEQRAKQKGTGEIPGLITGLRISYCGYCGSAMVAQNLMNRGRREDGGPQHGHRRLICVGNSQGMGCAVAGSCSVVPIEHAIMSYCADQMNLARLFEGGDRSEALAGKLAIARARVADTTAKVERITDAMLADDAGDAPAAFMRRARELEASLVEQQAEVDALEHELAAIASSPTPAVAKAWADLQEGVKALDYDARTKARQLVADTFERISIYHRGTEPEQTRSWKGTIDLVLVAKRGSARILHVDRQTGEWRGGEEVRDLPDDPIQ

SEQ ID NO: 7787 - protein, 569 aa, synthetic construct
METVGIYSRKSKFTGKGESIENQVQMCKEYINQRLGKNIKIVIYEDEGFSGSTTDRPKFKEMIKDIKLKKINILICYRLDRISRNVADFSNTLEILQENNCSFISIREQFDTSTPMGRAMIYIASVFAQLERETIAERVKDNMLELAKTGRWTGGKIPLGFISERVKYTDDAGLQREYSILKIDKEEIKFVEFLYEKYLELGSLHKLEVYITQNQLKSRNGIMFEKSSLKLILQNPIYVKANYEVITYLKENNWIVYGEPDNKHSLLSYNKTEQSFKNGKHTKVKKSENERFVAISNIEGFIDPNLWLQVQRQFDKNRSKFPRLGKTHNALLVGKLICGQCKEYMLVQHGRVSKTTGKKLFYYTCSLKRKSHKKLCDNNNAKADYVENLVINSLKLLSKSKKKFINQLKISYKNKLKSTKASIEKLSLEKSLSEKKNQIDNLVLALSKSSEIEDILLGKIKSLKNDCIQIENKIKYINSSAEEQKLNNINLDLIDSIIDECSIIDKLTRDKQKRIIDTLIDTIYWYGSGNGKGKIKIKFIGADEDTKEIVLSEEELQPKMLQFYSHSTC

SEQ ID NO: 7788 - protein, 490 aa, synthetic construct
MQDERNTLQHNTSAAIYCRISRDKTGAGLGVERQEGDCRELAQRLGVTVSHVLVDNDLSAYSGKPRPSYLSLLELMKNGQIGMVIAWHSDRLHRSMVELEEYVTASEIGGVTTHTAKAGPLDLSTPSGRLVARQLGSVARYEVEHMIERQRAAKLQAAKLGKYLGGQRPYGFEPQRTAIRESEAAVIRELAHRFTNGASYWSLAIDLNQRGILTQHGKDWNALKIRNLLIRPINAGIVDHKGVEYVAESAAILTKDEWDDLQAAISLSKRTSVHPGRTRKHVLQGYLFCALCGKKLFHKSKQQRDGSYKTTAACGKTDSQTGRPNGCGKVSRMVEPIIDLLSDCIMARLESSELAASLATYESDTTTLRELHVRQRALEGRSVEITNDYYVSGLLNRDEFERMKSSVDLELRAVETSIQQQTSSRVTTEAAIEFRSKWENSGIHWQRDLLSTLGVEIVVHPRPTHDGYTYPKYKDKWRFDPELIEIKWKA

SEQ ID NO: 7789 - protein, 561 aa, synthetic construct
MNEVKRRNVDEISKLPVVAYCRVSTNKQDQESSYENQHRFFRERATKTENEVLVKIYADKGISATSLKKREEFKQMLYDAGINEYRGRDEFTYEIDHKRKPKFKKIYVRNTSRFTRDASIISILRALLKNGVYVHFLDIDLIYDDASKEFMLNMFINFAQQESIDRSKKVKDGNEVMASVGSIRVGGYGIYGYEYSSFTKKLTIIKEEADVVCKIYELYLKGYGVRRILNYLQDNGIKPRSGKERFSISSVRRILTNEKYYGCNVRNKYDSGGVFTKHYPKLKNKEEWIYHEGVIPAIIRKDTFLKAQEIGNNKIHRISQKGVYKGTSEFAGGITCSRCGATYTRNVDKGRVFYNCSTKKSRGVHACDNINISEDKISESINKLLEIGVKKKFDKYKETMTQLLKDMVRSKILAQIDKDNEAEVRVIQEQVDKLTRQKNRLVELYLDENMDKVFFDEKATSINNELDIMNKKISELSRSNQEIYDELHEFDCMIDEINQIQMSEVSNREELLQLIHIKIERHSENSKKPIAKIFFKYDEPIKKLSSKYKILEGISSVIIHT

SEQ ID NO: 7790 - protein, 518 aa, synthetic construct
MKKAVYCYARVSSRGQAKDGYGMSRQQTMLRDYVAAYDDSLHNRGYELGSVNWLFAEGISAYSGKNIEDGSVLKSFIDDVLERKIINAVLVIENLDRFSRAEPIKAANLFLNLITAGCDIHEVETETIHHSSSDLSIITGGLQRAHNESKRKARLSIKNWDERIKNAIDGKAVLTNRVPSWLEVKNNGYVIKEGEKEKYNLIFQMYADGFGPAAIRDVLKERSMLINDSEPTIAHLNKIIKDERLIGKFNSTGRKKLSGLVIYPVVVDLSLFHIVDQLRKQRNPIGKIHRKANNLFAGLCICMECGRYVQVNSIESNGESYFRCGGSLVKIDRCQERGFKYKFFENALLQHIRNFDFSSLNANESEVQIRVNHLSMELLTHIKYKDEILQDIEKEDIPDPNDRRILKNLQKKIGEIESEISNLKHLNVNVSAFDELKQYSEELRDPTNVDIRLDFNIKIRRVIKNIIVKRYSDAIFLVVNYIAINEKQAIVINSKNGEILYMGVQNDDLKTVEHLIGN

SEQ ID NO: 7791 - protein, 562 aa, synthetic construct
MKQPLAYSYVRFSSPEQAKGDSFRRQTVAAREYCDKHGLELADLRFHDLGISGYKGNHFSQGALGDFVEAIEQGKVQGGSYLIVESLDRLSREEVDIAFSRFASILRADIKIVTLQDGKVFSRASLKNTTDILVSILVMLRAFEESESKANRIREARDEKHRQARENKVPTGYRPPDWIRTVKDADSGKSKYELIPERAEVIKRIYHLNNSGMGAIVIARLLNEEQIPPWGRSKTGWQTSYIKKILKARTVLGEYQPHIVTNGVREALGEPVFGFYPAVIDPNTFKLAQMTMTSRDKRSGGIRKDKVNNLFTGLAKCKHCGNTMHFVDKGKPPKGNQYLLCSLAKTGATHNGLSCKRASIRYQETENAILTVAATLNLKIESPTNKGEVERLQNQLSEVHSDLGTAEEAIVRITNAIAELPDSSGLIAKLAELELQKREKKSEYQAIEKRIDELNLVPQASNVWNDLQQALKMFREDASDRTNVKLRTKINNQLLNSIDRIEFDNHAKIVTIHIDSKRIVEIWFEDKMKGYTVKLSWDNREFLPNTFAIKCISGSFEKRANN

SEQ ID NO: 7792 - protein, 534 aa, synthetic construct
MNTIRPLISLRSPTAYSYIRFSSAIQAQGDSLRRQTKLAQEYCQKHSLTLSEQSFTDLGISAFNSANSQEDSGLGQFLKALEQGVIPSGSFLLVESLDRLSRAKVQTALRQLLNIIEYGITVVTLIDNRTYSSESETTDLIISLAVMERAHNESKTKSERIKAAWANKRANPTTTNRTSLAPFWLKLNKDKRTYTVIEKNAETVRRIFQMSINGHGIIGIARRLNEEKIPSPKGGSWSNTSICRILNSKAVIGEYTPNIGRTSTNTPISDYYPSIIDESTFYLSQSRKAERSKPKSAGRKTTFPNVFNQVAKCGVCGATMYYDNKSPTLKYLTCREFKKKNCTNRPIRIEFMHKFIIEQYLLPKNFQHHINMTTETSKQGDSISSIEEKIKEEEQALNQLMKIAKNLTSHIAIQHMESRDRKIMQLKEELEETKAQQAEVTLTPRIGFKQAQQLVANALQMEVNDKKPNCTDPELIREYRVTLNRSLKDVFNSLRIHNLKSASEITVECNQLTYAIDRKSLKLIHENLYWKSKV

SEQ ID NO: 7793 - protein, 498 aa, synthetic construct
MRLFSYIRFSTEKQIDGDSVDRQTNSAKKYAQLHGYDFQNKSFSDLGISGFKNVDRDGLTSMLEAIQSGGISRGDLIFIENVDRLTRQGFQHANDLIVKIVNSGVLLHFERERVTFKSPSDLNDMMSLMKVCMSASLAFEESQKKSERIASAKQKQRNLMKQGIAVKHKAPHWIEFDEEGKCFHLGNTKIIRRVIELRRDGFSVSKIISTMNKEGFKAPYGGTLRSSTVKQWLQSPALYGAVMVEDELIKDYYPALMSYDEATKLYNKLTNNKAPENQNNHLRGLIYCSKCDSAMGLRFTTSSGKSKKKIPTFYCIKQREGGCDAPSVSNIMPLIEKMVSHMKTIEHKVDVAAITARIDEISSNLERISKSVTTDNFKMMMDMMDKFEKEKRELQTSLTVSDDVDTDTLLSHIDNPVEFNNIARRYIDKIKVTFKGGTRRKRTFHFKLIQRNGHIVNLTRFGSGQITIGKTEILSTFGQPESEFGEEMTYLEELELVG

SEQ ID NO: 7794 - protein, 528 aa, synthetic construct
MARTVTAIPATRALHTGAPLGQTTLRRVAGYARVSTDHDDQVTSYEAQVDYYTRYISDHAGWQFVKVYTDEGITGTSTKHRAGFQQMVTDALDGKIDLIITKSVSRFARNTVDSLTTVRALKDKGVEVFFEKEGIWTFDAKGELLITIMSSLAQEEARSISENVTWGHRKRFADGKVTVPYSRFLGYDKGEDGSLVINTEQAKLVRRIYNMYLGGMSIGTIARTLTDEPETFTAAGNKTWYYQSIRAILTNEKYKGDALLQKSYIADYLTKRQVINQGEVPQYYVTASHEAIISPAVWDFVQAEIAKGARDQRTQHRTRPFSSTLECSQCGHFFGSKTWHAGSKYEKVIWRCGHKYAGQEKCATGHISDQRLKDMFLKAIRLRFGSSTDTGVNQAVLDALDTSDLEVEAAGLLAQINEVAKKLQSMIAHNARVAQDQQTYEKAFNASHEQHQALLADHAAVVAEIQNKNNRLAAYHYYMQETANLDLERLVFSPYLCVALLDKGTVDVDGNVTFQFRDGSTQVVAIKQ

SEQ ID NO: 7795 - protein, 649 aa, synthetic construct
MPDALAPDPFTAMAAQLTPKRAVSYIRVSTREQAQRGGSEEGFSLPAQREANKRKAQSMGALVVKEFADRGESARSANRPELQKMLAYLKEDGGIDYVIVHKLDRLARNRADDVEINRAFEEAGVRLVSTSENIDQTPGGMLLHGIMSSIAEFYSRNLANEVIKGMGEKARNGGTLGKAPLGYVNVRGRDEHGREVRTVELDQQRAPLLRLAFSEYATGNWTVSQLAKHLAGLGLDVPATPSKPARPITKGRLHTLLRHPYYKGVVQFQGVEYAGKHEPLVDEETWQAVQAVLGSHRSGERERMHNHFLKSTVVCGQCGSRLLVQNTKNGKGVLYPYFICARRQRLHDCPFRAVLIEVVEAQMQEVYRRLYVSEADRQEIERYLLAELARIEGEKDRNVRSLTVRRTSLEDERRRLLQAHYGGAVPLELLKEEQERLGRELAGIQRQLDAYQADAKLVRAHVEQALDLLEDCYRLYMAAPDHLRKQLNQVFFERVLVNPLVDEDGRVILPGDGGDGHGGLQDEDDDGVKGAGDEPDGQRGRDEQERGECEADDTGSESTRRADEAPCPIRVAETGSDVCLEARLNRPFDQLASARLRAVARIAALRKLPTSTGGGRRSSAETATGAVSQGEGLYSDAVVPPAGLEPARP

SEQ ID NO: 7796 - protein, 540 aa, synthetic construct
MTVPQRAALYLRVSTARQAEHDVSIPDQKRQGEAYCASRGYQLVETYVEPGASATNDRRPEFQRMIEAGTSKPAPFDVVVVHSFSRFFRDHFELEFYVRKLAKNGVKLVSITQEMGDDPMHVMMRQIMALFDEYQSKENAKHVIRALKENARQGFWNGSLPPIGYRVVAAEQRGAKTKKKLEIDPLHAETVRLIYRLALHGDGDHGQMGVKNIVSHLNRNRIFTRDGGRWGIGQVHRILTRRTYMGEHEFNKRSKSKELKPISEIVVVPVPPIIDRETFDAVQALLKARHPAVTPSAVISGPTLLTGLIHCAKCGGAMTIRTGKGGRYRYYACSMKARQGPTACEGMAVPMDKLDDLVASHLEDRLLQPERLETILAAVLDRRQERSERQREHIAELNKRAAESEARLKRLYDAIEAGVADLDDPALKDRIDGLKAIRDQAKADAERAQAMLQNSGSKAVTPQMLSKFARAARQRIRLEGGGYRRDHLRALAQRVEVADGEVRIMGSKSRLLQALVANGSVNSVPIQGLKWRRGRDSNPR

SEQ ID NO: 7797 - protein, 537 aa, synthetic construct
MLSSTEPKAKKAVAYVRVSSRAQEKRGDGLASQEAVCRRYADAMGYEVVEVFKEVLTGSAIDRPAMRSLISYLRANKAEGRYVIIDDLSRFSRGHEAHWALKKEIARAGGFLCSPKMQFGENANARLVEGVMVTVSQHQRELNAEQTRTRMFGRVLNGYWPFAAPMGYRHTRVQGHAGLLLTRDEPVASIIQEAMEGFASGRFETQAEVKRFLETQPAFPRKGRNGDVHYQAVSDLLTKLVYAGYVEHKDWGIAPLKGKHEPLVSLETFERIQNRISDVARAPMRVDIRSDFPLRGAVCCAECGKAMTSCWSTSKTGMKHAYYMCFGKGCPRYRKSIRRDELEGSFAEMLKHLVPGAKLIDLAKAMFKNAWQQRASQTAELTQTYKNEIKKIEKETARLIDLVVGSTSNEVAKAYERRVFELEKQKLLLVEKQEQLGRKPGSFDELFELAVSFLSKPYDLWASGNLALQKLVLRLTFAEHLAYCPENGFRTPKTTMPFKLLEPFREGKKSMARPKRFELLTPRFVDQFENVFERNDT

SEQ ID NO: 7798 - protein, 574 aa, synthetic construct
MDRSPPDRPKAFSYVRMSTDIQLKGDSLRRQQERSQKYALAHDLQLDQEFDLHDIGKSGFTGQNIASGNFGRFLEAVRRGEIPQGSYLLVESFDRLSRQEPIVALGPFLELVKAGINLVTLDDERVFSGNISFEDLIISIAKMSRANEESARKSDRLSQAWLNKRRHGSERKLTAQCPNWLKLSADRSTFTVVEEQAGKVRRIYADALAGLGAYSIVQHLNQEGVSTFLGKGGWQPSTVNKLLSNKAVVGEFQPHKRLNGKRLPEGAPIKDYFPAIIPDETFDAVQLARLSRKTMPTAEKKGSGGRKGLNYPNLFSKLAVCAYCKNPMSYVQKGKPPKTNSYLACSSAMRRSGCDHKTWWRYDDFEKAFLSLVEKLDLASLVSSATHAGKRADTVAKLEATEGKQKYLERELEVLFETGVQLGRSSEFLARKIEEIEPAIEKVKTDINEIRAEIAQLDSNALLYYGDKNQIADLVEKVRSTKGESVYRIRSQIASRLQSLLKSLELLIENDESEQQFEVNFCDGAHLMVFVNPKKPAEILKIIRKKDDLFILTDPDGNELDRYTMDEESEVEGY

SEQ ID NO: 7799 - protein, 524 aa, synthetic construct
MKTVKKIEAKPKLRGIISSTDENYLMKVAGYARVSTDNEEQLTSYQAQLDYYTNFIQAHDGWEFAGMYADEGITGTNTKKRDGFNTMIADALAGKIDIIVTKSISRFARNTVDSLTTIRKLKEKGIEVWFEKENIHTLDAKGELLITIMSSLAQEESRSISENTTWGKRKQMADGKVSLGYSRFLGYDRGPDGKMVINEEQAKVVRKIYRLFLTGYSAHGIKKRLEADGDLTPTGKKKWPFTSIKRILVNEKYRGDALLQKEYTVDFLTKEKRKNTGELPMYYVEGDHEPIIDPTIFDIVQEEVKRRNSMSRYNGLFIFSSRIHCMDCGAYFGRRIWHSNDKGRKVVWQCTNIYHGTRNCHMVAIPEESIKILFVKAIDKLMGVKDSVIEDARILQSQLEDTSSLEEHAEALNDEMKITLRAFEEAIRESGREGKGNEREVHLLKSYDAKETEYKSLLSQVQANKAHALETGLFIDTLKKLKPDGRFSETMWGLLLSEVEVYSRDDIRYVFKDGSIVKMELDQV

SEQ ID NO: 7800 - protein, 403 aa, synthetic construct
MATISKFERRKEPPKRKRVAAYARVSVNTDETRNSLLNQVDAYSKFIKSNPEWIFAGVYADLGISGTGMDKRDEFERMLSDCKKGLIDVILVKSISRFARNTVDLLQTVRYLRSLNIEVRFERESIHTLSSEGELMLSLLASFAQGESVSISENVRWGIMKKFEKGIPCGRKRLLGYRWQDDELIAIPEEARLIRRIFDEYLGGRSFYAIADGLNKDGYTTITGRAFRGDGIKDILENLTYTGDLHLQKCYIEDPITKHVVRHQTDRPSYLIENHHKALVNKKDFSLAQEIIKKNSIKGARTHTFDCFTGKIICGICGKTYTHTNGKFWDCSVKKRRGGRCASKPVPEKVLRRLAAEVLRTDEFNEYLFKNKIDHIVITGAREVSFIFKSGKTVVCTWKRNER

SEQ ID NO: 7801 - protein, 474 aa, synthetic construct
MKIAIYVRVSTDEQVKSGHSIDNQKERLIAFCTSQGWDDYSLYIDDGYTGTNLNRPALKRMVSHVEEKRVDAVIVYKLDRLSRRQQDVLYLLEDVFEKNDCVFKSATEPFDTSTPLGKAMIGILAVFAQLERDMIIERMTAGRRARTSKGMWYGGRIPYGYNWDKEKQELTVNHEQARIVKHMYAMYLKGASRLEIAEWAESRTNERVLNHSTVRDILTRVLYTGKLQNKEQLVDGNHEAIIDTATFEAVQREYEKRRTTRFQKGKFLLTGLMKCGICGGNVVNVKRKSKYAEGGYYHFYTCKDQHVRAKDTTNDKCWVGYHRRQMIEDKVIKRIKDLALDDELVKKEIEKSSTPHEDQSGLINELNEKLKETVVGLENLYEAIQIGEIKASFVSGRITKLEEERERIQTQIDDLSLDSPAPVSNESVIRMIKKIHESWDYIEEEEKSLLLRTVIDKVVLKKHGEIDIKWNFVN

SEQ ID NO: 7802 - protein, 447 aa, synthetic construct
MKAAIYIRVSTQEQVENYSIESQKERIEAYCRSKDWTIYDTYLDPGFSGSNINRPGLQRMLSELPNIDVVVVYKLDRLSRSQKDTLELIEAHFLKNNVEFVSITETLDTSTPFGKAMIGILSVFAQLERETIAERMRMGHIKRAENGYRTSGGDYDPSGYSRINGELVPKEDEVKHIQTAYNLYEQHLSITKVQKHLKDLGFPVWRFRRYNDILRNKLYCGYVSFAGKYYKGRHEPIITEEQFNRVQVLLSRHKGNNAHKAKQSLFSGLITCGRCGEIYHTYQTNDKGKTYRYYLCRARRFPSEYDKKCMNKTWNSSKLEDLIINEINELIKNKETINDNYKIIDYDKLISNVDERENRILDLYELGRIDKNKLDQRIQSLEDEKHELIKKKENQNSQQQNVLTPKELKKYVSDLYTADFNKKQSIIQKLIKQIYIHGENIEIAWNF

SEQ ID NO: 7803 - protein, 538 aa, synthetic construct
MAEALFGSFGQRVDGLSLMNQLEEQPKLLRVAAYVRVSSLSDEQEGSFDNQKMHYTQLIRSTPGWKMVDIYVDQGRTGTSMDKRPGFNRLIRHAKERKIDVILCKSVSRFARNVIDSINTIRELTELGVRIIFDKENIDTGDMTSEFILTMLSATAQEESRSISENINWAVSRRFERGEPVFCRKLGYRQDAYKRWVVIEEEAQIVREAFEEVVKGKRPSEIAREFIKKGYEKINGRTDWSSTTVRLMLLNRDYTGDVICQKSYTECHLSHKQVANKGERNQFLIRNHHEPIVTRELFEAAQQALEKRKKPNRNKKANRYPLSSRIECSNCGGTLHRFICRGFVRWRCENNVKSKELCPMKSITEATIMEAMQAAFLQRYGKTKYVYDTQRMEKDLSRAVSARDLSYNRLRLDLEKILLEENITLINSSGTESASTNNKLEALACKREEIEKELKVKEEWWQRIDQDATFRDTAQHKLQELEGVRDPLKLLQKELEQITFLRAWVVRVKTISPMSFCIKWIDDQETIVDLRGGAKLNE

SEQ ID NO: 7804 - protein, 555 aa, synthetic construct
MSEYQNQSRVRIIPAKARTGRMEENPDGQKKRIAVYARVSTASEMQSSSYDLQVAHYTEYVKKNPAWTLVDVYADEGISGTSTKNRTEFNRMIQDCEDNRIDYILTKSISRFARNTIDCISILRRLKGLKPAVGVYFEKENIDTLDSKSELFLTILSSMAQEESRSVSENTKWGVQKRFQQGIVHMPTTFFLGYDTMEDGEIVIDEEQAKVVRRIFREFLEGKGCPTIAKELTRDGMKTGKGNTTWTSDAVYKIIKQEKYQGHCLAQKTVTTCYLSHRRVRNTDIQPQYYVKNTHPAIISEETFEAAQQELKRRSLMLRDPDRKYRQNYSNTGTFSNHFFCGECGRPVIRRRMTSSRKGEKYYFTAWQCRVTAGADPDFKDCKTSYVQEIDMEKAFMTIVREMKENLDETVEDAKTAIAQASLSPPEQARLEELNGQIEAVNDRISNLAAKESATSDAIYDATLRHLIYEQEILQQERDSLEENRQEQVYLEKHLQSLLDILEAEELEDFDGKLFKSIIERGIICKERIVEFHFKCGVKRTICAKVRKTPKKEKA

SEQ ID NO: 7805 - protein, 582 aa, synthetic construct
MAKTIYTDNLTASGKVKTYSYLRYSSAAQGEQFGGDSVRRQNDLIQAFLDTHNAEIVKSFEDLGISSFRGKNAKNLKTAEFAKFLQKVENGEIEKGSYLIVEGFDRISRQKGLNTVKIITDILHKHIKIFTLSDKRLYDIEAQNHLEQIIMITVINERAHNESLEKSNRQKAYFSGKRRGMDSGKEERVATGIYPSMSKRSPWWLRVDEKGNYQPIPERVAEIKYVVDLLTTKGFGIKRACHLVNSNGSLRVWNRDYIMKLIHEDCLFGHHTPLETKHSESTGGVTFRFTGEKYENVFPTVISEEEILAVRGAFKERLGTRGGKKSHQQNNIFTGLAKCGYCGSPMRQHQLASRGRTYFYLSCSASQIGTCVTSVAVTTRYDEFLKNFFKASDHFDFNSLLNNDNESFSTVHIESKKELMIKLEKEERIYSGLQETISSLLENGEALPALYTKKIVEVEAKIKYLKDEKDKIEFKIMSENRKAKDFIKVDIDFFEQLKNDINLRLKTYSHLHDYIHAIYFRNKKVYFDEVDHFTVIFKNGYVLSFNEHFTKLKEAAPLINEPINLLEHGYTIESYVDSILDV

SEQ ID NO: 7806 - protein, 468 aa, synthetic construct
MKCVIYRRVSTDMQVEEGISLEMQKLRLEQYAKSQDWVVVNDYCDEGYSAKNTERPAFQRMIKDMKKKQFDIILVYRLDRFTRSVSDLHSMLKTMDEHNVKFKSSTEIFDTTTATGRMFITLVATLAQWERETTAERVRDSMQKKAELGLRNGAKAPMGYNLNKGKLYINHTEAEVVKYIFEMYKTKGIISIVKSLNSRGVKTKQGKIFNYDAVRYIINNPIYIGKIRWGDDVLTDIAQEDFEPFIDKSTWYTIQQVQSNRKIGKVRLQNFFIFSNVLKCSRCGKHFLGSKQVRSHNRIAMSYRCSSRHHKGMCDMPQIPEDVIEKEFLNLLEDVIIDLDDTVNQPVELSNLQEQYNRIQDKKSRLKFLFIEGDISQKEYKKEMLIITQEETNVQKQLATTEDTVSSVEIKELLNRLKDEWTHLNNESKKAAVNSFVSSIFVEVVKPARAGKNPIAPIIEIKDLQWKY

SEQ ID NO: 7807 - protein, 522 aa, synthetic construct
MNHSKRKVAIYIRVSTEEQANEGFSLGAQEDYLKQYANTKGYEVYDIYIDDGYSGKDYNRPEIQRLFKDLYQEKFTGILVKSVDRISRRVSDVTKLIDDVLTPRKCYVLVSDNNLDSSTTGGTAFIQLLATFAEYERSMIVQRVKAGMSKRAELGYWNGGRVLGYDVKNKELKINKEEAEIVRKIFHLRAEGKGYKSIAIVLNQQGFKTKGGKLFSICTIKTILENPLYIGYCRWGQHKNWSVERRKGKTDEYNFIKGKHEPIVSEDLWKKVQGVNYAHKKSISKNRNFNGEFVLSGILRCPSCGAGMVMCKTQKRDKSGYHLYYMCQAFHSKGKLACKSNLIRKEDIEEKVLQCINKIILIPSIVDKTFERIQEKKERGMESVKSDLLYINEELKRRKQFIKKLNKDYFDEKIRVEAYTELSEPLRKEIDELESEKSKLDRKIESAEIPITKEMVIKALENFTNLYENATYEQKKSLLRAIIKKIEVQPNRKEIKRITYWFDCDNGQDDALLVSKEGRTVS

SEQ ID NO: 7808 - protein, 528 aa, synthetic construct
MNNAYSYIRFSTGKQQKGSSLERQQAMLDRWAEANPAFTLNRELSFKDLGISGRSGRHLKSGFGKLLEAIEQGAIGAGDVVLVEAIDRAGRMEPGIMSGVLINILNAGVSLVTLDDNQVYTQESLRGGSFYILVGKVQAAFNYSETLSVRMKASYKSRNTLALAGVTPKRHTPVWLTSEGELIPEIAPLVKQAFEDYASGLGERRIFERIFEGNTNPLLARMAPSTVKRWMTNRTVLGEWQGIPNVYPVVVEPELFYRVQKRMEAKFVPRSAPIKHKYTGLVVCGDCGKNFNTKSYSKRTKGAIPPAVMECSSRARRGSVACSNSKGIPESVIAYAFQLSCWKHIKDALEGQILTDSQKREVVIDGELKDLSVKITKVARAVAEVDDVEELIVSLNDLKAQRRSLESEKKSLQHGSVTVKDQITNMTDIMLDPLKANALLQSVGYKIVCNVNRTIDTPAGTFIYEGWGRSEDVHKVVNPQGQMLKLPVVRQEPRKTAKKSEPIDVMSGLAGKLERVKLVNFKGVSPSS

SEQ ID NO: 7809 - protein, 549 aa, synthetic construct
MTPLDTPATFHGSPKGEPWLGYIRVSTWREEKISPELQQTAIESWAARTGRRIIDWITDLDATGRNFKRKIMTGIQRVEEREAVGIAVWKFSRFGRNDVGIAVNLARLEHAGGQLASATEDVDVRTAVGRFNRRILFDLAVFESDRAGEMWKDAHQWRRSHGIPATGGKRLGYVWFPRRIPDPARPGQWTIQEERYEVDDDARADIESLFERKLGLDTGKPEGYGALAGWLNRLGYRTGVGTLWKADSLRRYMLSGFAAGLLRIHDPDCKCDYTANGGTCTRWLHIDGAHEAIITPELWERYLAHVEERRRMSPRARNPTYPLTGLVRCGTCRGDAGATSARRAGGRVYGYAYMCGNQYHSGGTVCANGVWVQRYMVEDAVLDWVRREAAASIDALPPTPVEVAPDRDRQRAARERAKLQAEHSRLEKALGNLAADRALNPDNYPPGVFEQAQAQLLAQLREAKAGAEQAAAVETAPRREDFTPIAGRLLDLWDVLDAAEKNGILRQLIHRVVCTRGAKGKKGVEGSGDTRVTVHPVWEPDPWAATSTA

SEQ ID NO: 7810 - protein, 596 aa, synthetic construct
MAKITKIEPQIPALPTRKKVAAYARVSMETERLHHSLSTQVSYYSELIQKNPEWEYVGVYADEAITGTIAKKRDEFQRLIADCEAGKIDIVLCKSISRFARNTVDLLKTVRHLKELGISVRFEKENIDSLSGDGEVMLTLLASFAQSESESISNNVKWGVRKRMEQGIPNGHFRVYGYRWEGDQMVIVPEEATIVKRIYQNFLDGKSRLETEREFAAEGITTREGCRWVDSNIKVILSNITYTGNMLLQKEYIADPISKKRKKNHGELQQYFVENTHEAIIPMETFQYVQDEMARRRELGAFANKSLNITCFTSKLKCEKCCKSYVRNTRKNRAKVTQLGDQLVGWVCGSSKTKNGKCKAMEIPEYILRQKCAEALGLEEFDEDAFAEQVEVITIPEQGILNFHMKDGTENTLTWVSTAKKDSWTPEARKKASTYRRNHAMKRDDVTCFTSKIKCADCGNNYRRQTRTRASGEKYHLYACATTNTCHNNCIHEDTLRELTAKALDQQELDEAVFLKEIDHITIAPGGYITFCFYDGHEVRMEYSTKRRMPGWTEERRAKQVEAIKASFTEERRRKMSENMKKIRSEKYWASTKAKK

SEQ ID NO: 7811 - protein, 529 aa, synthetic construct
MGINQGKKVKTIPATLTRFTASPITEQKKRRVAGYARVSTDHDDQFTSYEAQIDYYTNYINSRDDWEFVSVYTDEGITGTSTKHREGFKRMVADALAGKIDLIVTKSVSRFARNTVDSLTTIRKLKEKGVECYFEKENIWTFDGKGELLITIMSSLAQEESRSISENCTWGQRKRFADGKVTIPFNRFLGYDRGANGELVINPEQAEVVRSIYDMFLAGKTYNGIAQELTAKDIKTPGGKDKWSISTVRSILSNEKYKGDALLQKCFTVDYLTKKQKKNEGEIPQYYVEGNHEAIIPPEKFDMVQREMAKRGKGKKYHSGVHPFSSKIRCGECGSWYGSKVWHSTDKYRRTIWQCNHKYDGGKHCCTPHMTDEQIQEAFLSAANKLLADKDAVIANGREMMALLFDTSEKEAERDKLLEEAQVVSDAVQQHIYENAHVALDQAAYNKKHDSLTARYNSLKERIEDLNEQISQTQSQKGSIEDFLTAFEKLPETLTAFSIDNFNALSDYLTVNGEGNIDVTFRNGQTIKA

SEQ ID NO: 7812 - protein, 504 aa, synthetic construct
MENVCIYLRKSRADEEMEKTLGHGETLSKHRKALLKIAKEKNLHIVEIKEEIVSGESLFFRPKMLELLKEVEDKKYNGVLVMDMQRLGRGDMKEQGIILETFKNAKTKIITPNKIYDLNNDFDEEYSEFEAFMSRKELKMITRRMQGGRVRSVEDGNYIASAPPYGYDIDYILKSRTLKINEHEAEGVKIIFDSYINGNGASAISEKLNNLGFKTKLGNNFSPSSVLTIIKNPVYIGKVTWKKKEIKKSKTLGKVKDTRTRDKSEWIIANGKHKPIISEEVWNNTQEVLKNKYHIPYQLTNAPINPLAGLLVCGVCGKAMVMRPSRGILRVMCVHKCGNKSVRFDYVEKAIIDSLEQYYSNKKLEVKKQKTIQNTSNEEKELILLENELSTLNKQRLSLFDFLERGIYTEDVFLERSKNIDSRINLVESEMKKISEKIKFKKTKKDTKALLQTLNNAIENYKSSSDVITKNSYLKSILNDITYIKTPEQKRNSFSITLNPKLRF

SEQ ID NO: 7813 - protein, 503 aa, synthetic construct
MNNRIDAIYARQSVDKKDSISIESQIEFCKYELKGGNCKEYTDKGYSGKNTDRPKFQELVRDIKRGLIAKVVVYKLDRISRSILDFANMMELFQQYNVEFVSSTEKFDTSTPMGRAMLNICIVFAQLERETIQKRVTDAYYSRSQRGFKMGGKAPYGFHTEPIKMDGINTKKLVVNPDEAANIRLMFEMYAQPTTSYGDITRYFAEQGILFHGKELIRPTLAQMLRNPVYVQADLDVYEFFKSQGTVIVNDAADFTGMNGCYLYQGRDVKPSKKNDLKDQMLVLAPHEGIVPSDIWLTCRKKLMNNMKIQSARKATHTWLAGKIKCGNCGYALMSINNPVGKQYLRCTKRLDNKSCAGCGKIITSELETVVYQQMIKKLASYKTLTGRKKAAKANPKIAALQVDLAHVDSEIEKLVDSLTGANNVLLSYVNVKIAELDGRKQDLLARIAELTVEAISPEQVSQISGYLDTWENVSFDDKRRVVDLMITTVAATSDSLNITWKI

SEQ ID NO: 7814 - protein, 539 aa, synthetic construct
MTNFEARVYSYLRFSDPRQGTGGSADRQLLYAQRWAADKGLELDESLSMRDEGLSAYHQRHVTQGALGVFLRAIEDGRIASGSVLVVEGLDRLSRAEPIQAQAQLAQIINAGITVVTASDGKEYNRAGLKAQPMDLVYSLLVMIRAHEESDTKSKRVKASILRLCQAWQAGTYRGLIRNGKDPQWLRWTGSAWEMIPERVLAVRRALALYQEGMGAARATKILHAEGLDYSASGISKQQIYRLIKLQALRGAKCLSVDGEDFILEEYYPRLLSEAEWADLQHLAGQRLRRRGHGEIPGIITGIGLTYCGYCGTALVGQNMMTRQRADGTIADGHRRLHCVSYGVNGGCTAGGSCSVVPVERALLTFCSDQLNLQRLLKVGDDGQGIRQQLAVARSTAEKLSVQLGRITDALLADDSGTAPTAFIRRARELEAAQAEAHKKVQQLEYELATVSGSGKPAQAERWVELAELVRNGDYSAREKVRQLVMDTFERIVVFMRGMSAEDRSGKFIDVQLLSRTGQQRLLQINRKTGAWVASEDWD

SEQ ID NO: 7815 - protein, 452 aa, synthetic construct
MKAAIYIRVSTQEQIENYSIQAQTEKLTALCRSKDWDVYDIFVDGGYSGSNMNRPALNEMLSKLHEIDAVVVYRLDRLSRSQRDTITLIEEYFLKNNVEFVSLSETLDTSSPFGRAMIGILSVFAQLERETIRDRMVMGKIKRVESGLPLTTAKGRTYGYDVVDTKLYINEEEAQHLQLIYDIFEEEKSITFLQKRLKKLGFKVKSYSSYNKWLMNDLYIGYVSYSDKVHAKGIHEPIISEDQFYRVQEIFSRMGKNPNMNKESSSLLNNLIVCEKCGLGYVHRAKDTVSRGKKYHYRYYSCKTYKHTHELEKCGNKIWRADKLEEIIISRVKNYSFATRNLDKEDELDSITEKLKTEYSKKKRLFDLYINGSYEVAELDKMMADIDAQINYYDSQIEANKELKRNKKVQESLAELATVDFDSLEFREKQIYLKSIINKIYIDGEQVTIEWI

SEQ ID NO: 7816 - protein, 474 aa, synthetic construct
MKAALYVRVSTDEQAREGYSIESQKDSIIHFVKSQGWEVYHLYIDDGYSAKDLDRPAMQQLIRDAEERKFNVVVFYKLDRLVRSVGDLDKLLKLFDKHNISIRSVTEPFDTTTAVGRFLITLVAALAQWERETISERVVVNMTKKAMSGERNGGRAPFGYDMKDGELVINEEEARLVREIFRVYIDGKGIRQIVLYLQQFGVDKDIRTVSRMLENPVYCGKLRWGKNSKMHEIISDGPHPAIIDVETFEKVQQLRKQRSQEGKRATSPYPFSGVLRCARCGSALSGYYKKERGTKHYICITKKNKGTCNLPMFTEQALTKVFLEMLSPKDPEEFIKLIQNAEIKTENEDHTALIAELEKELSAIKKRKKNWLLALGNGVISPEDYREMTAEDAKREMFIREQLEQLNKKSVSIDLESVLNIAQNIPVLWETANDYEKKSFVNELFETIVVDVPRDYYRARGKTPSVVIKEVRLR

SEQ ID NO: 7817 - protein, 521 aa, synthetic construct
MATITAIPATKTRIHDSALSGFSPKRRVAAYARVSTDMEEQATSYQAQIDYYTVHIQSRADWVFAGMYADEGISGTSTKHREGFQSMIADALAGKIDLILTKSVSRFARNTVDSLTTVRQLKEAGVEVYFEKENIWTLDSKGELLITIMSSLAQEESRSISENVTWGHRKRFQNGKVMVPYSSLLGYKKGTEGNLAIDETQAPTVRLIYQLFLDGSSITEIRAELQRRGILTPRGKTNWSTSTVRSILSNEKYKGDALLQKTFTADFLTKRIEVNEGEVPQYYVTGNHEPIIDPAVWDQVQYELATRHAANTAKIGLFASRLKCAYCGAWYGRKTWASNTKYKHTIWRCNQKYDHAQPCQTTTLRDEQIQTAFLAALNQLAEQYRGQSHLLEVIEAMFNTDQLEAESARLDKKIRALASEIEALVAENQRVAQDQDQYLAKYTQLEAKYQKTLGHKQAIDAEITAKSAKVTAVKTAYTQLADQPIQHFQPSQWTALIDHAVIGANEIRFVFRTGKEINVNL

SEQ ID NO: 7818 - protein, 413 aa, synthetic construct
MTKIEQVTPVRPVRVNLVNVAAYTRVSTASERQLSSIATQVSYYSRLIQSTPGWTYAGVFTDEGITGTKTSGRQGLSDLMNLARNGGVDIVLCKSISRLARNTVDLLRIVRELKNLGVSIRFEREHIDTASADGELLLTLLASFAQEESASLSANVKWAIRQGFKQGKTNSFVLYGYRWDGQRFHIHEREAEAIRRIYTDFLAGTSPEKIVDQLNAEGFRSLTGKPLEPNLARRILKNERYTGNQMLQKTYIPQIGTNREVKNTGELERYWVEDSHPAIIDMETFQQVQAELARRRRLGLAATPSLTTGCFTSRIKCASCGKNYQRKTRYRKAGAYKIWRCWGACLGKGNTCGPDLKETHLKQAVIKILALAKWDEEEIMSRLSCITVTKDQLTLTHDNHRQTVIALARLDGE

SEQ ID NO: 7819 - protein, 536 aa, synthetic construct
MKAAIYSRKSVFTGKGESIENQINLCKDYGKKNLGVEDYLIYEDEGFSGGNTNRPKFKQLIKDAKNKKFDVLICYRLDRISRNVADFSSTLELLQENNISFVSIKEQFDTSSPMGKAMVYIASVFAQLERETIAERVRDNMLELAKTGRWLGGQTPLGFESEKISYFDAEMKERTMYKLSPVKEELDKVKLIYKKYLELKSLRKVTQYLLENNFKTKLGANWHTSVVSDLLQNPTYVKSSQDVFNYLRESGITCVGTPDGIHGLLTYNKKKGTKKQRDKTDWIATVAKHKGIIDSDIWLQIQSKMNCNKAKAPKLGRTHNALLTGLLRCEKCGSPMSVIHGPKDKNGNKTYFYGCSMKIYSKGTRCDNSNIRTTEMETVVINKLKSVTKNNGLLLKELNAVKEQLAPSKEETNELTLLNSKIKSNKQAIENLVKQLSLNSSSTASKYIIEEIEKKEEEIKQTESKMESLKEDKMEMNKLEIDLDLIISNLKNFYDTIDNVDIEKKKYLISVLVDKITWNGSTGEVDIKLWGSSKKK

SEQ ID NO: 7820 - protein, 512 aa, synthetic construct
MKVAIYSRKSIETDKGESIKNQIEICKEYFLRRKSNVQFEIFEDEGFSGGNTNRPDFKIMMNRAKNNEFDIIACYKIDRIARNVVDFVNIYDKLNKLNIKLVSVTEGFDPGTPLGKLIMMILASFAEMERENIRQRVKDNMKEMAKAGKWTGGNVPFGYSTQRIDIGNKKATYLKLDNAKKEIVKEIFNLYISTNSMHKVQKWLYDTKDIKWCLSTIKNILTSPIYVRCDKEIIKYLSNFGEVFGEPNGVNGVITYNRRPYTNGKHRWNDKSMFYAVSKHEGIINSDLWLLVQSIQEKTKTKPRPKNSQVSYSTGTLRCSKCGSSMTVNYNHKNKDGSISYVYVCSGRRSFGKNYCDCKQVSQKILDKQIEEALNSYVKLDIEEFKRTIEVKEPKSQKGKIQTIEKTIQTNKTKINNLIDKISILSNTASAPLIGKIETLTQENEDFKKELLFLKQEELNNNIISPEEKYKKLKQLVNILNSNDIETKRNLLNFSVQEILWDSDTKYADIII

SEQ ID NO: 7821 - protein, 601 aa, synthetic construct
MKTVAIYSRKSKFTGKGESIENQVQMCTEYIKQRLNKDTEILIYEDEGFSGGTTNRPKFKEMIKDIKSKKIHILICYRLDRISRNVADFSNTLEILQENNCSFISIREQFDTSTPMGRAMIYIASVFAQLERETIAERVRDNMLELAKNGRWTGGKIPLGFTSERVKYTDDTGLQREYSKLKINKEEIKFVEFLYKKYLELGSLHKLEVYITQNELKSRNGIMFEKSSLKLILQNPIYVKANYEVINYLKENNWTIYGEIDNKHSLLSYNKTEQSFKNGKHTKVKKSENERFVAISNIEGFINPDLWLNVQRQFDKNRTRFPRLGKTHNALLVGKLRCGKCKEYMLVQHGRVSKTTGKKLFYYTCSLKRKSHKKLCDNGNAKADYVENLVINSLKLLSKSKKKFINGLKILYKNKLKSNEASIERLSLEKSLNEKKNQIDNLVLALSKSSEIEDILLDKIKSLKNDCVEIENKIKNIETSTKEQKLNNINLSLIESIIDECSMIDQLSRNEQKRIIDILIDTIYWYGSGNGKGKIKIKFIGADENTKEIVLSEEKLQQKMLQFYSPSTCKINDFLLSSRKTKKTKGIGKGKIYRSLCRWKR

SEQ ID NO: 7822 - protein, 525 aa, synthetic construct
MAVSRNVTVIPAIKRVGNNKNSESKPKIRVAAYCRVSTDSEEQASSYEIQIEHYTKYIKKNKEWELAGIFADDGITGTSTKKRDEFNRMIEECMAGNIDMIITKSISRFARNTLDCLKYIRQLKDKNIAVFFEKESINTMDSKGEILLTIMASLAQQESQSLSQNVKLGIQYRYQQGEVQVNHKRFLGYTKDENKQLVIDPEGAKVVKRIYREYLEGASLLQIARGLEADGILTAAGKAKWRPETLKKILQNEKYIGDALLQKTYTVDFLSKKRVKNNGIVPQYYVENSHEPIIPRELFMQVQEEMVRRANLRGGKGGKKRVYSSKYALSSIVYCGQCGNIYRRVHWNNRGYKSIVWRCVSRLEEKGSECTAPTINEETLQAAVVKAINELLDNKEPFLSTLQKNIATVLNEENDNTTDDIDRKLEELQQQLLIQAKSKNDYEDVADEIHRLRELKQNALVENAEREGKRQRINEMTDFLNEQSHELEEYDEQIVRRLIEKVTVFDDKLTVEFKSGVETYIKVKE

SEQ ID NO: 7823 - protein, 529 aa, synthetic construct
MTYQEGGEAMKRITKIEGNQDYIFKPKTRVVAYCRVSTDSDEQLVSLQAQKAHYETYIKANPEWEYAGLYYDEGISGTKKENRSGLLRMLSDCETRSIDLIITKSISRFARNTTDCLEMVRKLIDLGVHIYFEKENINTGSMESELMLSILSGLAESESISISENTKWAIQRRFQNGTFKISYPPYGYQNIDGRMIVNPKQAEIVKYIFAEVLSGKGTQKIADDLNRKGIPSKRGGRWTATTIRGILTNEKYTGDVILQKTYTDSRFNRHTNYGEKNMYLVENHHEAIISHEDFEAVEAILNQRAKEKGIEKRNSKYLNRYSFSGKIICSECGSTFKRRIHSSGRRKYIAWCCSKHISQITECSMQFIRDEDIKTAFVTMMNKLIFGHKFILRPLLNGLRSQNNAESFRRIEELETKIENNIEQSQMLTGLMAKEYLEPALFNKEKNSLEAERESLFAEKEQLTHSVNGNFTKEEEVERLLKFTTKSKMLTVYEDELFENYVEKIIVFSREVVGFVLKCGITPKERLVN

SEQ ID NO: 7824 - protein, 532 aa, synthetic construct
MHAAIYARFSSDLQDARSLTDQISLAKNYASARQLPVVSIYEDAALSGATIINRPGMQQLLEDAAAGRFDLLITESIDRLSRGQADIAWLYERLTFFGVRIETLADGQISEIHIGLKGTMAALFLKDLAQKTRRGQIGRVKAGRIPGGKSYGYDVVRAGGERGERTINENEAAIVRGIYRDYAAGKSPLAIVSELNQEGIPGPSGGRWNASALLGSRKRRNGILNNELYRGVIVYNRQRFVKDPTTGKRLARENPESEWHRQDVPELRIVDDTVWNKVHAVRGARGGPHLYQRRRPKRLLSGLLRCAECGGSFSVVKDERMRCSTLTNSRGCSNTRTVKVSEVEERVLAALQNYLLAPEMVAAAVQAYREERRRISEDRRKRRHVLLKDATAVERQLDFLMKMVGEGATDLEKSRQRYIELTAEQSRIAEELADAGNPDAIEFHPEAAELYRAKVADIHNVLKNSEAACREAIVVVRDLIDHILVTPAEKPTPVGLTVVGNLAALLSENPSGTRVAESLVAGAGFEPATFRL

SEQ ID NO: 7825 - protein, 565 aa, synthetic construct
MADVQVIKANTSRVNRKNAKLIERLRVAAYCRVSTDSEEQLSSYNSQVEHYRNMVENKPDWALVDIYADEAISGTQTDKRLDFQRMINDAVDGKIDLIITKSISRFARNTLDTLKYVRLLKEHNIAILFEKENINTITMNGEMLLVILSSLAQQESESISANVKMGLKMKMKRGEMVGFNGCLGYDYDPINKVITINEEEAKTVRYIFQRYVEGAGCFVIAKELTKLKYKTKKGSTNWNDGSVRGIIKNEKYKGDLLLGKTFTVDPISHRRLDNMGEEEKYYINSHHEAIISEEMFNEAQKILNKRNLGSSNMGRKEKYSRQFAFSSKIECGFCGGTATRRRWHSNTSHEKTIWHCVVSTKKGKKYCPDSKGIDEKIIENAFLEAFNMFCLQNKEIVEEFMETVENTINATNSIKELKKLQREVSSIENKIKKLVDMRIDEMIDKDTYELKYTELSTELEKLKAKRDEAELVNEDNIDVKKRIESFRKVFDSNKPIREFDRVVFESAVNKIILGGADEEGNKDPYMLTFIFNSGMSHSLKGKDVVKSNGDSKDEKVCSYTEHDTC

SEQ ID NO: 7826 - protein, 477 aa, synthetic construct
MYSDEGTSGTTPVIQRQGGARLITDALAGRFEVLIVEGLDRLSRDQVEQERTVRRLEHRGIHIIGVADGYDSESAGRKIHRTMRGLINEIYLDDLRHKTHRGLAGQLSRGGHAGGLSYGYRSVPAGEIHKLEIVEAEAEHVRWIYAQYADGWSCQRIAADLNVRGIKTGRGSTWAVSALYGSPAKGSGMLCNEIYRGRLIWNRSQWVKDPDSGKRIRTERPQDEWYVEERPELRIVSDELWSAVRSRMGRPTGQGGSSGHGCQPRTLFGGLLRCGFCGGAVVATSARHYGCVARKDRGESVCRGVTAFRKDVDAALLNAIREELMTPASLEILKASVGEILEDRQRSIRSHATSSSGRRKELDAEIQRLVDAIAAVGISPALRDRLQQAESELAQLIAIQSVGVPQQTISAEAVLTRYPKAFEDLASMLQSDVQKAREHLRRLIGRPVLRAEAGDVLLETWAGRYVLPGKKQPNDQH

SEQ ID NO: 7827 - protein, 515 aa, synthetic construct
MKTAIYLRKSRADLEAEARGEGETLAKHRSTLLKIAKEMNLNVLAVREEIVSGESLVKRPEMLALLEEIEDNKYDVVLCMDMDRLGRGGMKEQGIILETFKRSNTKIMTPRKTYDLNDEWDEEYSEFEAFMARKELKIITRRMQRGRVASVEAGNYLGTHAPFGYDIHRLNKRERTLTINPEEASVVRMIFDWYANEDMGANAIRSKLNDLGYKSKLGNEWNPYSILDILKNNVYIGKVTWQKRKEVKRPDAVKRSCARQDKSDWIIADGKHEPIIPESLFEQVQEKLNSRYHIPYNTNGIKNPLAGIIKCAKCGYSMVQRYPKNRKETMDCKHRGCENKSSYTELIEKRLLEALKEWYINYKADFEKHKQDDKLKETQVIQMNEAALRKLDKELVDVQKQKNNLHDLLERGVYTVDMFLERSNVVSDRITEITFTMENLKKEIKTEIKKEKVKKDTIPQVEHVLDLYFKTDDPKKKNSLLKSVLEKAVYKKEKWQRLDDFELVLYPKLPQDGDI

SEQ ID NO: 7828 - protein, 516 aa, synthetic construct
MYRPESLDVCIYLRKSRKDVEEERRALEEGNSYNALERHRKRLFAIAKAENHNIIDIFEEVASGESIQERPQMQQLLRKLEGNEIDGVLVIDLDRLGRGDMLDAGMIDRAFRYSSTKIITPTDVYDPDDESWELVFGIKSLISRQELKSITKRLQNGRIDSVKEGKHIGKKPPYGYLKDENLRLYPDPEKAWIVKKIFELMCDGKGRQMIAAELDKLGIDPPVTKRGAWDASTITSIIKNEVYTGVIVWGKFKHKKRNGKYTRQKTPQEKWVVYENAHEPIVSKELFDAAKEAHSSRHRPAVVSSKELANPLAGILKCKLCGYTILIQRRKNRPNDYLRCNNPACKGKQKQSIFNLVEEKLLYSLQQVVDEYQAQKIEEVAIDDSKLISFKEKAILSKEKESKELQVQKGNLHDLLEQGIYTVETFLERQKNLVDRITSIENDIEVLKKEIEVEQVKEHNKTDFIPALKTVIESYHKTTNVELKNQLLKTILSTVTYYRHPDWKTNEFEIQVYFKI

SEQ ID NO: 7829 - protein, 487 aa, synthetic construct
MKYAVYVRVSTDKDEQVSSIQNQIEICRYWIEKNGFEWDENSIYKDEAVSGTAWLERRAMQLILGKARKKELDTVVFKSIHRLGRDLRDALEIKEILLGHGVRLVTIEEGYDSYYEGKNDLKFEMYAMFASQLPKTLSVSISAALAAKVRRGEYTGGTVPYGYKIVDKKYVINQEEAEIVREMYELYDNGLGYLRISNALNDVGKYKRSGKLWTYSAVKLIITNPMYKGDYVMGRSTEVKVDGRKKRIQEPREKWVVFENHHPAIIERPLWDKINNPKINKKIKRRVAVTNELRGIARCIHCGSPFVLHTYKYKNKEGEELNYGYLTCGTYKLTGGRGCVKHSRLRYERLRSLVLRKLKEKERDLEKVFKLNDKDKHQEKQKKLRKEKKELEIKRERLLDLYLDGGSIDKETFTKRDANFAKNIKEKELEILKLDDVKALIVEQQKVKDAFKLLEDSENLYPVFKKLIARIDISQNGAVDIRYRFEE

SEQ ID NO: 7830 - protein, 536 aa, synthetic construct
MKAAIYSRKSKFTGKGESVENQIELCKKYASDNGYNEILIYEDEGFSGGNVNRPEFKSMMKDAKLKKFDAIICYRLDRISRNVSDFSTLIDELKLLGIDFISIREQFDTTSPMGTAMMFISSVFAQLERETIAERIKDNMYELAKTGRWLGGTPPFGFSSEPEYYLDNNSKQKKMMKLSPIEEEINVVKLFFEQYLVLGSLGKLQKYLIKNNINTKRNAAWDIKALQLLLRNPVYVKSSDLVVSYLSTKGATVFGNPNSNGILSYNKKDSKDKYRDISEWILSVSMHEGIIEDTLWLKTQKLLDRNKDLAPRLVSGSSSGLFNSVLYCSKCGGRMIQKQGHKSKKTGDLLRYYVCVNKMNSGGDICKSKNIRVDKLENDVMNALFQETSDKGSLIKAIENYKKSLESEMIDKFDIKNYEKQISQKEIQIKNLLDKISLNPNLYDLFEKRIEELSEEIKSLKFKKFELENINNNFKLATKEINASTSMLLNFKKLWIGADSSMRKLLINSLVDYIQYNPDTKEAKIKLFCAKKKGAI

SEQ ID NO: 7831 - protein, 520 aa, synthetic construct
MKKITKIEGNLANSFIKPKTRVVAYCRVSTDSNEQLVSLQAQKAHYETYIKANPEWEYAGLYYDEGISGTKKENRSDLLRMLSDCETGRIDLIITKSISRFARNTTDCLEMVRKLIDLGVHIYFEKENINTGSMESELMLSILSGLAESESISISENTKWAIQRRFQNGTFKISYPPYGYQNMDGQMIVIPKQAEIVKYIFAEVLSGKGTQKVANDLNQKGIPSKRGGRWTATTIRGILTNEKYTGDVLLQKTYTDSHFNRHTNYGEKNMYLIENHHEAIISHEDFEAVDVVLNQRAKEKGIEKRNEKYQNRYSFSSKIICSECGSTFKRRIHSSGRRYIAWCCSKHISNITECSMQFIRDEDIKTAFVTMMNKLIFGQKFIIRPLLNGLRNQNNAASFRRIEELENKIENNMEQSQMLTGLMAKGYLEPALFNKEKNSLEAERENLLAEKEQLTYSVNGNFAKVDEVDRLLKFATKSKMLTAYEDELFENYVEKIIVFSREEVGFELKCGITLRERLVN

SEQ ID NO: 7832 - protein, 523 aa, synthetic construct
MAVSRNVTVIPAIKRVGNNKNSESKPKIRVAAYCRVSTDSEEQASSYDIQIEHYTNYIKKNKEWELAGIFADDGITGTNTKKRDEFNRMIEECMAGNIDMIITKSISRFARNTLDCLKYIRQLKDKNIAVFFEKENINTMDSKGEVLLTIMASLAQQESQSLSQNVKLGIQYRYQQGEVQVNHKRFLGYTKDENKQLVIDPEGAEVVKRIYREYLEGASLLQIARGLEADGILTAAGKAKWRPETLKKILQNEKYIGDALLQKTYTVDFLSKKRVKNNGIVPQYYVENSHEPIIPRELFMQVQEEMVRRANLRGGKGGKKRVYSSKYALSSIVYCGQCGDIYRRVHWNNRGYKSIVWRCVSRLEEKDSECTAPTINEETLQTAVVKAINELLANKEPFLQALQKNIATVFNEENDNATDDIDSKLEELQQQLLVQAKSKNDYEDVADEIYHLRELKQNALVENAEREGKRQRIAEMTDFFNEQSCELEEYDEQLVRRLIEKVTVFHDKFAVEFKSGVEIDVEG

SEQ ID NO: 7833 - protein, 523 aa, synthetic construct
MAVSRNVTVIPAIKRVGNNKNSESKPKIRVAAYCRVSTDSEEQASSYDIQIEHYTNYIKKNKEWELAGIFADDGITGTNTKKRDEFNRMIEECMAGNIDMIITKSISRFARNTLDCLKYIRQLKDKNIAVFFEKENINTMDSKGEVLLTIMASLAQQESQSLSQNVKLGIQYRYQQGEVQVNHKRFLGYTKDENKQLVIDPEGAEVVKRIYREYLEGASLLQIARGLEADGILTAAGKSKWRPETLKKILQNEKYIGDALLQKTYTVDFLSKKRVKNNGIVPQYYVENSHEPIIPRELFMQVQEEMVRRANLRGGKGGKKRVYSSKYALSSIVYCGQCGDIYRRVHWNNRGYKSIVWRCVSRLEEKGSECNAPTLNEETLQTAVVKAINELLANKEPFLSTLQKNIAAILNEGNDNATDDIDSKLEELQQQLLIQAKSKNDYEDVADKIYRLRELKQNALVESAEREGKRQRIAEMTDFLNEQSCELEEYDEQLVRWLIEKVTIHANRVEVEFKAGISIDVKN

SEQ ID NO: 7834 - protein, 521 aa, synthetic construct
MKKITKIEGNLANSFLKPKTRVVAYCRVSTDSNEQLVSLQAQKAHYESYIKANPEWEYAGLYYDEGISGTKKENRSGLLKMLSDCETGKIDLIITKSISRFARNTTDCLEMVRKLIDLGVHIYFEKENINTGSMESELMLSILSGLAESESISISENTKWAIQRRFQNGTFKISYPPYGYDNIDGQMVINPKQAEVVKYIFAEVLSGKGTQKIADDLNQKGIPSKRGGRWTATTIRGILTNEKYTGDVILQKTYTDRHFNRHTNYGEKNMYLVENHHEAIISHEDFEAVDAILTQRAKEKGIEKRNSKYQNRYSFSSKIICSECGSTFKRRIHSSGTRKYIAWCCSKHISQITECSMQFIRDDDIKTAFVTMMNKLIFGQKFILRPLLDGLRNQNSAASFLRIEELETKIENNMEQSQMLTGLLAKGYLEPALFNKEKISLEAERERLLAEKDQLTRSINGNFAKVDEVDRLLKFTTKSKMLKTYEDELFENYAEKIIVYSREIVGFELKCGITLKERLVN

SEQ ID NO: 7835 - protein, 475 aa, synthetic construct
MTTGIYIRVSTEEQAKEGYSIANQKEKLIAFCESQGWSSYKIYSDEGYSAKDMKRPALQEMFNDMTQGVIKIILVYKLDRLTRSVRDLYTMLETFDKHDCKFKSATEVYDTTTAMGRLFITLVAALAQWERENTAERVRVVMENNVKNGKWKGGTLAYGYQLKNGNIVINEDEAATVSFIFNKIKFTGPLAIVRELIKKNIPTRTGSDWHVDTIRGIITNPFYIGYQRFNDSLKQYKGSVKQQKLYKSSHESIISEDEFWEVQEILNARKTHGSKKSTSTYYFSTVLTCGVCGASMCGHLSGNKKTYRCNKKKTSGNCDSSLILESTIVNWLLTNLESISKMLINNTITNTKGTITKEKHVNDFQKELKKITKLKEKHKTMYENDIIDIAELIEQTNKYRHREKEIKEIIHNIDKQDEKNEILKATLYNFNDAWAAATEPERKFLINSIFQNISIHAIGVHTRTKPRDIVISSIY

SEQ ID NO: 7836 - protein, 583 aa, synthetic construct
MKEILFEQGDMMAIGIYVRVSTVGQLDNTSLDEQIRLCKIKAKELNAYDSNIKVYSDGGRSGEDIDTRPELLKLREDVANGLISDVICAHPDRFSRELADKLIVCREFEKCKVKLHYTDVYFANSPEGKLFSDIIGAIASYELALIRKRTVRGRLTKVREYKKIMPMRVAPFGYDKDENGQLVVNKDEKQWVQMIYEWYVHERLTLRQIGERLHGKVRPKRNESPNWNATSISRILTSEIYIGKYYYNRRASEKVRGQLTKEGNPKKTYSIRDEKDWLEIEVEPIIDIEMWNLAQKQRKDNSTNKHVGNNKYHYLLKSLLKCGHCGRRFDATTYPGSKNRDTGEEYKIRHYRCPNTVPRKYGPEINKCVAVSLNADQIEGYIWNQVLQIITDPEKFISRFQGQGNEAISDVRNRKILFEKELAKKMNALEKVERAYFEADSDSEERRLDKLRKDYKNEITSLEGEISNCQAKIDAHRMEELTSEQITFMVQKLREQIQNGIEVPFETKRDIVEMLFEEIIVTVNRADDDDTTSGTKIDITSVGIFDKLSQDAINSGVCSQPQKIRQYRRRSGGPDLHRHHWSD

SEQ ID NO: 7837 - protein, 481 aa, synthetic construct
MVTTTTINEITRAIAIYLRVSTEEQAQHGTSIDVQKERLIAYCQSQGWANYKLYIDDGYTGTKLERPAMQRLIRDIEKGKIHGVIVYKLDRLSRKQKDVLYLLEDVFEKNNVIFKSATEPFDTSTPFGKAMIGVLAVFAQLERDMIVERTVSGRREKVNQGFWPGGRVPFGYSWDKENKQLEIIPEEAQIVREIYKRYITGQSRLQIAEWAASRTKARVIDHSVIRDMLARPIYMGKLINEGELVDGNHEAIIDIETWKAAQREQEARAEGSTPLGEYLLTGLLECGVCNGNVVHVIRNTKPRGKLYSYNLYACKQQHVRKKDRNNHCSLGYFSRASVENFVISKIKSYSVDPKKFLEDVDNKNNTEDDSIISSLTIKLNSVNESLENLLDAIQSGVKASTLSDRINRLELEREALQNQLDDVLKNSYEGVSKPDNIANLLSEIGPAWDYLNEEEQKIVLRTMVRKVILKKDGNHQVVWDI

SEQ ID NO: 7838 - protein, 576 aa, synthetic construct
MALEVEVIKASRKISDRNAGKLSDILRVAPYARVSTDTEEQLNSYKSQVAYYTDLVSKRSDWVLVDIYADEAITGTQVTKREDFQRMINDCMDGKIDMIITKSISRFARNTLDTLKYVRMLKEKNIAVFFEDENINTLTMDGELLLVILSSVAQQEVENISANVKKGLKMKMKRGELVGFQSCLGYDYDVNTKQITVNQEEAEIVRYIFERYTSGIGAYVIAKELTEAGHKTKYGRGEWQDTTVLGIIKNEKYKGDLLQGKTFTVDPISKRRLDNYGEEDQFYVKNHHEPIVSEEVFEKAQDILHRRGKNRRRGAKGKRDKYSRKFAFSSKLECAFCGSNLSRRNWHSGTPHEKVIWQCVTATKKGKKYCPHSKALEEKLIEGAFVESYKLVCRNNSDVLDELMKRMESVFSDQNNQKRLNKINSEIQAMEQKRCRLIDLCLDEKIDRATYEQKYAELDTSLTKLLEEKEQLEQSAQDEIDLGKRLEHFRKVLQTNEVLTTFDRNVFESIVDKVIIGENTNQESPEPYRLTFVYKTGFHNSIQSKMHKQKKSLRSERGRVPSYSENNTCGVLCVAH

SEQ ID NO: 7839 - protein, 607 aa, synthetic construct
MKTDRIYNVGVYCRLSKDDGNEAESASIGTQKAILTDYVKRQGWHLAKIYVDDGYSGTNFNRPDFQAMLKDIENGLIDCVVTKDLSRLGRNYLDCGLYLEVFFPEHNVRYIAVNDGVDTLNRAAMDITPFRNILNEMYAADVSVKIKSAYRARFNKGKFMATKAPYGYIKDPADNNHLLIDEKTAPIVRKIFDLALAGNGIGKIRKYLNSQRILRPAAYAAENGEGYERYFKDSEENRYIWSENSVRSILRSPVYAGNLTGYKRPTISMKSKKRPSRLPEEWETVPGTHEGIVTQKEFDTVQQLMTSRRREKNQYGYDNVFLGVLKCADCGYAMRAASANRRKRPDIIDCVQYCCNNFGRYGNVHCTSHTIEARDLLNAVMTDINEYARMAVNDEKAVKTLQQRLSKISDQEAREYGRERRRLAKRVAELDKLFAALYEDKVMEKITERNYRLMAAKYEQEQMNIEARLSTIDAELVAKGRNDKGIAAFVERIREYKGITTLTARIVNELIDRITVSERVKVEGGGYEQHIRIYYKFVGALDSARVHEVTPRRCLVPDKACQRCGEVYSPLSNVAKYCPTCRPIVRKQQEIESSKRRVRGKKHQNGA

SEQ ID NO: 7840 - protein, 488 aa, synthetic construct
MKYAVYVRVSTDKDEQVASIQNQIDICRYWIEKNGFEWDEDAVYKDEAVSGTEWFKRQAIQLILAKARKRELDTVIFKSIHRLARDLRDALEIKSILLGHGVRLVTIEEGYDSYYEGNNDMKFEMYAMFAAQYPKTMSVSISAAMNAKVRRGEYNGGRVPYGYRVVDQKYVIDDEESENVKELFDLYNQGLGYLKVALYMNDKGLRFIDGKLWRDYHIRHIINNPFYVGDYIAQKYTKVKVDGRRKQTVNPKEKWVVYKNHHPAIIERDLWDKIHSFEKKEKNRTKRRVSVDNELRGLVYCAHCGQPMKAEAVKKTQRDGVIKYVYMRCSKYRRTGGRECVKHVPLYYNQVRKLIVEKLKEKEQDLDEQISGGHKNKNKQKISKVNKEIKEWERKKEKLLDLYLDGQNISKEVFTQRDKKIDKIIREKNMELLKLNSLEEQIKEDNATKKAFDLLKNSENLYECFNTLIKRIDITQNGGLDIYYRFEE

SEQ ID NO: 7841 - protein, 462 aa, synthetic construct
MKCVIYRRVSTDMQAEKGSSLDAQKERLNAFAISQGWEVTNDYVDDGYSAKDMNRPALQRLLSDMRKNKFDIILVYKLDRLCRSVRDLNDMITEFEKYNVKFKSSTESLDTTTATGRMMINIIGTLAQWEREQTAERVSMIMNQRSKKGLWNGGPMPYGYTYKNNVASIIEHEAKVVRFCFNKAITHGAQAIARTLNENGYRTRDGNQWLMRSVLRMLHNPLYKGYVTYEEDRISQLAKVKIEGFHPIISEEVFDKIQYIIKQRTLSPTRVKSDVIFPFSGILVCPKCGGKMSGTTITAKGVPYKYYRCSRFVHSICDQSLINTKHINAEFPNTLERISKELPLNSKDNDIDRKHIEKQLKSFEGKRSRVKELYIEGEISRQEYSDKISVLNDQKEELLSVLENANQDISQKEILNLIEEMKVSWNLWPDEIKAKIIRGLFSEVHFKQITRREISIIDYKFI

SEQ ID NO: 7842 - protein, 484 aa, synthetic construct
MKYAVYVRVSTDRDEQVSSVENQIDVCRYWLDQHGYDWDENSIYFDDGITGTVLLERHAMQLILEKAKKRELQMVLFKSIHRLARDLKDALEIKEILIANGIRLVTIEEGYDSHYEGKNDMKFEMFAMFASQYPKTLSVSISAALSAKVRRGEHTGGRLPFGYSDREKKYVINEEEAEIVREIYDMYSKGIGYIGIAKILNERGIPSKTGGKWQMSSVQRIIKNPIYKGDYILNQYTTVKISGRKKQIKNPEEKWTIFKKHHPAIVSEEQWELVNKPRSAKKRRPALWNEFRGIMFCAHCGSAMQVVYSAKKKKDGTKEEWRYLKCSRYKRYGSDECVRHAPIQYHEFREFILENLKEKEKQLETEFNLNEESSNAEKKNKLQREIQRIEEKRKKLIDLYMEELIEKEEFLSRRNELEKTIKEKEVQFVSMEDKSEVKRTQDEFRKAFALLDESKNLYEEFKRIIDRIEIFENGDIKIVYRIEM

SEQ ID NO: 7843 - protein, 516 aa, synthetic construct
MYRPESLDVCIYLRKSRKDVEEERRALEEGNNYNALERHRKRLFAIAKAENHNIIDIFEEVASGESIQERPQMQQLLRKLDGNEIDGVLVIDLDRLGRGDMLDAGMIDRAFRYSSTKIITPTDVYDPDDESWELVFGIKSLISRQELKSITKRLQNGRIDSVKEGKHIGKKPPYGYLKDENLRLYPDPEKAWVVKKIFELMCDGKGRQLIAAELDKLGVDPPVTKRGAWDASTITSIIKNEVYTGVIVWGKFKHKKRNGKYTRQKTPQDKWIVYENAHEPIVSKELFDTANEAHSSRHKPAVISSKELTNPLAGILKCKLCGYTMLIQTRKDRPHNYLRCNNPACKGKQKQSVFNLVEEKLLYSLQQIVDEYQAQKIEEVEVDDSKLISFKEKAIISKEKELKELQNQKGNLHDLLEQGIYTVEIFLERQKNLVERITSIENDIEVLQKEIEIEQVKEHNKTEFIPALKTVIESYYKTTNITLKNQLLKTILSTVTYYRHPDWKTNEFEIQVYFKI

SEQ ID NO: 7844 - protein, 515 aa, synthetic construct
MKTAIYLRKSRADLEAEARGEGETLAKHRSTLLKIAKEMNLNVLSVREEIVSGESLVKRPEMLALLEEIEDNKYDAVLCMDMDRLGRGGMKEQGIILETFKRSNTKIMTPRKTYDLNDEWDEEYSEFEAFMARKELKIITRRMQRGRVASVEAGNYLGTHAPFGYDIHRLNKRERTLTINSEEASVVRMIFDWYANEDMGANAIRSKLNDLGYKSKLGNEWNPYSILDILKNNVYIGKVTWQKRKEVKRPDAVKRSCARQDKSDWIVADGKHEPIISESLFEQVQEKLNSRYHVPYNTNGIKNPLAGIIKCAKCGYSMVQRYPKNRKEAMDCKHRGCENKSSYTELIEKRLLEALKEWYINYKADFEKHKQDDKLKETQVIQMNEVALRKLEKELVDVQKQKNNLHDLLERGVYTVDMFLERSNVISDRINEITSMMENLQKEIKTEIKKEKVKKDTIPQVEHVLDLYFKTDDPKKKNSLLKSVLEKAVYKKEKWQRLDDFELVLYPKLPQDGDI

SEQ ID NO: 7845 - protein, 515 aa, synthetic construct
MKTAIYLRKSRADLEAEARGEGETLAKHRTTLLKIAKEMNLNVLSVREEIVSGESLVKRPEMLALLEEIEDNKYDVVLCMDMDRLGRGGMKEQGIILETFKRSNTKIMTPRKTYDLNDEWDEEYSEFEAFMARKELKIITRRMQRGRVASVEAGNYLGTHAPYGYDIHRLNKRERTLTINSEEASVVRMIFDWYANEDMGANAIRSKLNDLGYKSKLGNEWNPYSILDILKNNVYIGKVTWQKRKEVKQPDAVKRSCARQDKSDWIIADGKHEPIIPESLFEQVQEKLNSRYHVPYNTNGIKNPLAGIIKCSKCGYSMVQRYPKNRKETMDCKHRGCENKSSYTELIEKRLLEALKEWYINYKADFEKHKQDDKLKETQVIQMNKAALRKLEKELLDVQKQKNNLHDLLERGVYTVDMFLERSNVVSDRITEITSTMENLKKEIKTEIKKEKVKKDTIPQVEHVLDLYFKTDDPKKKNSLLKSVLEKAVYKKEKWQRLDDFELVLYPKLPQDGDI

SEQ ID NO: 7846 - protein, 484 aa, synthetic construct
MQDTQPTPKRCAIYARISSDPRGQGLGVERQEEACRALAERNGWQVAFVETDNSISAYSGKPRPAYIRMVEAIKRGEVDVVIAWQLDRLYRRMRELEDYIELVEATGIQTQTVMAGAFDLNTAMGRAMARTAVSFATLEIDNSKDRVLAAKLQAAKSGKPSGGNRGYGYEQNGMVIIEHEAAIVREVIDSFISHGSWQKIAWDLNARNIPTAKGNKWNAANVRNVAVRPRNIAIRVHNNDEYPAQWPPLITQEKWEDLQLAIKRGQVLYGKRSYSKKHLLKGFVYCGRCGCRMHIVSVQQRNGSYIPAFGCVKRDYRGDEVGCGRMKRRKDPIEDLVIDCIMYRLDSPELGAMLEDRQSGTPELKKLMHDHEAQASRLQDVLEGYATGELTLDEYKSAKTHAQARLESLGREIDAKSSKATIANVPAGQTVREAWDKADLQWRRQLVDTLIEKILVLPTNPRDPKTPYKEWLFDAKKVKIDWKV

SEQ ID NO: 7847 - protein, 461 aa, synthetic construct
MAIYARISQDRTGDELGVKRQLQDCRAEAERRGWHVSEEYVDDDVSAFSGKKRPAYERMLRDLGEGRRDGVIVWHMDRLHRRPIELERFVDTCTRAGVRDVVTLSGDIDLAKGDGLLMARLLAAVAANESDAKRRRGQRKALEIAQSGQPHMGGPRAFGFHDDKVTHHPGEAAVIRDLAARALAGETLISMATSLQDNGVQTVGGKDWRTNTVRTLLTNPRNWGMRVHQGQIIGPATWEPIITPDQGERLQRLLLDPARRTNRSARRYLLTGLLLCGVCGTRLNSAPRGETRRYGCRTGPDSRGCGGVYIYAEMLEEFIAQAVLYRLDSPAMHETLADGGDDQDEARTVADAIQADTNKLDDLAAMWADGEISSTEWSQARKRIQNRLEANRRTFARLTHRDAVADYIGHGAELRKQWNGLNLSRQVAIIKAVLNHATILPATKIGRHGLDPERVVPDWRQ

SEQ ID NO: 7848 - protein, 462 aa, synthetic construct
MTTTTNPAPRRAAIYTRISKDPNLEGLGVARQLEDCRKYAAEQGLEVVAELEDNDTSASGLKTRPSYLQLRELMEGRHIELAIVWALDRLHRNMSELAAFIELSQGTGVAVASVMGGAIDLSTADGRFSASIFGAVAAAEREKAQERVKRKHLELATNGKWPGRRVYGYEADATVIPAEAAIIRELAERVLAGDSFNEIARDLNTRGVGTVNSSTWRASTIVAIVSAARIAGHREHHGVITAKNAWTAIIDDETSMLLRARLAPGQTGVKRGGPRKHLLTGLLKCGKCGYPLVRGLGGRLRVPIYRCAKNVGAPNCGGLTINAAPAEEFLAEVLFQARDRPAELETKDAGELAKWAAEREKLDQRKKQLAELVGSGQMDVADWAIASTALKKQLADLPEPDLRPRRPRQTGAELRAEWPTMSTPERRKLLEDTFVEVKVMPRLIVTGAKVFDPRRFAIVWRR

SEQ ID NO: 7849 - protein, 515 aa, synthetic construct
MKTAIYLRKSRADLEAEARGEGETLAKHRSTLLKIAKEMNLNILAVREEIVSGESLVKRPEMLALLEEIEDNKYDAVLCMDMDRLGRGGMKEQGIILETFKRSNTKIMTPRKTYDLNDEWDEEYSEFEAFMARKELKIITRRMQRGRIASVEAGNYLGTHAPFGYDIHRLNKRERTLTINSEEASVVRMIFDWYANEDMGASAIRNKLNDLGYTSKLGNEWNPYSILDILKNNVYIGKVTWQKRKEVKRPDAVKRSCARQDKSDWIIADGKHEPIIPESLFEQVQEKLNSRYHVPYNTNGIKNPLAGIIKCSKCGYSMVQRYPKNRKETMDCKHRGCENKSSYTELIEKRLLEALKEWYINYKADFEKHKQGDKLKETQVIQMNEAALRKLEKELVDVQKQKNNLHDLLERGVYTVDMFLERSKVISDRINEITSMMENLQKEIKTEIKKEKVKKDTIPQVEHVLDLYFKTDDPKKKNSLLKSVLEKAVYKKEKWQRLDDFELVLYPKLPQDGDI

SEQ ID NO: 7850 - protein, 515 aa, synthetic construct
MKTAIYLRKSRADLEAEARGEGETLAKHRTTLLKIAKEMNLNVLSVREEIVSGESLVKRPEMLALLEEIEDNKYDAVLCMDMDRLGRGGMKEQGIILETFKRSNTKIMTPRKTYDLNDEWDEEYSEFEAFMARKELKIITRRMQRGRVASVEAGNYLGTHAPFGYDIHRLNKRERTLTINSEEASVVRMIFDWYANEDMGANAIRSKLNDLGYKSKLGNEWNPYSILDILKNNVYIGKVTWQKRKEVKRPDAVKRSCARQDKSDWIIADGKHEPIISESLFEQVQEKLNSRYHVPYNTNGIKNPLAGIIKCDKCGYSMVQRYPKNRKEAMDCKHRGCENKSSYTELIEKRLLEALKEWYIDYKADFEKHKQDDKLKETQVIQMNEVALRKLEKELVDVQKQKNNLHDLLERGVYTVDMFLERSNVVSDRMNEITETMEKLKKEIKTEIKKEKVKKDTIPQVEHVLDLYFKTDDPKKKNSLLKSVLEKAVYKKEKWQRLDDFELVLYPKLPQDGDI

SEQ ID NO: 7851 - protein, 515 aa, synthetic construct
MKTAIYLRKSRADLEAEARGEGETLAKHRTTLLKIAKEMNLNILAVREEIVSGESLVKRPEMLALLEEIEDNKYDAVLCMDMDRLGRGGMKEQGIILETFKRSNTKIMTPRKTYDLNDEWDEEYSEFEAFMARKELKIITRRMQRGRIASVEAGNYLGTHAPFGYDIHRLNKRERTLTINSEEASVVRMIFDWYANKDMGASAIRSKLNDLGYKSKLGNEWNPYSILDILKNNVYIGKVTWQKRKEVKRPDAVKRSCARQDKSDWIIADGKHEPIIPESLFEQVQEKLNSRYHVPYNTNGIKNPLAGIIKCSKCGYSMVQRYPKNRKETMDCKHRGCENKSSYTELIEKRLLEALKEWYINYKADFEKHKQDDKLKETQVIQMNEAALRKLEKELVDVQKQKNNLHDLLERGVYTVDIFLERSKAVSDRINEITSTMENLKKEIKTEITKEKVKKDTIPQVEHVLDLYFKTDDPKKKNSLLKSVLEKAVYKKEKWQRLDDFELVLYPKLPQDGDI

SEQ ID NO: 7852 - protein, 486 aa, synthetic construct
MEPYAVYVRVSTDRDEQVSSVENQIDICRNWLERNGFTWDEKRVFKDEGISGTLFVDRPAIQLLLQKAKAKEIDMVVFKSISRLARDLKDSLEIREVFLAHNVRIISVEEGYDSVKAGKNDMAFELWSLFSAQYSRTLSSSITAALAVKVRRGEHIGRVPYGYDRINQKLVINEEEANVVKRIYDWYNSGWGFKKITNELNRLGIKPKNKSVWQMTSVQRIVRSPIYKGTFILNQYTSVKVGGKKKQIRNPKEKWFVFPSHHPAIIDKKTWSRVNEKDITDNKTKITAWNEFRNLAKCAVCGSNMVIVQSHLKKKNGERTEWKYLKCSQYRRAGKHGCVNHVPIQYREFRQFIIDLLIKKGESVTLKLQSNVEQGQEKKRKKLKQLMNVNEQKKKSLLDLYLEELINKEEFERKRNDLETEITKASHELFILQQNDVVQTDIKTIKEAFEQLQQREHDLYHVFQTLIRKISLHQDGTVDIEYNFEQ

SEQ ID NO: 7853 - protein, 525 aa, synthetic construct
MKTIREVLGEGKKGAFYARVSSDKQTIDMQRHHVYGFIKNYEGEIVKEYIDPGESAFKKKITQRPQMMKLIEDVEQGKYDFVIVYADDRLARSELEHMQIRLIMKQKNTDVILTSTSEIYTERDSITQLIRDGATRYEVERISHRTRDAYKQRTADGKRMGGPIPYGYKEDEKTKELSIVEDEKDVVLKIYEMYHKGDGFSAIANMLNEQKEKTNCQHWKKEAVKRILTNPYYAGYVTNKRIKPGAGNSVEDFSKWEMERCEEIPPIMSKAEWLTTIRLFEQKRNGEIPPKKLKTEYILRDLIHCKSCDLPLMPKNQETKGKNGKKYGHKKYICPNKSCKMSHIMGELHDSIFNSIVAEIKDKVISKSYTELIDEIEKSVEGQMRNTQKETKRLTKQIENCLALVKESEREIDALYNQKKRLSEDNPDIDPLLDVMLDYRIHLLHEIKESEEIIKQKQLEIEHIQEVSVNRKVLQQNVLKELALEFSSLKLDTKRIRHFLVHIVDKIMIDKDMNTEYTLKINLGY

SEQ ID NO: 7854 - protein, 479 aa, synthetic construct
MIGAIYARYSAGPNQTDQSIEGQVADCRVCAEQKGIQIVEVYADRHVSGKSIIGRNEFQRMLRDAEQHRFECVIVWKIDRFGRDRQDIALGKLTLKRAGVKLLYAKESVPEGPEGIILESVLEGLAEYYSADLRQKIVRGMRETAKKGLYCGQPLPIGYTVDENRHVVIDEEKAAIVREVFRLHNTGARTRDLIDLFRKHGINGSRGKPISQSVIYRMLRNEKYLGRFDVQGVELPVEPIIDPVTFEEAAKHFKTSRNNAAGRAKVDYLLSCKCFCSYCGAMLTGESGTGHAGKIYHYYKCGAKKRGAKCELKPIKRDHLENRVIESTVQDMLTDEMIDTITARIMEIQKQDDAQNPAEQLRKQLDSNRKRQRNILDAIEETGAKGLAARLAALEDEEYELLAEISRAEIKKPRLTEAVIGAWLRSFRNGDMNDAAFRQRLVDTFIAKIEVRNGEALIFYNIRENGPHSKVRVRSECWR

SEQ ID NO: 7855 - protein, 591 aa, synthetic construct
MTSEHADEAAIDSLVTPTPFAGAIAVSYLRVSTKEQAEKGGNAEGFSIPAQREANQRKADQLGATIVEEFVDAGESARKADRPELMRMIKYVATHKTNYCIVHKVDRLARNRADDVTIHLALKDAGVTLVSATENIDETPSGMLLHGIMSSIAEFYSRNLATEVVKGLSQKAAQGGTVTKAPIGYRNVGIRDDMGREVRTVEVDEERAGLVRWAFQVFASGDWTTSQLHQELVARGLTTLPTPRRPSKPIAKSTVHRMLTNPYYKGAIVYQGVTYRGAHDPIVPVEVWEQVQIVLGTHKSAADATQIHDHYLKGSVFCGQCGSRLIVCNAKSSQGTIYPYFVCSSRHAGRNNCTRQAMLIEDVERLIERFYTRVQIPAATRQALSEMIHAKFDQMMSEGAAELAELATRRTELEGEQTKLLQAHYAGAIPLDLLKREQDRINASLETIEFRIQAHNGEYADARANLDDSLVLMSNMADIYANADDANRRLCNQALFKAIYIDEDNDIRVGYRTPFDGLSNTDLQADALTWADQAHAQAEAHAEATGARKKGQAETTTKGGPLVESSNLTHLGWLTGLEPATPWTTTRCSTD

SEQ ID NO: 7856 - protein, 547 aa, synthetic construct
MKLLVPYIRWSTKEQDSGDSLRRQTNLIDAFYAKHKDDYYLLPAHRYVDKGKSGFHQQHKNQGSDFRRMFENVMSGTIPEGSLIVVENFDRFSRADIDTAIDDVRQILRKGVSILTLGDGELYDKSALTDPVKLIKHIIIAERAHQESLVKQKRIAQVWNHKTQLARELKKPMGKQAPGWLELSEDGSHYIVDEDKASLVNIIYDKRLSGMSMFAICKWLNEQGYPTINQRKVRISKTKKPDGNWSALSVKHILTSRSVLGYLPAKISSEDRKTVLREEIEGFYPQIVTDSKFYAVQQLLEETGKGKTSSGEHWLYVNILKGLIRCKCGLVMTPTGIRKPVYQGTYRCNGNKESRCSYGTVSRKLLDTQLCSRLFSKLSQLHDEATDTAKLDELQRRLNTVDGELEKLTETLIQLPNITQIQEALRVKQEEKDELIVQLSREKARVKSVSSLDLSGLDMESVEGRTEAQIIIKRLVKEIVVSGNEKLVDIYLHNGNMIRGFPLDGKDDHTLTLEEATDEMQSLDDMLIFGEPVTRIYPAGDMEEVDA

SEQ ID NO: 7857 - protein, 525 aa, synthetic construct
MSANVTIIPPRKIAGNTVDKHKDKPKLRVVAYCRVSTDSEEQATSYDTQVQHYTDYISRNPLWEFAGIYADDGISGTSTKKRVGFNDMIHDCMSGKVDMVITKSISRFARNTIDCLKFVRQLKDKNIPIIFEKENINTMEASGELLLTIMASLAQQESASLSQNVKLGLKFRYQEGKVQINHNWFLGYTKDDEGNLVILEKEAQVVRRIYREYLEGASLRDIAEGLEKDGVKNGAGHLKWHLSNIKTILQNEKYIGDALLQKTITTDFINHVRIKNDGTEPQYYVKDSHASIIPRDIFFKVQEEMVRRANMFSGEENKKRRVYSSKYALSSLCVCSKCGDVYRRIAWNNRGVRSVVWRCCTRWENGPSACDAPTVKEEELQSATVKAINKVFSIPDEVLDTLNNNIREIIAGNNLNELETVDKRIADKQAILLTLLKAKKDYTKIADEIDELKVKKQQLLIEKAGQEDAKRRIREMEDFLKSESHDISEYDEKLVRKYIKKIKVYEDRFSITFKSEISVDIERAS

SEQ ID NO: 7858 - protein, 530 aa, synthetic construct
MKMITKLEAKQPDNSLRKIRVAAYARVSTDSDEQLLSLEVQKEHYENYIKSNPYWEYAGLYFDEGISGTKIDKRESLKQLLKDCESGQIDRVITKSISRLARNTVDCLEIVRKLTGLGIYLYFEKENIDTEHMSSELMLSILSSIAQSESRSISENSMWSIQKRFENGSYIISSPSYGYKNENGKMIIVPKEAEVIKDIFSMALLGKGGHVIANELTAKKIPAKRGAKWSSTTVNAILNNKTYTGDVIFQKTYTDDNFNRHKNCGEKKQYVIENHHEAIISHETFNLVHELRQKRKLKLNITGGSNKYLARYVFSGKLYCGNCHSRLKKHDRYKKDGAYVVWCCTKHIREIKCCPMKAVKEEYVKLAFLQMLNKLKATYAQILTPFIKSLRNVNNKDGLNKVIELEEKKLKLQEQEQVLSKLLAGGYIEMDSYYLESNQLQTEIDTCLKEKLQLSNSLNGNLTHLNEAQKLQRFVSVTEVFSEFKDENFLDFVDDVVVKSRTEFIFHLKCGLDLEEEVKETWHTSHMVTE

SEQ ID NO: 7859 - protein, 550 aa, synthetic construct
MNKLNRQPSYTLDNVGKITALYCRLSKDDELQGDSNSIINQKSMLKKYAEDNHFNNLMFFVDDGYSGTNFQRPDWLKLTALIDEGKIGTIIVKDMSRLGRDYLQVGMYTEMVFPNADIRFIAINNGVDSNNQSDNDMTPFINIFNEFYAKDTSRKIKAVFKAKGQSGKPLCINPPYGYLKDPEDKNHWIVDEEAASVVREIFRLCVNGYGPSQIANELIKRNIPTPSEHFFSLGIKIPSAKSEIKGVWNQKTISNMLEKQEYLGHTVNFKTRKKSYKCKKTLLNPKEDWLIFKNTHEAIIDQETFDIVQRIRDGRRVRTNLGEMPVLSGMLFCADCGNKLYQVRGKGWSHDKEYFVCATYRKQKGKCSSHQIRNIQIEAILLHELRMITSFAKQHEEEFVGLVMKKSEKELTQKLKSSNRELEQAKARISKLDTIVQHLYEDNLDGKISDERFKSMSESYDKEQAELKSKIESLEAFISKAQEECLNVDSFLKLVRQYTDIQELNAEIIRTFVDKIYVEKSEKVAGTRTKKQTIWIQWNYIGAVDIPLHK

SEQ ID NO: 7860 - protein, 560 aa, synthetic construct
MTKLYSYIRFSSMRQGEGSSYERQIKMAKEIADRYGLELVNDYQDLGVSAFKGANSKTGALSRFLDEIGRSIPVGSWLFIENLDRLSRQDIISAQELFLSIIRRGITIVTGMDNKIYSIETVTANPMDLMFSILLFIRGNEESQTKRNRTNSSALLKIKAHQQNPQSPAVAIEEIGKNMWWTDTTSGYVLPHPVYFPILQKIVKMKQEGHSTGSVLDYLNEHHEPPAPTSNKQHRKWSIAMVSRLFKTKALIGVKEVTVDGVQYELKDYYPRVLSDSEYYFLKNNLIKKAWSFGHAQEKTIPLLSGIGLLKCVHCGSPMVKRKAANGKVEQYRYTCDGEGSGRTDCLYPNWGFRASSLEGAVLQLLADKVWIAEDKANPIPEIQVQIDEISRKIDNLINLSAMTGATKELANQITDLNTQREALHEEIRLFEREMYSVDSQGWEKLAQFDLSDVQNEERLQIRLKIKGALRSIECARIDRNKNLFVLVYLDGLRQRIVIENNRGIRKGQIFVDLKTINDRQILESAGMVLHDHIDILIDEKAFYDGLPKEEDGPLSKFGI

SEQ ID NO: 7861 - protein, 544 aa, synthetic construct
MIRAAIYARYSSDQQREASIEDQIRVCRERAEREGWAVINCYTDHAISGASLMRPGIQMLMQDGAAGNFDVVLAEDLDRLSRDQEDIAGFYKRMSFADIEIHTLSDGKINDLHIGLKGTMNARFLKDLAQKTRRGLRGRVEAGKSGGGNSYGYKVVKKLDAKGEPIRGDREIIPEEAEIIRRIFMEFAAGHSPRAIAAGLNEEKIPGPRGKEWGASTIYGNRRRGNGILNNDLYIGKLVWNRLRYIKDPDTGKRVSRLNPKSEWLTTDVPELRIVDDELWQRVKGLQDELAEKGDFRKCPRPPKLLSHLLKCSECGGGFSKISNTHYGCSTARNKATCTNRRAIKQDALEEAVINALRTHLMDAELCERFCEEYTAHMNHLIKSRTTQRARYERELRELDKQTDNIIEAIKAGLANQRLKEELDSICERESELKLLLTNLAAPPPILHPSMALRYKEEVTNLVRTLNDPDHRAEASQLLRKLVDKIVLKPDPDGTGLLIDLYGDLAGILNFAAHKDNPLKLKEISMWQETLVAGVGFEPTTFRL

SEQ ID NO: 7862 - protein, 570 aa, synthetic construct
MTQKDTSIESEKAALIYCRVSSKRQKDQGSGLDSQEHRCREYAAGKGLHVEAVFPDDISGGGDFMKRPGMVALLAYLSAQTDKRYVVIFDDLKRFARDTEFHIKLRRELSDRNASVECLNFKFEDTPEGKFIETVFAAHGELERQQNGRQVVQKMKARVEQGFWVFQAPFGYRYEKSKRGGKELVRDEPVASVIAEALEGYASGRFATQVEVQRFLESQPSFPKDFPDGTIRPWKATRLLTRPVYAGYVHAPMWGGSLRKGQHEGLISYRTFEKIRQRLEQGVYAPARKDMRDDFILRGAVQCAECETPLTSSWSKSKTGKKHPYYRCYNKGCNSYGKSIRRAEIESEFETLLQSLEPEAGLFEISRAMFAQAWDQRLAQTSEILAGLKKQMADADKQVARLLERIVETDNPSVISAYEKKIERLEQSKLITAEKVQKQSRPKHSFEEMFELALGFLSNPWKLWDSGNMHLRKMVLRLAFTDRLSYHREKGFLNPKKSLPFKMLEGISLPGKQMVLPERFELSASPLPRECSTPELRQHPARSVDRHWRRANAAGIAITPLPWQAAEDAK

SEQ ID NO: 7863 - protein, 594 aa, synthetic construct
MSDVMPTKAVIYCRVSSKGQQSDGHGLESQETRCRQHAAAKGLEVAAVFPDTITGGIDFMKRPGMKALLAFLDAQPDERFTVIFDDLKRFARDTRFHLDLRDAFRARQATIECLNFKLDDTPEGEFIETIIAAQGALERKQNGRQVAQKMRARMENGYWIHNPPVGYAYKTVKGHGKLLVANEPLASIVRDAFEGYAAGRFQSQAEIKRFFETFPEFPRNRAGKITQQRVTDILTQPLYTGHICSETYGLDWLKGHHEPLISIATFDKVQERRNGIAKLPARKNIGNDFVLRGFVHCAECQKPLRSSWTTGSTKRYPYYLCQTKGCGSYGKSIARDKIEGDVADIVKSMQPTRKLFDLAVMMFRDTWEHRASLAADIVKSTENQLRHTEKQIEGLLTRILDATNPTVVRAYEDRIAGLERDKLKLRETMAHHVPEAGTFDQMLELSLRFLANPWKIWQSGNITMRRTVLRLAFAEPLNYHRNEGPRTPKTTLPFKALAGVLGQDMRYGAQERTRTSTPLRVPAPEAGASTNSATWAMSYGRAHLDGSRCGVNVQIATFKAKRLSNRIGLLPDPSAGYFDDSVSLAVTRVSAPSS

SEQ ID NO: 7864 - protein, 550 aa, synthetic construct
MNKLNRQPSYTLDNVGKITALYCRLSKDDELQGDSNSIINQKSMLKKYAEDNHFNNLMFFVDDGYSGTNFQRPDWLKLTALIDEGKIGTIIVKDMSRLGRDYLQVGMYTEMVFPNADIRFIAINNGVDSNNQSDNDMTPFINIFNEFYAKDTSRKIKAVFKAKGQSGKPLCINPPYGYLKDPEDKNHWIVDEEAASVVREIFRLCVNGYGPSQIANELIKRNIPTPSEHFFSLGIKIPSAKSEIKGVWNQKTISNMLEKQEYLGHTVNFKTRKKSYKCKKTLLNPKEDWLIFKNTHEAIIDQETFDIVQRIRDGRRVRANLGEMPVLSGMLFCADCGNKLYQVRGKDWSHDKEYFVCATYRKQKGKCSSHQIRNIQIEAILLHELRTITSFAKQHEEEFVGLVMKKSEKELTQKLKSSNRELEQAKARISKLDTIVQHLYEDNLDGKISDERFKSMSESYDKEQAELKSKIESLEAFISKAQEECLNVDSFLKLVRQYTDIQELNAEIIRTFVDKIYVEKSEKVAGTRTKKQTIWIQWNYIGAVDIPLHK

SEQ ID NO: 7865 - protein, 526 aa, synthetic construct
MYRKFIMRTAYAYIRFSSEKQSAGDSVRRQQSLIDSWVKNNPDYILSQKTYKDEGLSAFTGKHAAGDLGRLMNDISNGSITAGDVILIESLDRLSRENISTATDRLKAILIHGVNVVTLTDQKQYTPESLNSPMDLIMSILTAQRAHEESQSKSKRMREVWAKKRTEAEESGKIITKSCPRWLTVNSDRTGFEPIPEHVESIRLMFEMRLSGKGFAGIAQALNESGRLTLTGRSKGWNQSSVQQLLSNKALIGYKIPSRKAVVNYIEIPDYFPSVIPLEQFQQVQLIGADKQGQRAANDRPMNVNLFRGVMKCAECGATVIVSGVDDKRAGYYSCSFRRLGRCNTSKPMNRGMVDEALIKGLLYSLDRLTTQGQGENPLMKLEAKRADLTERSQKLLAALEIADDVSAIATRLKAVTDEIRAIETQIKTCKDLEQVHTVQSVQGMDLTVKSQREEVQLLVKKTFREINLDGIRKTVNVYLHNGLTLLNVPVNQIVDAGEWIELLPVIGGDTVDFKDISFKAPRYLD

SEQ ID NO: 7866 - protein, 559 aa, synthetic construct
MKTKLYSYIRFSSMRQNDGSSYERQIRMARDIAAKYDLELVNDYQDLGVSAFKGANSKTGALSRFLDAIGRSVPVGSWLFIENLDRLSRADIVSAQELFLSIIRRGITIVTGMDNKIYSLDTVTANPMDLMFSILLFIRGNEESQTKRNRTNSSALIKIKAHQENPQNPAVAIEEVGKNMWWTDTTSGYVLPHPVYFPVVQEIVELRKNGRSTAEILDHLNETYTPPPAVSNKKHSKWSRAMVERLFHTRALIGIKEVSVDGVNYELKDYYPRVIDDATFYHLKKNIGARAWNFGDKEEAKPIPLLSGIGLLKCDHCGCAMVKVKGTNKRSDQYRYTCDATRSRRLDCEHPNWSFRGDQLEKAVLQLLADKIWIAEDKANPVPALKVQIDEISRKIDNLIALSAMTGATKELADQITALNSERETLYNQIKMAEEEMYSVDSQGWEKLAEFDLEDVYNEERIKVRFKIKQALKRIGCSRIDRNKNLFVLEYIDGKTQRVVIENSRGTRKGQIFIDLKTINDRQILESNGLVLHPCLDMLTDKNWKPEEEQAGPLQEFGI

SEQ ID NO: 7867 - protein, 498 aa, synthetic construct
MEKIALYLRKSRADLDAEARGEGETLSKHKEQLLKFAKDKDLNIVCIRQEIASGESLVYRPEMLKLLQEIEELKYDGVLVMDMDRLGRGNMKEQGIILETFKTAKTKIITPRKTYDLHDEFDEEYSEFEAFMARKELKIITRRLQRGRILSVERGNYIGTYAPYGYDLFETKEYRSLSINEEQAKVVRCIFEWYTKELIGANEIANRLNEMSILSLTGKKWSYHSILEMIKNPTYTGKVTWNKKSHGGIRKPRHEWLVIDGKHKAIINNELFSKAQDILKSRYHVPYNTKLSNQLAGLIFCSKCGSKLQQRYPKNKPRQIVCTNNQCNTKSSYTHLIEQKLLAGLSNWLGDFKLSFTNQSVIEDNEIIKLKKQALKNFENELSESIKQKTKLFDLLERGVYDENTFLERSQELENRIIELNSTMLSIIDEIKNYEEHELVNALIIPKLESVLDLYHQTSNIELKNRLLKSVLYKVEYKKDPNQKLDEFQLTLYPKLIN

SEQ ID NO: 7868 - protein, 584 aa, synthetic construct
MKSYLYSRISTLQQTKGFGIDRQVQTVTDFLKYATIDSRLGYQLDVEDFEVLESDLGKSAYKGNNWKPNSSLGRFYKDVVSGRITSGVLICENVDRLVRMSNYEASNKLSTLITNGIDIIEVESGMCFSNKIPESATILNMSISRAYSESKRKSDMATKSWANRTNKLKDSGRAVSKVCPRWLTVKDGQYVLDEKQAETLLYIHQMYLEGHGNSALVRRLNAAKRLDNGKPWTTITLHRVLRDERLTGRMVMGKTRKPIPLLDDQGNKIIENGKVKTYVPVEIIDDAYPVVVPRELFNQVQAMISEKEGSKVKKTTKYMRNIFNGVSRCSSCGEALVADKNGHGKLFYVCLGKRHKKACNSVGIPYEAFERTMLENLSQMDWQRIYTGNTDMEAMNQCRVRLVAVEREIAELEGELESSDEDMVLALVRAIKKKKAVRDEIHGELNSYVKAGTDNVTFNPDLKRVLNQEEVELRQDVNVELRKIIKYMKVGRMDRTITVQLQYYTDVVSHLIFIDSKTGDLLSRSHLTNDLIYESDSVTIDLTGGTWDIKGDKFTEWDQFALEVWKEIIEQAVDQAQEILKNRI

SEQ ID NO: 7869 - protein, 558 aa, synthetic construct
MSKEKIKVYLYTRVSTSIQIDGYSLEAQKSRMKAFALYNDYEIVGEYEDAGKSGKSIEGRVQFTRMMEDIKTGKDGVSFVLVFKLSRFARNAADVLSTLQTMQDFGVNLICVEDGIDSSKDAGKLMISVLSAVAEIERENIRVQTMEGRIQKAREGKWNGGFAPYGYQLIDGKLIINEEEAIAIRTIFDQYVNTTIGANGLSKYLENHGIRKIPRQNGKNPLFDAGLIRKILKNPVYNGKIAFGRRTLEKVHGTRNEYKQVEQDEYLIAEGIHEAIISDELWQAAQVKLKSQAKKYEHVNKGKDTRTHLLSGIVKCPICGVGMFGNKCIKKKKDGTKYKDFYYYGCKHRHMIRGHKCTYNKQIREELLDDAVAEVIIKIVSNPKFASMMQEKINMKVDTSEIEKEIDNYQKELRKSHSTKFKLIEEIDNLDADDKHYKRRKQDLDDRLYRMYDKIEDLESLLIDAKAKKQTIEAEKLTGDNIYKILIYFDKLYKVMNDVERRQLITALISEIQIYEEKQPNGQWLKSITFKLPIIDEDLNIGLDNNEQVECVALLVKA

SEQ ID NO: 7870 - protein, 481 aa, synthetic construct
MKTTNKVAIYVRVSTTSQVEEGYSIDEQKAKLSSYCDIKDWNVYKIYTDGGFSGANTDRPALEGLIKDAKKRKFDTVLVYKLDRLSRSQKDTLYLIEDIFIKNNIAFLSLQENFDTSTPFGKAMIGLLSVFAQLEREQIKERMQLGKIGRAKAGKSMMWAKTSYGYDYHRETGTITINPAQALAIKFIFESYLRGRSITKLRDDLNEKFPKEIDWSYRAVRAILDNPVYCGFNQFKGEIYPGNHEPIITEEVYNKTKEELKVRQRTAAENVNPRPFQAKYILSGIAQCGYCGAPLKIMLGVKRKDGSRLKKYECHQRHPRTLRGVTTYNDNKKCDSGFYYKDKLEAYVLEEISKLQDNADYLDKIFSGDNAETIDRESYKKQIEELSKKLSRLNDLYIDDRITLEELQSKSAEFISMRATLETELENDPALRKNKRKADMRKLLNAEKVFSMDYESQKVLVRGLINKVKVTAEDIVINWKI

SEQ ID NO: 7871 - protein, 655 aa, synthetic construct
MKPTIITYLRYSSKQQADGLSEFRQSEINRKFVEKFCAEHDVDLNEVISLKDLGVSAYRGLNLTLGSFSQTIKKFKSGEIKKRFNEDGEINTYLIVESLDRITRTGPFKSTQIFTELLEYTNIVVLADGEKKIYSKKSIDSTHGMMDLFMALISLQRSHTESLMKEYRSRKSWEKKREDLLNYFTLPEDEREGLERPKNATAMCPFWLTAKKDGRGYDFIPENKKVMDFLIEKLLDGNGMTRAVRLLNDEIDAGNLKPKLKKANRKTRHFRAAAYSGLFNSEISTVKGDYLLTESYYPTEDDVEQGKYPEKHLGKRVRKEIAVLKNYYPALMTESQAAYIRKMMDERRSSGTKPNKSIKNLAQGILRCPNCNSTYIKSKDRRNVYLRCNLAREGLCNAKVIKHGVFEHNLLQFCKGLNINKIISNQSSDQVIDSSLKELEQKILPLKVKKSQLEDDIEQIVKNISSIKIPSLLEKVQDDYLSKENELKKVVQEIDLIETSIMKLQHQIAMSDGDNSLQDLIDLTLDENADDEIRQRFNVELKKVVKSMTVLYRDTDDNPFGYHMISIQFLDGVHRLIPVHEKMTDKIYNILPYQDAVKVDSVDFSENVILPTDYLEGFESGKYPQLDGMAKYYQENPAKYLKLKHQIDQSQEIYE

SEQ ID NO: 7872 - protein, 484 aa, synthetic construct
MNKVAIYVRVSTTMQAEEGYSIDEQIDKLTSYCKIKDWTVYDIYKDGGFSGGNIERPAMERLISDAERKKFDTVLVYKLDRLSRSQKDTLFLIEEVFGKNDISFLSLNESFDTSTAFGKAMIGILSVFAQLEREQIKERMLLGKIGRAKTGKAMMFSKVSFGYTYDKLKDELVVNQAESIIVRKIFEAYLGGLSLNKLRDYLNNNGIYRGDKPWNYQGLRRILSNPVYIGMIRYRGEIYPGNHQAIIDIDDYNKTQEELKKRQITALEFSNNPRPFRAKYMLSGIAKCGYCGTPLRIILGSKRKDGSRNMRYQCINRFPRNTKGVTVYNDGQKCNSGFYEKADVEEFVINQIRDLQFNINKLDNLFDKHPSIDIKSIERQILSLDNKLKRLNDLYLNDMIDLEDLKKQTQLLRQQKTMLEDELLNNPAITQEKNKKYFKEFLATKDITKLDYETQKNIVNNLINKVFVKSGYIKIEWKIPFKKM

SEQ ID NO: 7873 - protein, 518 aa, synthetic construct
MVTHLKNLDIAIYLRKSRKDIETEREAALRGEEYDTLTKHRKELLAFARKNEHNIVDIFEEVVSGEYIAERPEMQALLQKVKDLNYDGILVMDLDRFGRGDKMDQGRIERTFKESQTLILTPQETLDLNEESGEFTVEVKTFLARMEYKQIKKRLQGGRRRGATSGRDQSTKPPYGYRKDDSLRLVVQEEEAKVVRMIFQWCVEDGLGRSAIAQRLMDFGIPSPTGLPQWQHVTVGRILKNPKYKGDQVFGRTKWSKNEDGTYSYTKVHDIEQMAYLEGAHEPIVDPELWEKAQEALSRRREAPVKKNHDILNPFAGILKCKKCGKAMLANKPTNRPNKYLSCYTTRCDTKMIALYKVEEVFLRQLETIFDHLRATAKKRRSQPDDAALDLAKRKVLRIQEDIKKTNLRKTNLHDLLEDGTYDKDTFLERSRLLQEQLKQLDNELEAAEKQVELEAGRLNQALKVLPMIKKALTEYKSAGSIKEQNALLKEIVREIKYRRDTDWTGPYQFEIEIHLYD

SEQ ID NO: 7874 - protein, 483 aa, synthetic construct
MTEQVPSHRHIALYCRVSTEEQAQQGVSLDEQQERLRSYCRAMAWKEDTVLYIDDGYSAKNTNRPQLTELLHAVQKKEVSKIMVTKLDRMSRKLLDLLTLIEMFQEHDASFISVGEAFDTTTAPGRLTLQVLGAVAEFERERIRERVVENMMHAAHKGKWLTQHPYGYRLENKELVIYEPEAKVVQTIFQLYVEKNMGFYAIAKYLNNEGIVSRYKKEWSIRSVKLLLQNPVYKGTFVWNRRDGSKKNREKKSQEEWIVLEDTLPAIVDKECWEKAQKPKRSANVAPRARTSPHLLGGLVKCGKCGSGLSIGWSGSPNNRYRVYRCSANKNKGTCTSKQYRAETIEALFKEHFSALCESFQLQLIPIVSLGPKIENNDKKKITQAQERYKRKVEAYTAGLIELEDLHEEKQRLESIKASISTPSHNTIQQEELEKWIKKRLTGVLDALDRLPVEQAKVLLQQVIEKVIVHEEQELTIVLQPIV

SEQ ID NO: 7875 - protein, 511 aa, synthetic construct
MSEQIVRIKDVLQKEARVAFYARYSTSKQDYAMQLSEVQRFLQSYPCRLTYSYIDDATSAVKLPMERREKLQSLIEGARRKQFDVIVVYKGDRIARSTVEHQQFRKLMNELEIPVIISSTREIYTSGGIVQLAVSDGLTKMEYEYIKERTSDTLKSKQKRGEWAGGKAPYGYQYIVEDKTFQRIEMEWNTVQCIFKWFKRGYSITKIVNELKNQKNEEHESLERWNKEKVKGILTNPFYAGYIATYRFEEGKLTDRSKWILAQNTSIEPVLTKEEWEYIMQLYEEKKQRPHNPKRYNTPFLLRDILYCQHCHQLMKTKNKSRKKNGKIHGGRWYYCDSAGCDYKLSMEKIHEELEQSIFPSLLERAEEKTRNAVGKQLQDEISWLEEQMKVIDRQNNKLLSALSKVESKISREYDRYESIEDNMPLLEPLVHYQFKKKKELTAIKQKSSEYQHQLAQKKQALLHVDKLECELTKEDMEDVYKARMLLLQLLPALYIDKCGVLDAEVHKDMN

SEQ ID NO: 7876 - protein, 506 aa, synthetic construct
MRSVITYLRYSSAIQGAEGADSTRRQNDLFKQWLKKNSDAQVVASFSDEGLSGYKGKHLTGQFGDMLARIESGEFPESTILLVESIDRIGRLEHLETEALMNRILGNGLEIHTLQDGLIYTKDALADDLGISIIQRVKAYIAHQESKQKSFRVSEKWKQRAKLALAGEQRLTKMVPGWIDPDTFKLNEHAETVRLIFKLLLSGESLHNIARHLQSNGIKSFSRRKDANGFSVHSVRTILRSETTIGTLPASQRNDRPAIPNYYEAAIDASTFNKAQEILDKNRKGRTPASDNPLTINIFKGLFRCQCGASVHPTGTKNKYAGVYRCNNHLDGRCDVQPLKRKPFDRWMIDNFLGMIDVGNDGKSKRKIASLQHEVEIVTARIKKATALLLEMDDITELKAQVKELNQKRTELQTTIDTLKRKTSLTDKELPQLKDIDLMTKAGRVECQLILSKHLKGLTLGKDSVTVTLQNDTEITIPTNPLPLNDGSPIFEIADKELLDIDAYQL

SEQ ID NO: 7877 - protein, 491 aa, synthetic construct
MGLAAIYLRLSRNEEQLNIDEILLNHRNALTKLAKQQKLTYDIYQEISSGVNTERPQLNLLLSRLDDYDVLLVMDIDRISRDNAHAEEIKKMLIIHDIKILTPQGAIDLSQESNEMLFSFQAMMANFEYKQIRKRLGRGRLAAAEQGKWTMSNRVPLGYKKNEEKRLEVIEEEAKIIRFIFQKTLERVSANEIAKQLDILGWRSRQGKVLTSAHISNMRRNVVYYGVVKAGRKVNGRVVDEVFVEDAHEPIVSKQMFLEVQKILEENTTGNFFNKLKATRKLQNLIYCNCCKRKRYIQCDGNGVDYIKSCIYKVDNNKCRDRGYKYEPIEQFVLQKVKEKKPAFEQELQMLKSLDTTEVEKKLFIQRESLEKQINRFNKRQRNLKEMRMDGEISKAEFYEMRDENEEQIKQVKQQMELIDIKLENLSNTDEEQARLQDAIKKLDKLEELKAESCNTFLKKFIKKIWFSSNTEANHDTTKPREEATIKIEWL

SEQ ID NO: 7878 - protein, 544 aa, synthetic construct
MEKIIEKKENLKKVYGYVRLSRDEDKEQASLENQKQIIRTYAKNNGYILVKIFEDDNVSGMTFDREGLNELKEVIENGNIDILLVKDLSRIGRHKAYSALFMEELRSKKIKVISIAENLDNMDENNDILIGFKQILNEQYAKDISRKIRAAFHQKQKEGLVIVPPFGYEKNNQTNKIEIDEECAGVVKKIFSLYIGGFGYKKIAQQLTEEKVHTPSWHQFQKSGKVYHAGKKWIGQDIWSDRTIARILSNEAYIGTLKCHTTTRSVIYKTRGLIPKDEQIIHENFYPPIIDEEVWEKTKAIKKNRTRGHVRASGNSKIHKYAGLLICKDCGSGFVAKKRKWNGIERIEYICNAYHRFGKTVCTPHRIREEELDNILCGFLERLKETCEENLNRADKFITKWNSKKRNYDKSIDKIQREIFSLKTEVKAYAKQLAKQLINEELFQELTQETKEKIDILENQIDTFQEVKKISKNAKAGLLKSKEIIDKIIEEKDLVSADLQMLVDKIIVHQSCTGELELDIRVNTPFKLHSELKSTFTVIEEQSS

SEQ ID NO: 7879 - protein, 520 aa, synthetic construct
MQSQPNILERARRGDLTGLRVAGLVRLSFEINPDRERPDVPMNGSDINNREEQEQLCRDYIESRGGIYIGTYDEPHTSAWKKKRIRQADGTYVYRVVRPVFEGMLSDLRKGRTETAYFTPVGGYTPHTEIDGSIVYDVDRLTRDNRHLEDAIETVEYFHRPIIDITGTLDLLTENGRDMARVMVTMAGKQSAATSRRVKNIHRAMAREGIPVGGARPFGWQDDKRTADPVEKELVTKAVNDLLSGKLVHTLLGEWKKAGVRTPKGNYWVRTTFRNMILSPRLVGWRVHGPEDLPLHERCARDKEGQPVKGQHEALVDEKVWRAVVDLLTNPDRPGAGVSVGRLKYMCSGHLRCGNCAGKMRGNAKAKNGYEYVCDSCYKVTGAGPAIDRHITALIFARLAAQQIPVEVSPWSGADDLAKYETTKANLLAQFKENPDMGTHIWPEIRRAEAEISRLLKERATYIRKTAGPTVADIEKEWPDLEIEQRHAIVGENFEAIILLPAQKGANRFNPDRLQVVPRQ

SEQ ID NO: 7880 - protein, 515 aa, synthetic construct
MGDTAALGQLFRRVESGEINGSVLIVESLDRFSRENPFRVGGYIAKLAEHSIDIIDVEQNLVIGTSNPWSSTIASIIANRAHEESTLKSKRIKAAWNSRRKKAEESGQYMIKNTPFWIDVLDDKYVANADASIVREIFDLYLQGYGSFTIAKKMNEAEKVIRNKRWSTPKICALLRNPRCNGDFISHSLERDYEKGTSNSVEHVIKGLYPKIVTDEEFALVLNRLDDGSKNKRVCNDRKVTILNGLLKCSICGGALTVRSAGAYRYVGCLKTIEKGGCYSKPIRYDALEKIVVNHIRNMDLGKVYESNDSQEVITKERIKSLMSHIEEYKAGITQLRERGKKPSFDMLTELQNSEDELELLKKELEQLSLSKIDLSEFAVSTELFDITQIALRTRLERTISSLLNKIKVYHTKDLSFSLIEMIYVNDVVKHVLVADKKGDVTGDVVIRRNGESTTYESCSVKIIKDEGGVFSLDCNISEVVLNDYLLLMNVVDFVDSEAKEFLNLHLNTVLQQDG

SEQ ID NO: 7881 - protein, 451 aa, synthetic construct
MTKAAIYIRVSTQDQIENYSIEVQRERIRAFCKAKNWDIYDEYIDGGYSGSNLERPGIKKLITDLKNIDAVVVLKLDRLSRSQRDTLELIEEHFLKNKVDFVSITETLDTSTPFGKAMIGILSVFAQLERETIAERMRMGHVKRAENGLRGNGGDYDPAGYTRKDGQLIIKEDEATHIKRVFDLYEQYYSITKVQEVLKEEGYPIWRFRRYRDILSNTLYIGRVTFSGKEYEGQHEPIVTSEQFKRVQTLLKRHKGHNAHKAKQSLLSGLIACSCCGENYVAYSTGKSKDTESKRYYYYICRAKRFPAEYEERCMNKTWSRKKLEEVVISELKSLTEEKKQTNKKEKKVNYEKLIKDIDKKMERLLDLFMNTTNISKNLLEQQMEKLNLEKEKLLLKQQRSEEESISHEVTLTAIDDAFETLDFKEKQVIINNFIEKIYINQNNVKIIWRF

SEQ ID NO: 7882 - protein, 479 aa, synthetic construct
MRYAVYVRVSTDKDEQVSSVENQVDICRYWIEKNGYEWDQNAVYFDDGISGTAWLERHAMQLILQKVRKNELDTVVFKSIHRLARDLKDALEIKEILLGHGVRLVTIEEGYDSYYEGNNDMKFEIYAMFAAQLPKTLSTSISAALSAKVRRGEHTGTIPFGYDRIDKKLIINDEEALLVKEMFDWYEDGRGYRMIANNLNKKGCRTRFGNLWSEASVKTIVTNSLYTGEHVMHKYKTVKVDGKKKTVKNPKEKWLVFENHHDAIISKEQWERINLVSGVKDKKTKSDYRNEFRGIVWCAHCGKRVRAIYAGVRSKYERVYMKCSTYKAYGTCVNHIPVRYEDFRNLILERLKQKQEYIETRLVAQIKDKLQGKIAKLKKTIKQLESKKEKLLELYMDSFIDKETFVNRNRKLEDEMTAQELQLLKLKDKDIQNRETKDIQDAFMLLQEEQDLHKAFQKLIKKIVFYQDGKLDIEYTFDI

SEQ ID NO: 7883 - protein, 468 aa, synthetic construct
MKCVIYRRVSTDMQVEEGISLDMQKLRLEQYAKSQDWVVVDDYCDEGYSAKNTERPAFQQMIKDIKKKQFDIILVYRLDRFTRSVSDLHSILKTMDEYNVKFKSSTEIFDTTTATGRMFITLVATLAQWERETTAERVRDSMQKKAELGLRNGAKSPMGYDQKKGNLYINHAESEIVKYIFEMYKTKGVTSIVKSLNSRGVKTKQGKIFNYDAVRYIINNPIYIGKIRWGDDILTDIAQKDFETFIDKNTWYTIQQIQNSRKIGKVRLQNFFVFSNVLRCARCGKHFLGHKQVRAQNRIVMSYRCSSRQHKGMCDMPQISEDVIEKEFLNLLEDVIIDLDDTVDQPVELSNLQEQYNRIQEKKSRLKFLFIEGDISQNEYKKEMAVIIQEETTIQKQLANTEDTVSSVEIKDLLSRLKDEWFHLNNESKKAAVNSFVSSISVEVIKPARTGKNPIAPVIEIKDLQWKY

SEQ ID NO: 7884 - protein, 484 aa, synthetic construct
MKYAVYVRVSTDRDEQVSSVENQIDVCRYWLDQHGYDWDENSIYFDDGITGTVLLERHAMQLILEKAKKRELQMVLFKSIHRLARDLKDALEIKEILIANGIRLVTIEEGYDSHYEGKNDMKFEMFAMFASQYPKTLSVSISAALSAKVRRGEHTGGRLPFGYSDHDKKYVINEEEAEIVREIYDMYSKGIGYIGIAKILNERGIPSKTGGKWQMSSVQRIIKNPIYKGDYILNQYTTVKISGRKKQIKNPEEKWTIFKNHHPAIVSEEQWELVNRPRSAKKRRPALWNEFRGIIFCAHCGSAMQVVYSAKKKKDGTKEEWRYLKCSRYKRYGGDECVCHVPIQYNQFRNFILEELEQEEKEVKAKVESQEPTIHKEKIDKIKRNIRKVKERKEKLVDLYMDNLIEKDEFSERRAELEQKIKEQELHLLSMEEVKLTNAVQKKYQEAFSLLKQEKNLYDAFREIIKRIDIFQNGDVRITYVLDA

SEQ ID NO: 7885 - protein, 484 aa, synthetic construct
MKYAVYVRVSTDRDEQVSSVENQIDVCRYWLDQHGYDWDENSIYFDDGITGTVLLERHAMQLILEKAKKRELQMVLFKSIHRLARDLKDALEIKEILIANGIRLVTIEEGYDSHYEGKNDMKFEMFAMFASQYPKTLSVSISAALSAKVRRGEHTGGRLPFGYSDREKKYVINEEEAEIVREIYDMYSKGIGYIGIAKILNERGIPSKTGGKWQMSSVQRIIKNPIYKGDYILNQYTTVKISGRKKQIKNPEEKWTIFKKHHPAIVSEEQWELVNKPRSAKKRRPALWNEFRGIMFCAHCGSAMQVVYSAKKKKDGTKEEWRYLKCSRYKRYGSDECVRHAPIQYHEFREFILENLKEKEKQLETEFNLNEDSSNAEKKNKLQREIQRIEEKRKKLIDLYMEELIEKEEFLSRRNELEKTIKEKEVQFVSMEDKSEVKRTQDEFRKAFALLDESKNLYEEFKRIIDRIEIFENGDIKIVYRIEM

SEQ ID NO: 7886 - protein, 515 aa, synthetic construct
MKTAIYLRKSRADLEAEARGEGETLAKHRATLLKIAKEMNLNVLAVREEIVSGESLVKRPEMLALLEEIEDNKYDVVLCMDMDRLGRGGMKEQGIILETFKRSNTKIMTPRKTYDLNDEWDEEYSEFEAFMARKELKIITRRMQRGRIASVEAGNYLGTHAPFGYDIHRLNKRERTLTINSEEASVVRMIFDWYANEDMGASAIRSKLNDLGYKSKLGNDWNPYSILDILKNNVYIGKVTWQKRKEVKRPDAVKRSCARQDKSDWIIADGKHEPIIPESLFEQVQDKLNSRYHVPYNTNGIRNPLAGIIKCSKCGYSMVQRYPKNRKETMDCKHRGCENKSSYTELIEKRLLEALKEWYINYKADFEKHKQGDKLKETQVIQMNEAALRKLEKELVDVQKQKKNLHDLLERGVYTVDIFLERSKAVSDRINEITSTMENLKKEIKTEIKKEKVKKDTIPQVEHVLDLYFKTDDPKKKNSLLKSVLEKAVYKKEKWQRLDDFELVLYPKLPQDGDI

SEQ ID NO: 7887 - protein, 515 aa, synthetic construct
MKTAIYLRKSRADLEAEARGEGETLAKHRSTLLKIAKEMNLNVLSVREEIVSGESLVKRPEMLALLEEIEDNKYDVVLCMDMDRLGRGGMKEQGIILETFKRSNTKIMTPRKTYDLNDEWDEEYSEFEAFMARKELKIITRRMQRGRVASVEAGNYLGTHAPFGYDIHRLNKRERTLTINPEEASVVRMIFDWYANEDMGANAIRSKLNDLGYKSKLGNEWNPYSILDILKNNVYIGKVTWQKRKEVKRPDAVKRSCARQDKSDWIIADGKHEPIIPESLFEQVQEKLNSRYHIPYNTNGIKNPLAGIIKCAKCGYSMVQRYPKNRKETMDCKHRGCENKSSYTELIEKRLLEALKEWYINYKADFEKHKQDDKLKETQVIQMNEAALRKLEKELVDVQKQKNNLHDLLERGVYTVDMFLERSNVISDRITEITSTMENLKKEIKTEIKKEKVKKDTIPQVEHVLDLYFKTDDPKKKNSLLKSVLEKAVYKKEKWQKLDDFELVLYPKLPQDGDI

SEQ ID NO: 7888 - protein, 479 aa, synthetic construct
MRYAVYVRVSTDKDEQVSSVENQVDICRYWIEKNGYEWDQNAVYFDDGISGTAWLERHAMQLILQKARKKELDTVVFKSIHRLARDLKDALEIKEILLGHGVRLVTIEEGYDSYYEGNNDMKFEIYAMFAAQLPKTLSTSISAALSAKVRRGEHTGTIPFGYDRIDKKLIINEEEALIVKEMFDWYEDGRGYRMIANNLNKKGCRTRFGNLWSEASVKTIVTNSLYTGEHVMHKYKTVKVDGKKKTVKNPKEKWLVFENHHDAIISKEQWERINPVNDVKDKKTKSDYRNEFRGIVWCAHCGKRVRAIYAGVRSKYERVYMKCSTYKAYGTCVNHIPVRYEDFRNLILERLKQKQEYIETRLVAQIKDKLQEKIAKSKKTIKQLESKKEKLLELYMDSFIDKETFVNRNRKLKDEMTAQELQLLKLRDKDIQNRETKDIQDAFMLLQEEQDLHKAFQKLIKKIVFYQDGKLDIEYTFDF

SEQ ID NO: 7889 - protein, 543 aa, synthetic construct
MSQKIAYQRLEDILKKGSRIALYARYSTNKQDENAQIHSVRNFLSDYGCELLDDNIYLDPKTSAVKISMDQRKDLQKLIQDVKENKFDCIVSYKNDRIARNTKEHNEFRTEMQRLGMPVVLSSTREIYTAGEIVPLTIKDALTQIEPALIAERTRDTFSSKIENGEWTGGQAPYGYIYDKETERFGILDKRAEVVQEIFRLFKLGYGLQQIANKLTIDKRDIGQKWYKDKIKYIITNPFYAGYMTMNRYVKGKLQLKMETWTWSKKQENIPAIMSRDEWEYCFYLYVERRKSQTVRKSSTPFWLRDILHCNECQQPYKTKNQKTKSKRKNGDEVEYGKILYECRNCSLKLEAEKVHDKFKEDVGRVLKKLLENHRENLIQQTQLQIKKEHEEIANVQKELTNKRIKLIENIDVLDKRISQLYKDITTGKGLKANHTEDVLGKEDEQDDWNSKLVEILLTGRSQKHNDLEAIKQQQQLLEEKQEKLNIAMNALKNQYQDELLNFSFDPENVQSMRNFLLQFVQAVYVSKDMRLDYKIYENLISE

SEQ ID NO: 7890 - protein, 484 aa, synthetic construct
MNEQSSQFIALYCRVSTDDQAKEGVSLEEQQERLEAYCRAMGWGEDVVVYVEDGYSAKSTDRPHLKRLIEDVKAGEIKKIIVTKLDRMSRKLLDLLTLIDLFQEHDVSFVSISESFDTNTPSGRLTLQVLGAVAEFERERIRERVFENMYHAASKGKWLTQHPFGYRLENKELVIYENEAKIVRDIFIWYTQEGHGFYAIAKKLNLLGIPSRQNKQWSIRSVKLLLSNPVYKGTVVWNRKDRSKKKEQFKKEDEWVIQENAAPAIVTDELWNEAQKRMQTSTLAPRAQTSPHLLGGLLKCGKCGSGMSIGWSGSTKNRYRVYRCSANKNKGTCTSKQYKAHQLEELFKKGLSNLCKSFSFSLHPSLSLQKRQTDVTNQMKLATAKKRYKRKVEAFTAGLIELEDLQEEKRRLETLELALQPTTELNENINLPQIEEWMKSKLKNIYDALSIVPVEELKPLIQTIIEKVILHSEEELEIVLQPII

SEQ ID NO: 7891 - protein, 552 aa, synthetic construct
MNSPTIRAALYGRVSTEDQAENGYSIDAQLDQLRRYCELYGREIAGEYVDRGVSGKSLKGRYELQRLLRDAEEGKFDEVIVWKFNRMARKNIDLLQIVDFLEKNNIAFHSFTEKFDTNTSMGKFALQMMGAVGELERNTIVDNVKMGHKQRAKTGKHNGKVPLGYRITEAQGSGRSRDSEIVIFEEEAAIVRNIYEQYASGHGLKAIANDLNHRGYKTKSGKPFSICAIRDLLDNPMFVGKIRYNRYENWAERRRKGKSSEIILAQGDHPAIVSDDLWEKVQLLRKKKSTMPKKRFEGEYLLTGLIRCPECGAAMTASRTVNRAKDGSKVVRMYYSCGRFRSQGSSVCHANSVRKDEAERAVTERIQQAVAQPDILKKVVRSVNERRSSRIKPLRDELASVQARIDMLEEKKRKYLELYEMDVMDRQMFAGRLNDLNKELDAELTRRSKLHLELRDDQAEPVSYELVRSLLSRFDALLRRSPFPQRKTLLHLIVKQITLDDRKRVGNVELAFNEETEKHFLSAAPSADNMAKGAFPLSGKARKLDYKFSIFL

SEQ ID NO: 7892 - protein, 519 aa, synthetic construct
MGIELTSLAGLYLRVSTDKQADGYSLDAQKAALLDYCRKAQIEVYNIYVDAGVSGKSIESRPALLELLKDAKNGCFGQVLCLRLNRISRRLADLLHIVELLAQQNVKLHSLTEDLHTDTPAGKFFFQMIGAVAENERRQISQNVRLGMQRRNRLGKWNGGNQVLGYCWIPDLDDQHQTAQIVPEEADLVRSIFEWYASGLGLKAIANRLNTNSYRTKRGKTFYSVSVRSLLTNVNYIGKITYRDDKGVRRVTDGEHDPIVSLDLWERVQDRLAEQSHPPTKLISRHSPLTGLLKCPSCGSGMVPAHVTRKRKNGTNKVNHYYVCSRYNSGGSAACLPNHIPADTAETWVNEQVQQFLSHPSVSERLVKEINSRNEKKMQPVRQRVREIETQLASYRGRSQRCFEMFEDGHIDALELRKRLDDVRAESALLEEEREQLEQELAKHSERSVPVTSIQQALANFRPLMQNASPEQQKKLFRGLIEKIIVPQDRNIMNTVIQTKAALQNLEFPTLQTEGAKKA

SEQ ID NO: 7893 - protein, 584 aa, synthetic construct
MSKLKAALYARVSTEEQAKEGYSIAAQISEIRKYAEQNGLEIVDEYVDEGASGKSISGRPQMKRLLKDANQQKFGVVIIYKIDRLARKLKDALEISETLERNNVRLISLNEKFDTTTAFGRTAFQMICSFAELERNNIVERVKLGMEQRAKEGKYNGGKVLGYDNIEKELVINEYEAVIVRKIFDYANQGLGFKAITRRLNEEGYRSKMDKPFNVCGIKTILNNPIYIGKIRYNQLQDWSEKRRKGKNPDFLLVDGTHDPLIASELWESVHQKLGKRSYKPSRSHQPYILSGLLRCPACGHGMVPARSKGAGGKSYRYYICGQFHNKGKTVCRSNMMRADVAEQQVIDELVKVASRPDILMKLVDKINALRSNADAPVMEEKKALVAELNANSRKLQKLKDNILSDPELAAIFKDDLKETHARQEQLQKRLETIEAELDEQFNRPVDFDSLQKLLTLIQDALLKIDADEQKALLRLMVENIRITKDSPRRVGRQITQINLHFDFTIESMQMDSAVLLSRLAETQALDCVAPLEPDVLASLNEPHTESLRDLMKSLFILPLAMIRFTVSSIERNRKAPIWVPFAF

SEQ ID NO: 7894 - protein, 496 aa, synthetic construct
MRCAVYIRVSTDKEEQKTSLQNQRSLFYEYLEKQGWDVFDFYIDVESGTTGKRENLQRLIKDAKERKFDVIAAKELSRLARNGGLSYQIRDIAMENRIHIVTLDNAINTLEGKGEMFGLYAWMYEQESQRTSTRIKAALSSKARKGEFKGSVPPYGYRLNSGKLILAEDDTPNNVKRIFRMYLEGKGFDAIARTLTREGCPTPAQVVGKKNAGLYWQGTSIKKILTNPHYVGDLVQGRQTTVSVTSKVREEIPREKQIVTENAHQAIISREDFEAVQQYMKGRKRQKAKPKAKKHLFTNYLFCADCGKALWYVQYRKGYVCGNYYKHGKHVCSQHSVKEKELIEVILTDIRNNAQTLNENEIMGRLEVKTLQARKQAEKQIQSLQRRIEKLKEQKTGLIRLLASGTITEIEYKEATESGNAELYSLQEQLKGFQSQQGNKSTGESIARLKKELKHFMKLKELTPEMVHRLVERIEVQADGSVNIHYKFAATALLTA

SEQ ID NO: 7895 - protein, 494 aa, synthetic construct
MDAAQYLRKSRMEEGMDTEEVLAKHRKALADFAASHDIHIIETYYEVVSGESLYARPEMLRLLEDVEEGRYDAVLVMDLDRLSRGRMKDQGIILDAFRDSGTLIVTPEKTYDLSDDLDDEMAEFKTFMSRREYKIINKRLRRGLKQTIRDGCYVANAPYGYRKVTVDRKPTLEIYEPEAKFVRMMYDLYLQGYGCVSIARYINSLGAKPHRSAEFTRNSVAHILRNPTFAGKIVWDQKTHIRKGAKGNPKHITIYNPRDQWTIVDGMHPAIISQETYDQVQAVLAGRYIPSRNDGTVRSSLAGLVKCANCRQNMQRMTMKGTPYLLCTRPGCCASTKFELVEERVLAYLEETLARLELQQQTGISRDTSVQEAALEAVKKELAAAQRQKSRLYELLEMEEYDLPTFRERMAAVKEKISGLERRQREAQQAIEDARTADPASLARKIRAVLDAYGAADPAGRNAMLKGVISTIQYQKEKKTRPTEFQLAFELKPF

SEQ ID NO: 7896 - protein, 537 aa, synthetic construct
MKQQIYNTALYLRLSRDDELQGESSSITTQRSMLRSYAREHHLNVIDEYIDDGWSGTNFDRPDFQRMIADIEAGKINCVVTKDLSRLGRNYIMTGQYTELYFPSHNVRYIAVDDGVDSEKGESEIAPFKNIINEWVARDTSRKVKSAFKTKFAEGAHYGAYAPIGYKKHPEIKGKIIPDDETRWIVEKIFSLAYQGNGGAKITKTLIEEKVPTPSWINYQRYGTFAHIFANAPESKRYTWTIAQVKTILKNEVYIGNSVHNKQSTISFKNKKKVRKPESEWFRVENTHEAIIDKDVFYRVQELIKSRRRQRKNKETQIFAGLVKCADCGWSMRFGTNTANKTPYSYYACSFYGQFGKGYCSMHYIRYDVLYQAVLERLQFWARAVQQDEEMVLKKIQKAGNAQRLQTKKKAETALKKAESRQKEVDRLFLKMYEDRASGKITERNFVMLSSKYQQEQIELEEQTASLSEEIRKMEQEMIGAEKWVELIKENAVPKELTATLLNTMIEKILIHAPEIDDNGEKTQEIEIYYRFIGKID

SEQ ID NO: 7897 - protein, 540 aa, synthetic construct
MKQPYNTTIYNTALYMRLSRDDELQGESGSIQTQRMMLRQYAAEHGLNVIDEYIDDGWSGTNFDRPDFQRMIDDIEDGKINCVVTKDLSRLGRNYILTGQYTEIYFPSKGVRYIAVNDNVDTINGENELAPFLNILNEMHARQTSKKVKAAMRTRFANGAHYGAYAPLGYVKDPDKKGHLLVDPETRWIIEKIFDLAVHGRGAASITRILGEEKVPTPGWLNFQRYGTFANIYAGAPEEKAYAWTIAQVKSILKEETYIGHSVHNKQTNISFKNKKKVRKPKEEWYRVENTHEAIISEDVFRQVQEQICNRRRRQKNGTTQIFSGLVKCADCGWSLAYGVNSQNKNPYAHYHCSKYGQGLHQCSMHYIRYDVLYAYVLSRLQYWSVLAQQDGDKLLKRLLNASDKERNTARKRQTAELKKAEKRKAEVDTLFAKMYEDWFAGRITEYNFNMLSEKYQGEQRELDAKIERLHEAMEAAAQTAVDAEKWIGLMKQYVNPTELTAELLNTLIEKIVVHEAVKGEDGSREQEVEIFYRFIGKID

SEQ ID NO: 7898 - protein, 466 aa, synthetic construct
MSKDKMMVFGYARVSTENQLENYSIEEQTARLESYCAAKGWVLLHTYIDGGYSGGNTDRPALQTMLAQIRETHVDAVVVYKLDRLSRSQKDTLTLIEDELLAHGTDFVSINENFDTSTPFGRAMIGILSVFAQLEKDQITERFTMGRIGRGKAGYFHGGGNAPTGYTYADGVLTVNEYEAMQVREAFDLFLAGKSINAIWHILSTKYTTKWTAAKVRNVLKNSLYIGKVHFMGQEYDGVHQPIVEERVFTAANQLLNSLSREAAKTTSQRNPFRAGYLLSGLLYCGRCGARYSANHGYYRCYSRAKSSPKFVRDPDCKNDNWEISTLDHLVCQQVDAMVSSSAAVDHAIMAADAAKTVRVDKDKLRRTCAELERQIERLIELYQIGSIPMASITQRVNDLSAQKAALESQLNAPDEVPAKDLFLAAVEDYRQGFADGDTDRKRALLAGLLDRVTIDGQSIQLHWRL

SEQ ID NO: 7899 - protein, 534 aa, synthetic construct
MAIPTKKVHIIEKTASLPFAVFSNEQRKKRVAAYARVSTEQDEQQSSYEAQVDFYTRHIKNNPEWEFVEVYTDEGISGTSTKKREGFNRMIADALDGKIDLILTKSISRFARNTVDSLTAIRKLKEKGVEVYFEKENIHTMDAKGELMITIMSSLAQEESRSISENVRWGKRKSMADGKFSLAYSRFLGYEKGEDGTLQIVEEEAEIIRKIYSLYLGGQTVRTIADYLTAQGIPTPSGKKHWSVSTIMSILQNEKYKGDALLQKTYTADFLTKKVKKNHGEIQQYYVENSHPAIIDPDTFALVQNEIVERRRSRRQMHRSSLFTAKLICGDCGGSYGRKVLQSNTQYRHHVWRCNQKYKGDTVCATPSLREDEIKECFVAAFNQLLGDKEQYIARFEELLPIITDTAELEQHLEEFQADHDAKMQLLKGCIEKNKHQVQDQAEYTERYNALHDECQQLEAQIARLESKIHARQSKKEEIRRWLDKLRQCGDILTEFDPDLWNSTVETVTVGKEKLLTFRFKDGTEIPVPIPDKK

SEQ ID NO: 7900 - protein, 547 aa, synthetic construct
MNVTKIPKKTISVIEPKRSLIVNREQYHQRRVAAYCRVSTDSEEQLTSYTNQKKVYTEMIAAKPEWEFAGLYADEGISGTRADKRPQFQKMINDCLSGKIDYIITKSVSRFARNTVDCLDHVRMLRARGIGIYFEEQNIDTLQIDSELYLVIYAGFAQSESESISKNVTWTFRKRFQEGKPIFNYKCLLGYRKGADGEPEIVPEEASIVERIFNMYLSGETINRISTKLREENLQIPGKRFSFSASMIKGILRNERYCGDSILQKTVTIDCIGKVRRKNTGEAPMYYVQNSHVGIISRELFHKTQEELARRMSREPNSTKTATTATGKYSRYALSNVMICAECGSRYKRVTWTSRGKKRVVWRCISRLDYGKRYCKTSLTVDETALHAAIVRAINRFNEEDESTYMALMRATIGEAIGLTGGTDEIDLLRRKIDGLNRKMVSLINESVESGEGIESHEAEFKELSDTIELLQGRIQKLEEALASDQVNDSRILKLQQIIADRASKKMEYDDTIVHQMIECVKVYPDGRLDIIFGGGYLIEERPEKES

SEQ ID NO: 7901 - protein, 513 aa, synthetic construct
MPQVKLISPITRQGIRKVRVAAYCRVSSNSADQQNSYANQIRVYTSLIQRKKEWELVEIFADEGLSGMNAQNRTEFQRMIKMCEQHQIDLIVTKSVSRFARNAKESLEYVRKLKLLGVGVQFEKEGIYTLALGDEMLLNTFSAIAQEESKAISQNQRLSIVKRMQSGEYVDSNAPYGFRLVDKALVVYEPEAAIVRMMFENYLSGQSTSEIARDLNSRGIKTKTGKSTWRSTKVAYILGNERYCGDCKYQKTYRDTTVPFKQFRNRGQEDMFYASMTHAPLIDRDTFDKVQLLLKKRQDIFGKSTTQNIYPLTSRIQCSECGSYFRRRQVSGAVKWGCSKHIQDRTQCSSNYYSEERIYDAFVAMVNKLRFSEYDIMGQTLLRLESAELKRKQKNTAARELSRNIADLNAKLVMVEQLHAKGYLKDEVHKAQVREINDQLRQLKRERQCEFSSGITHMIEELTRLKKLLEELEEPLDRFDEKLFTEIVQAISISHRDEMTVTLIGGLRFTEML

SEQ ID NO: 7902 - protein, 519 aa, synthetic construct
MYLEIEGAERYRAALYIRLSREDETDGPSESVSNQRAMLEDFARQRGVPVAGLYVDDGWSGTSFDRPEFRRMLRDIEAGRVNMVITKDLSRLGRDYIMTGHYMERYFPEHRVRYISLLDGIDTGVDSSANEITPFRAIMNDMYAKDISKKISSVKRDKQRKGLFIGGKPVYGYQMHPAEKNKIVVDEGAAPVVRRIFRLALEGLSCRQIAAQLNAEGIPSPGCYAGLYPSGTGQWSGERISEMLQNETYIGNMVQGRRRKVSYKSKKCIRQLPEDWVVVEGTHEPLVTPETFERVGRLLASRRHTRSRTYEFPLKGLLFCHECGHPLAVLNRKNSRGEDVRYLVCRTYQRFTKTGGCTCHCIQEQTVTRAVVAKLREACGACLEPAALLPAARSAVAEAHGGENPTAEIRALRAKIGRLTTVLDRMYLDQLSGLLAEADFARLYRQAREERGALERRVTELERRESPEAGDKAGALVQRFLDEAGDNRELLVSLIERVELTEQRELIIHFRFCPPEALF

SEQ ID NO: 7903 - protein, 499 aa, synthetic construct
MRGVIYARYSCDRQKETSVEDQIRDCQAFALANDIDVIDTYIDRAQSGRSDDRIAFQQMLTASDRGAFDCVIVWKLDRFARNRYDSAINKARLKRNGVRVLSAMERISDNPEGVLLESLLEGIAEYYSLDLREKTYRGMMGRALQCKHTGGKPALGYKVNADKNYEIDEAGAQIVRLIFDLYANGKSYREILHILNERGAKTTSGRPFGTNSLHDLLINEKYIGVYTFSRTHRKDGGRNNHASDPEAIRIAGGVPAIVSQDVWNTVQERMAENKRAPARSKAKVDYLLTGKIFCGKCGGAMVGMSTCSGYAYYECSTRKRTKQCDKKSIRKEVIENTILRCTVSLLTDSVIDDIAEVVAALSRKECSENAELQSVEHALSDVEKRIENIASAIAQGIITPTTKHMLEQAENERAQLLHRKSELQSIGVYPITKEQVIFWLESFRNLDIDSIEDQHTIIDSLVNSVTVFEDGTLHIIYNSQGKNRTTKCLDLQRTGLPAP

SEQ ID NO: 7904 - protein, 523 aa, synthetic construct
MYFDNPSAYHAALYIRLSKEDEHEGPSQSVQNQQSLLQTFVQQHGLSVYDTYVDDGWSGTNFDRPGFQHMIADIESGKVNLVITKDLSRLGRDYILTGHYMERYFPEHRVRYISLLDGIDTGVDSTANDITPFRAIMNDMYAKDISKKIKSVKRDKQRKGLFIGGKPVYGYKMHPTEKNKIVIDENVAPVVRRIFALALSGMSCRQIAALLNQDGVLTPSAYAHLSITRPGMYSGLWSGERISEMLQNETYIGNMVQGRRVKISYKSKKCLNQSPEHWVIVEGTHEPIIDTETFQKVQALLNSRRHTRSRTYDFALKGLIFCHECGHPLSVINRKNAKGDDVLYLICRTYQRNTRAGVCTSHSIQEQTVTRAVFSKIQKLCASALQPDALFPIASKALQKAQANTAHLSELQGIQSKLDILTANLDQMYADHLSGLLSAEDFARIYQRVNQDRRALEERKHELSQQASCPVSAQDHAHTLVQQFLQTLDSNRALLVSLITRVELTQDKEIILYFRFHAPEAIF

SEQ ID NO: 7905 - protein, 588 aa, synthetic construct
MRIVNKIEAKTPQMPRRKRVAAYARVSMESKRLQHSLSAQVSFYSSLIQSNPAWEYVGVYADNGITGTKAEAREEFNRMIADCEAGKIDIVLTKSISRFARNTVDLLNTVRRLKELGVSVQFEKERIDSLTEDGELMLTLLASFAQEEIRSLSDNVKWGTRKRFEKGIPNGRFQIYGYRWEGDHLVVHEEEAKIVRLIYDNYMNGLSAETTEKQLAEMGVKSYKGQHFGNTSIRQILGNITYTGNLLFQKEYVQDPISKKSKINRGELPQYFVENTHEAIIPMEVYQAVQTEKARRRELGALANWSINTSCFTSKIKCGRCGKSYQRSNRKGRKDPNANYTIWICGTRRKTGNAHCRNKDIPEPMLKEACTAVLGLDTFDEIIFSEQIDRIEIPAPNEMIFYFKDGHIVPHHWESTMRKDCWTDERRAAKGRYVQEHQLGPNSSCFTSRIRCDSCGENYRRQRSRHKDGSFDSVWRCASGGKCNSPSIKEEVLKNLCADAMGLESFDETAFREQIACIHIVAPFQLSIRFFDGHTFEAAWENKRKMPKHTEQRKQHMREVMIQKWREKCGESNDYTGNDKPVHGNADQ

SEQ ID NO: 7906 - protein, 422 aa, synthetic construct
MENKKITKIIKEPLSNEIEKKLLKNKKAAAYARVSSSSAEQRTSLDTQVKYYKALISKKENWDFIEIYYDYGISGLSCKKRDGFNRMVDDALAGKIDLVITKSLSRFARNTVDTLLVLRKLTAAGVAVYFEKENINTLDSDGEFMITLLSSLAQEESRSMSRNITWGHRKRFSDGKYSVAYSHFLGYDRGKDGTPVVNPEEAKIVRLIYRLYFLGANFGGICDYLNKCNILTPCGNDSWDISTVKRILTNEKYKGDALLQKTYKAHFLDKRAKKNNGAVPQHYVSNGHEAIIPPEIFDLLQEEIEMRKNLLPGCKSKITLNNKVICGLCGSSYMRSKNFWRCRNLYDRQKHCPNIKNDYLEKSCAAVLKKEFSQRVSVIETCGALLSEIRPEMAKRECINKFSITLKIQTHFIMTIGYGELQ

SEQ ID NO: 7907 - protein, 502 aa, synthetic construct
MRYDAIYVRQSLYREESISLETQVQIAKKYCTNEIKVYQDAGYSGKNTQRPQFQQLMRDVGMGNIDKVIVYRIDRFSRSILDFFNAWEILEKNNVNFVSATEQFDTSTPMGKIMLLIIVGFAEMERMDISARVTDNYYERAKRGQWPGGPAPMGYDLGYLYEEDGRKIPTLTANGEMPVVQYIMEQYALPTTTLGEIMRDLNSRSIPGPPGPKKQRTNWNTVALSRLIKNPVYVQASAAVYAFYKREELVTVTSRVEEFDGHSGCLLVGKIQSRGQKKGRQKTGTEKTLSVGNWEGYVQPEIYLKCQEKLKQNRQVGKNGSGTHTWLSGIIKCGKCGYALTVTYHVNKTGKIRKLGCSGNYIRNMCNVRQNELLDIQSVENEVEKELIKLLGKQKTITYEEHVDHDTEIRLVKTQESIQNLLEILAGGKLNLTTINYVNEEMERLHSAEEELLKQIQKAKKKVEIEPIDFTELAFEERKRVARTYIDKVYVYADRIKIKWKV

SEQ ID NO: 7908 - protein, 435 aa, synthetic construct
MAAYCRVSTDQEDQLHSFEAQVEYYTRYISDHPNYEMAGIYADEGISGTNIKKREQFRRMISDCETGKIDMVITKSISRFARNTQDCLQYSRMLKNLGIGILFEKEHINTLDSSGELLFTILSSLAQDESRNISENCKWGIRSKFKKGEMHVNTHKFLGYDKVDGKLVINEREAKIVRRIYREFLWGHSPQEIAKGLEDEGIEGCMGAKKWYPSTVINILKNEKHMGDALLQKSYTADFLTKKQVKNHGEVTQVYVKGSHIGIIDKETWNAVQLEFARREEFVKEHGLKGYGYGRECNPFTSRIFCGECGSPYTRHTWRSRGIMQWQCKNHMTNGKVTCVNGFVSQSDLELGFVKAYNMLMKHKEILIPRWKDTIETGNALERLRAKQFLDLSEQPELECYVPELAQLVIQMVIIKGIKKYEFTFMDGSRETVCV

SEQ ID NO: 7909 - protein, 504 aa, synthetic construct
MEIQVLEARSSKGYRKKVCAYCRVSTDALEQENSLENQIAYYENLIQSNPEYEYAGVYYDFAISGYKEKRPGLQKMLMDARNGKIDLIYTKSVSRFARNTAIVLKVSRELKELNVGIFFELQNINTLSSQGELMLTILAAFAQAESESGSIGAKMVYQRKYEQGIPVQYLERCFGYTKNEKGEFVPDTEQAKWIVKIYEMAAEGYSLSKIADEMNAAGVKTDKGAGWVESTVKRILENEIYKGDYIMHKNYVNEERKLVRNRGEVDAWYIEDDHPPIVSRQLWDKAQEARKKKRDYLDMDCQIREVTEENYPYKGHLFCAKCGSPLTHRIYSNGNRMSWDCSGRRRHGKDFCTGIHVPDTAVRQWKFDGNIYISIKDSRKSIKEFSYTKESSWSRRHKKKEFVREVPELTEENYPYYRSIFCAECGSRLVRHIKKHGDIVWECNGRKRKGVAYCEGVRIPDRVVQAFMPIRKAIYIKERKGRNGTKHYSYSCKKPERAKRKEQG

SEQ ID NO: 7910 - protein, 557 aa, synthetic construct
MQKEKIKVYTYTRVSTAMQVDGYSLDAQKAKMKAYADYNDYEIVGEYEDAGKSGKSIEGRAQFSQMMEDIKSGKDGVSYVLVFKLSRFGRNAADVLSSLQVIQDFGVNLVCVEDGIDSSKDAGKLMISVLSAVAEIERENIRVQTMEGRIQKAREGRWNGGFAPYGYQLVDGKLIINEEEAEAIRVIYDQYVHTDIGANGIAKYLENHGIRKIPRQNGKNPLFDAHLIRLILKNPVYCGKIAYGRRKTEKVRGTRYEYKLVEQDNYLLADGQHEAIVSEEVWQAAQVKLLAQAKKYEHVNRGKDEHVHLLSGIVKCPVCEAGMYGNKSIKHKADGTKYKDFYYYGCKHRSMIRGHKCDYKKQIREELLDDAVAEVIVKLVSNPKFAAMMQEKINMKVDTAAIDQEIANYEKQLRQHYSIKSKLAEEIDSLDPDDRHYVRRKADLDDRLYRMYDKIEDTESSLIAARAKKQAIEAEKLTGDNIYKVLIYFEKLYGVMNDVERRQLMEMLISEIQIYPERQPNGQWLKSFKFKLPIIEEDTSISLDDKEQVETVILLSR

SEQ ID NO: 7911 - protein, 574 aa, synthetic construct
MLTAFILTRYSTDNQNPDTTAVQVKKCAEYCRAHQFTILDIFSDEAVSGMKQHRPEYDRMMNLYRTGNGADTVVIYDQSRMFRDMVEWFTFRRELQALGARVVSVTQPLVGGDLLDPSVFINEGAMALFNQMHVLVTRQKVVEKMRFMAGQGRACGGTPPLGYDVDADRRYIINPWEAETVRKIFTMHAAGSSYGEILTALAAEGRTTKSGRPFGKNSLHDILKNEKYIGRLIYGAVPRAHGGAKRNSHGRPAEGRLVIENAVPRIVDQQLWEEVQARMASRQNEGGRYSAKNEYLLAGKVFCGECGGAMVVTGCNQSKDGRQYRYYNCVNKRQTRTCASKGVGVGTLEVMVAKAVKDQLGGSDSASRIAKVATTYRNEIQQSAAPKNDALATELKTVETQIGNLVSLLASGTKSDAITARLAELEERRAQLQTSLRVLEEAARTVGLSDAQIAEASEKLAAASPDTPAGLRTLLATVLRVNVFADHIEVYTLFGGGSPTELSPDIKTAAREFINTVGVAPPAPVRRGLRSVQKPRSTDRGFLHPCVAPHFPTKFCCANFRGAPPCRPFLLTAR

SEQ ID NO: 7912 - protein, 450 aa, synthetic construct
MGMRQVQILEATKTTTNSVGRRSMGMPIQRIRVAAYCRVSTDGDEQLGSFVSQKSYYEEKIRQNKEWVLAGIFADEAITGTKVDKREGFQEMIRECQNGKIDMILTKSISRFSRNTQDTLKYVRMLRDRNIAVIFEKENINTLDMNGEMLLTILSSLSQGEVESLSENVKMGLRMKMKRGELIGFNGCLGYDYDRETKTITVNEQEAETVRFIYDLYLQGYGTSSIARRLMELGIKNKRGTVEWHTHGVMGIIKNEKYKGDVLFGKTFTVDPISKRRLANMGEEERYYIRDHHEPIVSREIWDKAEQIRLKRVRPRLMETTGNRERYTRQFTFSSMLECGYCGHKLSRRTRHQTTTTKKPVWQCMNATKNGISNCPNCKAIDEVIIENAFLDAFRLLADNFDDVLDSVLCTIEDVLKDDRELKRVKQLEKDIASIETKKSLEFPQTAIKK

SEQ ID NO: 7913 - protein, 547 aa, synthetic construct
MVMKRGATLQEQEDGVIYARYSSHSQKDASIEQQIKECLAYAKSQGIRIVATYSDRAITGKTDRRADFQRMMRDAEKGKFRYVIAWKSNRMGRNMLQAMMNEAKLNDLGIRVLYTEEDFDDTAAGRFALRSMMNVNQFYSENMAEDIKRGLYDNASKCKIANGGLPLGYKKGEDMRYALDPPKDEIVREIFGRVACGEPFVDIAADLNARGIKTSRGGQWGKNSFHALLTNERYTGVYIYGDIRIEGGVPQIVDKGLFLRVQEVLKTKKNPQGRHRTNGEYLLTGKLFCGHCKSPMVGISGTGKSGKLHYYYICQKKRMEKSCDKATVRRDTIEREVARAIRDYIMRDDVLEWLAESAMNFAREYREQTCVGTLEAQLADNKRATKNLLTAIEQGIITPTTKERLLELEREQAILVSRLAEEQASLLDYSRDDIISAMSLYRNGDVENKSYQAKLFDAFLVAAYLYDDHFKLEFNITGKKNLVDVPLDASLVDSIESNAPAGCSYKVSFGPPQYRTFSSINRAKCTVFFTFLSYLMILVDTVVDIDC

SEQ ID NO: 7914 - protein, 530 aa, synthetic construct
MKKIRIRAALYARYSSDNQREESTIAQLRAGREHAKKKGYLIVAEYKDEEITGRYDRRDDFQKMIRDAKHGLFDVIIIHKFNRFARNRYDSAIYKRMLKKAGVRVESVLQPLDDSPESILLEALLEGMDEYYSLDLAREVMKGMFENAEQGIHTGGRPPYGLKVNPDTHKYEIDETRYKAVQIYFEGRKDGISRKNIAEKLNTLGYRTQTGKKFTRDSFYGWDTNRKYNGDYVFNVASSKDVDGRRNTSKKKPIEEQVIKEGIIPKVLDSKLFGEVNELIKKNKYKPGRMKAKVNYLLTGKVFCGKCGASYNGNSYRNSKSKENTLLCYYKCSGKCKNPSMRKDDLEHIIINQLSVHCFSKEAMDNIVIRVKELYQERRKETQDDIGPIKKEIKELESTIENWMQALGKGIRGLEERIVEAQNKIDLFHEELDHINMLQKETEINDKMIYDLLKEKKDALYSDDENEKKSILQEYVDKVIVNPSDNINTFDLEITYRVFNGGGEGTCTPVSKNDHKSVYACILYFKFRQS

SEQ ID NO: 7915 - protein, 619 aa, synthetic construct
MTSAYDDLVDELLGDDELLADGALPAVLSTVAEAVEPGSRAVIYLRVSSAGQVKNDYDPEGISIPAQRVKCQRKAEQLGLTIIDEYVEPGRTATEMSKRVEFQRMLTRVRNAGDVDYIIVYKLSRMARNRLDDAIVMADLRKRGVTLVSATESIDDSPVGQLMHGILATFNEYQSRESGADIAYKMKQKAKNGGTIGRAPLGYLNVRDRFDGREIRTIAVDPERAPFVQLAFELYVTGDYSLEDLSDELYDRGLRTRPTGRHPAKQVSINKLSMMLRDRYYLGYVEVDGEEVQGRHEPLIDDDLFDRVQDLLESRSTAGERRREHPHYLKGSLFCGRCKRAGITQRLIVQHTVNSRGSEYTYFFCRNKQNGSCEAPHINVALIEDAVENHYATIRFSAQFVATVRAEVARAIDEQEASERLLHKQLTTELQALDTREENLIELAADSTIGQDKIKTKLREIARQRRRLTERLTTTTENLSDSARLIEAALTLLENPQELYRRCDEQQRRMLNQAIFHSIYVDDDQIADHSLREPFAHLHAVQSDWQTTDVTLPEPRTDTRPRNAKRAASRKGGGPVATNGVQVLLRGVVSVPCSSKTPRVELRGIEPLTSALQKRRSTN

SEQ ID NO: 7916 - protein, 541 aa, synthetic construct
MPKAISYIRFSTKIQSVGDSTKRQSKYINDWLKRNPDYYLDESLRFQDLGISGFSGANAKSGAFGEFLAAVESGYIEAGSVLLVESLDRVSRQDIDTAGEQLRKILRSGVEVVTLVDNEWYTKESLKDSLSMIKAMLVMERAHEESAMKSTRLRSVWAAKRERAAKGEIMSKRCAAWLKVSEDRSRFEFIPENVKAVQRVFQLRLEGLSHVKIAKQMNDEGFSTLNQFKSVTGGWSQSSVTELLSNRSVIGFKVPSKSMAVKGVSEIPNYYPSIITDEQFYAVQQLKQGSGRKPSSDLPLLTNLFKGVLRCSECGFIVVVAGVSAKRSGIYKCSMKSEGRCNSVGFSRLQTDRALVQGLLYNTNRLALNRDNGSAIGSLQSELEQLQKQRERLIKLAMLADDTESMAKDLKALNSQIKDAEKAVSEVHQREQSSQLETISHLDLTVKKDRIEAQIIIKRIVKEIRLNTARKKCDVFLHNGLKLLNFPLDRVVDGAQWLEVLPLIDGDEFDFEGFTTKPQHIALEEAPEWVKEMEEQPNQPL

SEQ ID NO: 7917 - protein, 457 aa, synthetic construct
MRVACYDRTSVYEEAKISNDAQYDAVKEYILEKYEQFPQRFSDKGESGGKADRPAFRQLRAWVCASEEEGVIYVWRYDRLARQAQIALEFIELCQQHQVQVYSISEPLPASFSHASTNKLFVQLLFTFAEQQRNVIIENVRAGLAYKKQQRQYLSSAVPYGYRLVNGKIQQETHEAKVVCRIFQLYLTKKYGYKKLCQRLTQQKIFFRERPFQPYHIYSILKNPLYYGEIKGGSLGKYLGSFEPILSKATFLQVQEIRQSRCTAKKDTYPYLLRQKIKCPFCGRHLSSKYQWNTKKTKTLHYYHCTDRSCQGIFLRAERVESEVLEKIQAFFQHEGVYQALIAQLTQQLAEKRKDEKHKVIQQKKQEAQWLKAFEEGNCSLEELKQQLKTLQKPMSTSSFLSLQQYEAKVKEWLQLKDLSSRQLLCDHVCRIEVTKEKTVCGIYFRQMTQNILEGNE

SEQ ID NO: 7918 - protein, 545 aa, synthetic construct
METTPTKRVALYIRVSTQEQALEGHSIQAQEQNGRQFAERMGYEVVEVYADEGISGKSTKNRFAYQRMMKDARNHRFDLLVIWKLTRLGRNMLDVLQTVEELLRYDVGLHSISEQFDVTTSTGKLMLQLLGSFGEFERNQIAENVQMSMQSLVKDKKRYAGGRRLGYVSGIDTNGQKQLVIEPEEAKIVRLIYAKYLGGAGYRAIANFLNRQGYQTVKKNAFSTTAVKDILCNKIYAGYLEYARYINWETKRRKGKNPKPILVKGTHEPIISEEDYQKVQERLALEGKQPKWNHTGENVLTGLLRCPECGAPMAASNVTNTLKDGTKKRIRYYSCSVFRNKGASVCHANSIRAEQAETFVADRLKEIVQLPEVLPRLVAALNEEIVRQSQPLEQELVVLLERKEELKTKIEKWEAALEDSPELFPMLKDRLDELTEKRRQLHIRENEILGIFQQQGEPIQVKDVQRILTSLDRFLAQSEKKQVKALYRTFIEKITFDPNHKEMLEITMKFTHAVVQQLNEQYQIAVSKTKDTAIFVLKTPFTLTI

SEQ ID NO: 7919 - protein, 457 aa, synthetic construct
MRVACYDRTSVYEEAKISNDAQYDAVKEYVLEKYEQIPQRFSDKGESGGKADRPAFRQLRAWVCASEEEGVIYVWRYDRLARQAKIALEFIELCQQHQVQVYSISEPLPASFSHASTNKLFVQLLFTFAEQQRNVIIENVRAGLAYKKQQRQYLSSAVPYGYRLVNGKIQQEVHEVRIVRYIFQLYLTKKYGYKKLCQRLTQQKFFFRERPFQPYHIYSILKNPLYYGEIKGGSLGKYLGTFEPILSKTIFLQAQEIRQSRCTAKKDTYPYLLRQKIKCPFCGRHLSSKYQWNTKKTKTLHYYHCTDRSCQGIFLRAERVESEVLEKIQAFFQYEGVYQALITQLTQQLAEKRKDEKRKVIQQKKQEAQWIKAFEEGNCSLEELKQQLQALQKPMSTSSFLSLQQCEAKVKEWLQLKDLSSRQLLCDHVCRIEVTKEKTVCGIYFRQMTQNILEGNE

SEQ ID NO: 7920 - protein, 545 aa, synthetic construct
METTPTKRVALYIRVSTQEQALEGHSIQAQEQNGRQFAERMGYEVVEVYADEGISGKSTKNRFAYQRMMNDARNHRFDILVIWKLTRLGRNMLDVLQTVEELLRYDVGLHSISEQFDVTTSTGKLMLQLLGSFGEFERNQIAENVQMSMQSLVKDKKRYAGGRRLGYVSGIDANGQKQLVIEPEEAKIVRLIYAKYLGGAGYRAIANFLNRQGYQTVKKNAFSTTAVKDILRNKIYAGYLEYARYINWETKRRKGKNPKPILVKGTHEPIISEEDYQKVQERLVLEGKQPKWNHTGENVLTGLLRCPECGAPMAASNVTNTLKDGTKKRIRYYSCSVFRNKGASVCHANSIRAEQAETFVADRLKEIIQLPEVLPRLVAALNEEIVRQSQPLEQELVVLLERKEELKTKIEKWEAALEDSPELFPMLKDRLDELTEKRRQLHIRENEILGIFQQQGEPIQVKDVQRILTSLDRFLAQSEKKQIKALYRTFIEKITFDPNHKEILEITMKFTPAVVQQLNEQYQIAVSKTKDTAIFVLKTPFTLTI

SEQ ID NO: 7921 - protein, 543 aa, synthetic construct
MEINDLENTLSHKNVLSKNTRKRAVLYIRVSTQEQAEEGHSIPAQEKMGREEAARKGYDVIEVYADEGKSGKTIKNRFAYQRMMEDVSKNKFDVIIIWKLSRLGRTALDVLQIAEELILYDISLYSISEQFDMTTPIGKMMLQFLSSFGEFEWNQISENVQMTMLSLVRDEKRYAGGRRLGYISGEDEYGEKQPIIEPDEAKIVQLIYSKYMIGEGYRAIANYLNRQEYKTVKGNSFSTVAVKDILHNKFYAGYLEYGKYLNWSTKRRKGKNPNPILVKGSYEPIIDEETYQAVQERISLETRQPQWNQSGENLLTGLLRCPECGAPMAASNVTNTLKGGIKKRLRYYSCSAFRNKGASVCHANSIRADKAEAFIAARLKEIVQNHTILRDLVVQLNKELVDQIQPLEQELAIISVRNEEINRKLIKLYDAIEDSPELFESVKDRLEDLSTKRKEYQMRENEILAILQHKGEQVTIKNVQSIVNGLDALLTNRKKNEVKKIYRTFIDKITFDKLNKEDIKIYMKFDQLVIDQLNEHYKEVVSE

SEQ ID NO: 7922 - protein, 457 aa, synthetic construct
MRIYSYDRTSVFDEKKLSNEAQWTRTCKRALEDYGIEPQRYSDKGLSGGNENREAFQQLKLAIASSDSAGILYVWRYDRLSRDTRVALEFVELCQNHNVEIISIAEPLPSTANNLAAKKMFIQLLFINASMQRETTIENVRNGLAYKRSQNKYISSSVPFGYRLVNGKVIQEPTESKAVKRLFELYCSGEFGYKKLTLALLDEGYYFKDQHFKTHHIQSILNNSLYYGWIKGGTFGGYQGDFDPIIDKNMFDQAQAIRQSRHVKKTDKREYPLRKKIVCPYCQRRLSPKFQNNNTKTKRHYYYHCANRECKGIFINAEQIENVVIDNLRNFLQQKGIFTKVLAEVKQKINQMKKTRQMEKRIVHRNKTAIIEQFEKGELTIEEMKKELGILEKSPSKAQSDIINNYEAKLQELLLLKEVPIQQIILEEVASIEVNPDKEIQGIYLISIGENIIRKVV

SEQ ID NO: 7923 - protein, 599 aa, synthetic construct
MKKKLYSYIRWSSAQQTAGTSLERQTAAARDYAKAHDLEFVEILDAGVSAFRGKNATDGALAEFIAAVENGAIPSDSWLYVENLDRLSRATVRNALKLLLHITDLGVTVVTGMDGKIYSAETMDKDFTDLMISLLLFSRANEESKTKSDRVKEASMKALARVQAGLPATIKGGGADPFWIQRGGRETSPTQHPAHWLAIKKIVELSLQGIGCNRIRQVLNADPTLYPPPRQKDTPQRRALIDAGLAPIGWNIHRIEDARRQPSLYGLKTIRLSGHTYNLEGYYPAVCSEEEFHLIQNISASNRIKSGDIRNTITLLSGLNLCKCGSCGGWVTTFRKNGKLTYRCDAGHRKIHHCPTTWSLNALIIESATVRALIAGVAHNIIEDSQDLESVAGEIDNRRAEVLEIDRKRERLAIRIAEEDDDLLMQQLRQYNARKRDLLTEIGALTQREALRSEGQNVAERLAEAQRLLTADMVNDIFTSDRLAVRELIRKSMRQVTIWKRQDKSLKVECEFISGWRYTFEGVMNGGQKSFIEYRTSPNGINMVEIYDKLNAITAKAFKHVLGVDDNVMLPTLSHIQVYHDMAVRLGHSPLTGSQFFWR

SEQ ID NO: 7924 - protein, 507 aa, synthetic construct
MKRVISYIRFSSERQAKGDSLRRQSKMVNDWLKAHPEYYLDQDLSFRDLGVSGFTGKHLKGGLGDFLTAIEKGLVKAGDTLLIESLDRLSRQDVDQASELLRNILRSGVDVVTLSDGEHYTRESLKDPLALIKSILIMQRSHEESLRKSERIQAAWNRKKELISEGIKISKRCPAWLKLNDDRKSFSVIPEKVETVKRCFQLRLEGKSIWEIVRTMNAEGHQTLNQYKAGSFGQTSVQDLLKNRSVIGYFTPKGCEEISGYYPSVIDETTFYKVQQLSHSRYGRKPVSDKPLSVNLFKGVIRCSECGHALIITGFSDTRSGIYRCPLRNENRCSAKGLSRKQTDGTLLTLLSRLDRFDSDTTNTIDMLRLHREHISSNIEKLVQLSLEIEDLNAITSKLKQLKGELSQVDADIEKETQRLKSIDVGCLSDCDLTTKAGRIEAQLIIKSAVKEVVLNTAKRRCKVTFHNGRAITLPITENPSEDVTEAIQSLSEVTERGLLDVDEVII

SEQ ID NO: 7925 - protein, 460 aa, synthetic construct
MKCAIYRRVSTDEQAEKGFSLENQLLRLQAFAESQGWEVIADYMDDGYSGKNMNRPQIKRMLHDLKLNKFDIVLVYRLDRFTRSVKDLNDLLEVFKENEVDFKSATESIDTSTATGRMILNMMVSTAQWERETISERVKDVVRKKKDLGLISTGYPPYGYAMNDGVISQVPHEVEIVKFVFEKAKVYGFQKISKLLNEQGLVTRNGTKWLISTASRIAHNPFYSGEMRYKRDGETSTVPINVEGYEPVITKEEHKEVLKAIKKRNRNQTRAKSNEVYPFSGIVLCPECGHPMKGTRVSSRGYYYKYYRCDRASDHFCNGKLIRYEKLDKAFAEYIHDAFQIDRIEIKEETNTKDIQREIKRCKSKIERLKDLYVDGDISKKKYKNDVGELNEKIYDLEQKLLSAENKISHDHIRENLKRLSEFWGLIDDNTKMESIRGVFDTITVEIQGNDVVITDHTLL

SEQ ID NO: 7926 - protein, 467 aa, synthetic construct
MKCVIYRRVSTDMQVEEGISLDMQKLRLEQYAKSQDWLVVNDYCDEGYSAKNTERPAFQQMIRDMKKKQFDIILVYRLDRFTRSVSDLHSILKIMDEYNVKFKSSTEIFDTTTATGRMFITLVATLAQWERETTAERVRDSMHKKAELGLRNGAKAPMGYNLKKGNLYINHTEAEIVKYIFEMYKTKGVVSIVKSLNSRGVKTKQGKIFNYDAVRYIINNPIYIGKIRWGEDILTDIAQEDFETFINKDTWYTVQQIQDSRKVGKVRLQNFFVFSNVLKCARCGKHFLGNRQVRSHNRIAVGYRCSSRHHQGICDMPQVPENILEKEFLNLLEDAVVELDASDEKPVELSNLQEQYNRIQDKKARLKFLFIEGDIPKKEYKKDMLTLNQEENIIQKQLANITDTVSSIEIKELLNQLKDEWNNLNNESKKAAVNAIISSITVDIIKPARAGKNPIPPVIKVMDFKLK

SEQ ID NO: 7927 - protein, 460 aa, synthetic construct
MKCAIYRRVSTDEQAEKGFSLENQLLRLQAFAESQGWEVVHDYMDDGYSGKNMNRPQIKRMLHDLKSNKFDIVLVYRLDRFTRSVKDLNDLLEVFKEHEVDFKSATESIDTATATGRMILNMMVSTAQWERETISERVKDVVRKKKDLGLISTGYPPYGYAMNDGVISQVPHEVEIVKFVFEKAKVYGFQKISKLLNEQGLVTRNGTKWLISTASRIAHNPFYSGEMRYKRDGETSTVPINVEGYEPVITKEEHKEVLKAIKKRNRNQTRAKSNEVYPFSGIVLCPECGHPMKGTRVSSRGYYYKYYRCDRASDHFCNGKLIRYEKLDRAFAEYIHDAFQIDRIEIKEETNTKDIQREIKRCKSKIERLKDLYVDGDISKKKYKNDVGELNEKIYDLEQKLLSAENKISHDHIRENLKRLSEFWGLIDDNTKMESIRGVFDTITVEIQGNDVVITDHTLL

SEQ ID NO: 7928 - protein, 408 aa, synthetic construct
MSNKPVRFAAYCRVSTKKEEQMDSLAHQKEFFEQYAAREGMELVKIYADEGVSGRQLRRREQFVRMLSDAAHSAFDLVAVKDISRFARNTVDCLQAIRTLKKQGIAVRFLSSGQESLGDSEFILTVYASLAQEESANLSKRVKFGKEINAKKGRVPPMLYGYDRIDLFTLRICEAEAETVRFLFARYLDGWGTARIAQELNRMGTPTKLGKQWNSRGVRRCLSNPVYCGTLINHRSTVVDYLDGTVKPLPQGEWFSHERPDWAIVPRAQFDAVQQEMTRRRTIAAGRQRIQTHRPKLPLSGLLFCETCGGVFSPRTRGGRRYWMCWHHDRGKNGCTNAVSIPEAIVFDLLERCLRDLTQSDVSCVHGLPHAQLTRLLSRIEVAEDRTVRIFWKRKENCSDYCGTDRNT

SEQ ID NO: 7929 - protein, 422 aa, synthetic construct
MKIEILGADTQAKRPKLRVCAYARVSTASDAQEDSLDNQSITYERLISSNPEYEFVGVYADQGISGYSEHRPAFQNMLQDAREHRIDLILTKSISRFARNTVTVLKYVRELKELGVGILFEEQNIHTLSHEGELMLAVLASFAQEESRSTSENNRWTVRKRFEHGEPIINTTCFMGYDKNEYGELVVNPEQAAIVRRIFHMYLSGYGAFRIAQIFNQEGVPTVRGGKWADRTILDMLRNEKYKGDYLLQKYYTPENIRNRSVRNNGEVQSYYIAEDHEPIVTVEEWDEVQRIMAARREKRGMSGSQKYSNRYPLSGMLFCPYCGTTLRRKQVHNKRIEWWCSTYILHGKAACKGVHVRDEEIPPITEKTVVEEVIRDGEKHYCYTSKADFDAGIHREPVIREDPGSRILPSVNRPRRTAIKL

SEQ ID NO: 7930 - protein, 434 aa, synthetic construct
MAAYCRVSTDQDEQLSSYENQVNYYRDFISKHEEYELVDIYADEGISATNTKKRDAFNRLIQDCRDGKVDRILVKSISRFARNTLDCIKYVRELKDLGIGVTFEKENIDSLDSKGEVLLTILSSLAQDESRSISENATWGIRKRFERGEVRVNTTKFMGYDKDKDGNLIINREQAEVVRYIYERFLKGYTPESIARDLNDRDVPGWSGKANWYPSSILKMLQNEKYKGDALLQKTYTVDFLTKKRTENDGQVNQFYVANNHEGIIDHEMWETVQLEIARRKAFREEHGIPFYHLQNEDNPFMTKVFCAECGDAFGRKNWTTSRGKRKVWQCNNRYRVTGVMGCSNNHIDEETLEEAFMKAISILKAHKADVLDKLDKLSKGDNLLYKHYAKFMKQILDVDHFDCTIMCQVLDNITISESGEIRVTFLEGTEVDL

SEQ ID NO: 7931 - protein, 413 aa, synthetic construct
MAVRLIKAKSEQKKQRVCAYVRVSTTNSSQLDSLENQKTYFETLYANREDVDFLGVYYDKGISGSKEKRPSFQAMLEACRQGQIDLIHTKSISRFARNTMTVLEVSRELKVLGVGIYFEEQNIKTLSNEGEVMLSVLASLAEEELESMSTNQRWAFQKKFQRGEMVVNTKRFMGYDMDDDGELVINEAEAQIVRRIFHLYLDGMGMHRIAKLLNEKGVPTVSNARWYDMTVGNMLRNEKYKGAALLQKTYLHGVSGKRRLNQGEVAQYLIEDNHEPIVSKEVWQAVQDKLDSNTWKQGPNKHYRFTSMLRCQYCGSTLKRQVSYKKQIVWCCSKYIKEGKASCQGMRVPEKAIEDWRLKTPVTVIERNEYGQKHYSYSSQENAVDSHPSASHQNQSGRLLSGVHRSRRTAIKL

SEQ ID NO: 7932 - protein, 507 aa, synthetic construct
MKRVISYIRFSSEKQAKGDSLRRQSKMVTDWLKAHPEYYLDQDLSFRDLGVSGFTGKHLKGGLGDFLTAIEKGLVKAGDTLLIESLDRLSRQDVDQASELLRNILRSGVDVVTLSDGEHYTRESLRDPLALIKSILIMQRAHEESLRKAERIQAAWDAKKEAAKAGIKVSKRCPAWLKLNDDRKSFSVIPEKVETVKRCFQLRLEGKSIWEIVRTLNDEGHQSMSQYKPGSFGQSSVQDLLKNRSVIGYFTPKGREEIAGYFPPIIPETDFYKVQQLSYSRYGRKPASDKPLSVNLFKGVIRCSECGHALIITGFSDTRNGIYRCPLRNENRCSAKGLSRKQTDGTLLALLSRLDRFDSDTTNIIDMLRLHREHVSSNIEKLVQLSLEIEDLNAITSKLKQLKGELSQVDADIEKETQRLKSIDVGCLSDCDLTTKAGRIEAQLIIKSAVKEVVLNTAKRRCKVTFHNGKTITLSITENPSEDVTEAIQSLSEVTERGLIDVDVVEI

SEQ ID NO: 7933 - protein, 488 aa, synthetic construct
MGSYAIYVRVSTDRDEQVSSVENQIDICRNWLERNGFIWDEKRVFKDEGISGTLFVNRPAIQLLLQKAKAKEIDMVVFKSISRLARDLKDSLEIREVLLAHNVRIISVEEGYDSVKAGKNDMAFELWSLFSAQYSRTLSSSITAALAVKVRRGEHIGKVPFGYNRENQKLVIHDEEAEIVQKIYSWYTDGWGYKKITNELNRLGVKSKTKKNWQMTSVQRILRNPIYKGTFILNQYTSVKVSGKKKQIRNPKEKWFVFPNHHPAIIDEEVWNQVNPKDTNTNKTKITAWNEFRNLAKCAVCSSNMVIVQSYSKKKNGERTEWKYLKCSQYRRAGKHGCVNHVPIQYRDFRQFIIDLLVKKGESVTLKLQGNIEEGQEKKIKKLQQLMNVNEQKKKALLDLYLEGLINKEEFEKKRNDLEAEITKANHELFILQQNDIVQTDIKTIKEAFEQLRQREHDLYHVFQTLIQKIVIHQDGMVDITYTFESPL

SEQ ID NO: 7934 - protein, 532 aa, synthetic construct
MKQYNEMRLEDILQPGKRVAFYARYSTKDQGYEMQKHSVEVFLQKYGCEIKNEYVDAGVSATKVPFEERPYLQKLIGDAADKKFDCIIVYKNDRIARHIEEHDKFRKQMFEMNMHVVVSSSHELYTVGEIVPQTVKDGLTRIEAALIQERTKDTFHSKAKRGAWLGGKASYGYEYQVTVENNGGIKSRVEQFDDVEQEQQVVKEIYRLFELGFGFQQIADEIRNKKWDERIKWTKERIRYIITNPFYSGMITMNRYHKGVLNNKSEWIKGKVPNMNPIFSQEYWEYIIGLFEERKERKIHSKDYSTPFLLRNILYCEHCKESMTTKNQEPGGTKSKNKKVEKIRRIYDCKNCNFKLQAEMVHEQFRKKYLPYVLEQVTQGKKDQVELSIERRLKKELSDLRSANRKLETEAIELNQQIEELNREIKLHYEQEIIQEEVLEFMKILMTHRSNKMHELNVIKDNRDELKKRMNRIEQTIKEKNYLPSHNLLSEFAQENVNPQKLRAFLLQFFKCVYITSDGELLMIVNNSLIES

SEQ ID NO: 7935 - protein, 508 aa, synthetic construct
MKKAIAYMRFSSPGQMSGDSLNRQRRLITEWLKVNSDYYLDTVTYEDLGLSAFNGKHAQSGAFSEFLDAIEHGYILPGTTLLVESLDRLSREKVGEAIERLKLILNHGIDVITLCDNTVYNIDSLNEPYSLIKAILIAQRANEESEIKSSRVKLSWKKKRQDALESGTIMTASCPRWLSLDDKRTAFIPDSDRVKTIELIFKLRMERRSLNAIAKYLNDHAVKNFSGKESAWGPSVIEKLLANKALIGICVPSYRARGKGISEIAGYYPRVISDDLFYAVQEIRLAPFGISNSSKNPMLINLLRTVMKCEACGNTMIVHAVSGRLHGYYVCPMRRLHRCDRPSIKRDLVDYNIINELLFNCSKIQPVENKKEANETLELKIIELQMKINNLIVALSVAPEVTAIAEKIRLLDKELRRASVSLKTLKSKGVSSLGDFHAIDLTSKNGRELCRTLAYKIFEKIIINTDNKTCDIYFMNGIVFKHYPLMKVISAQQAISTLKYMVDGEIYF

SEQ ID NO: 7936 - protein, 635 aa, synthetic construct
MQFISHAKPQIYSYRRFSNLRQEKGRSLARQKKLTEEIAEKFNLSLNDDFLMTDKGLSAFHGHHKSKGALGVFLAAVENKMVKPGSVLIVESLDRLSREQPHVAQATLAALVSSDITVVTATDEKIYSKETMAKDPLGTMIMSVLEMIRAHNESLVKTERSVDFIHSEILKHENGEVADVAGAIPFWISRKPSPNKKVKAGFELNEHESTIRLLIDMYHVQGKGLRTISRELHSLGIEAPKGGGVWAVSTLSSIFSNSALCGRHEFKLEYLKDGKKQKETYTLDSYYPEVMTIDEFESMEALKKRRSGAQKGDKSDKGGLVYLLTDYGKKSFCAKCGSSIGSQPQRQKYRIRRRLHCSKHKETENCCKSIVQDHIEDAFLVSVARHIDYNLINTQVKPEDIIRNSERLSDIDNEMGNVLDMIRIVKDSKSKLKLMQDYGALENEKEELTKQNSEFKQFKISPEDIKDFIGKVNEARDYQNHEARKFVKSILMQCIRKISVHMEKKKLECYGYPNICNNSLVNVVDVEFYTDKTLEIFISAETNELLFSKICDDFADDSLGSFTEEQLQLWNNEGWEQLQRQLEKDSSQDDDPTSAENLWLTSVVAEEISKAFLECADDEVIESVLENVDGNQSSI

SEQ ID NO: 7937 - protein, 538 aa, synthetic construct
MYEKILRVAAYARVSTDKEDQSNSLSSQRSYFAEFITNHENWKLSDVYYDEGISGTQTKNRTGFNQMIQDALNGELDLIITKEVCRFARNTVDTLSYTRQLKEAGVGVIFTIDNIDTRDSDGELRLTIMASIAQEESRKTSERVRWGQKRQMEKGVVFGRDLLGYTVHNGKLFINEEEVPVVKAIFHKYVNEGKGTHVIARELLEEGMRPKRIALWSNTVILRVLRNEKYVGDLLQKKTYTPNYLTHAKKYNHGEEDMVYLKNHHEPIIDRELWERTQEELKRRSPSEEQKSKHSNRYWCSGKIRCAECGSRFVSRTKNLKNGGVYRAWRCHSAANHGALKKDADGKNVGCGNSSINERALKTCMNYCITFVQGEKDTLKKEILEDISKLQKESEKKMNSKKIQKKIEKLEMKKRQSIDLMLEGLITKEDLKKQTDWYNEELENLNIQLAEALSKDKVQSRQVNDMEQYIQALDEIMDIGENSELLYKEVLDYIEVHKGGVLDIWLKCIPVGIRLKIRTSGKREFFKTEILETSFIEK

SEQ ID NO: 7938 - protein, 544 aa, synthetic construct
MIRAALYARYSSDQQSSASIADQQRICRERAAREGWQIEAAYEDAAISGASMILRPGIQRLLADAQAGKFDIVLAEALDRVSRDQADVATLFKHLQFARVPLVTLAEGEISELHVGLKGTMNALFLKDLAKKTHRGLRGRVEKGFSAGAVGYGYRMIRRLSSEGELVRGEREIDPAQALIVERIFREFAAGKSPLAIARGLNADGVSGPARKAWRDTSIRGDIRRGTGILNNELYVGARVWNHKHSVKDPSTGKQVMRLNPEGEWVRNAAPELRIVSDDLWAAVKRQQAALAERHARIKQAAQGRALHGARRPAYLLSGLLECGVCGGGCSIVVGDRYGCAGHHRGRACTNGRTIRRELLERRALAGMTDKLVSADKIEAAVAAYTAHINGVNRERRIEADADRRALAKIDKAFAGIMAAIEDGLYQPAMKARMAELEREKSEITARLVEAPQNVPDIHPGIAEVYKRKVERLTATLADPETRLDASSDIRALVGKIVLHPGAKRGEIHATLHGSLMGILDFANDNPSPDASRVITSVASGSPG

SEQ ID NO: 7939 - protein, 559 aa, synthetic construct
MKTKLYSYIRFSSMRQNDGSSYERQIRMAREVAAKYDLELVNDYQDLGVSAFKGANSKTGALSRFLDAIGRSVPVGSWLFIENLDRLSRADIVSAQELFLSIIRRGITIVTGMDNKIYSLDTVTANPMDLMFSILLFIRGNEESQTKRNRTNSSALIKIKSHQENPQNPAVAIEEVGKNMWWTDTTSGYVLPHPTYFPVVQEIVELRKNGRSTAEILDHLNETYAPPPAVSNKKHSKWSRAMVERLFHTRALIGIKEVSVDGVNYELKDYYPRVIDDATFYHLKKNIGARAWNFGDKEEAKPIPLLSGIGLLKCDHCGCAMVKVKGTNKRSDQYRYTCDATRSRRLDCEHPNWSFRGDQLEKAVLQLLADKIWIAEDKANPVPALKVQVDEISRKIDNLIALSAMTGATKELADQITTLNSERETLYNQIKMAEEEMYSVDSQGWEKLAEFDLEDVYNEERLKVRFKIKQALKRIGCSRIDRNKNLFVLEYIDGKTQRVVIENSRGTRKGRIFIDLKTINDRQILESNGLVLHPCLDMLTDKNWKPEEEIPGPLQEFGI

SEQ ID NO: 7940 - protein, 510 aa, synthetic construct
MKRAVAYCRFSSSNQREESIDAQVRAIKEYCDKNKLKLLKIYKDEAISGTSTKDREMFLEMILDCKKNLFDCVIVHKYDRFARNRYDHALYEKILNDNNVKLISVLEQLVDDSPESVILKSVLAGMNEYYSKNLSREVKKGKKENALKAIHNGGIPPLGYDLDVNKKYIVNKKEAEAVKLIFELALDGVGYVSIADILNKRGYKNKRGKEFKKISIRDTLLNIKYIGTYYYGLKDGHGRLQKEPIIIENSHEAIIDKDIFYKVQSKMKKNLKGPRNRNGQLYFLTGYCICGECGGPFSGGYRSVNRNGSISYGYYCQKKKRKETKCNNKAIRKELLETFIFDIIKKEIFNDEKIEKIIKDIISFSENKKLIREEEIKEYTKEIEKLQKLTLKLLEKNLEGNILDEIFNIKNNELKEKIQVLREKIYSVKNITKINEEELRKYLRKFKESANEQAKRKVVEAFVQEIRVYRDKIKIVLRKFPKDLDMVSIGGDEAKLLLAIYKENREKLYS

SEQ ID NO: 7941 - protein, 508 aa, synthetic construct
MINVVGYARYSSDNQREESIVAQERAIREFCQKNNYNLIKMYKDEAISGTSIKDRTEFLELIEDSKKREFQCVVVHKFDRFARNRYDHAIYEKKLNDNGVKLLSVLEQLNDSPESVILKSVLTGMNEYYSLNLSREVKKGLNENALNCIHNGGIPPLGYNLDEDRKYVINEIEAETVRIIYKLYIEGIGYASIAEQLNQMGRLNKLGKPFRKTSIRDILLNEKYTGVFVYGKKDGHGKLTGNEVKIEGGIPQIISKEDFEKIQIKMKNRKTGSRATAHETYYLTGVCTCGECGGRYSGGYRSRQRDGSITYGYTCINRKTKVNDCRNKPIRKEILEEFVFKTIKKEIFTEKRIKSIASKVEKSVNEKILKKAQEVKKLESEIQKIKDKIDRLLEIFLDNKISKEVFEKKNNELERELFLLTQEKNKISASKKINRENIEAFIRNFKANFNKENIKKAIIETFVKEIKVYETYVEIVLRLFPMYIDRNGGDDESRTRVRNYNDYRPLQV

SEQ ID NO: 7942 - protein, 547 aa, synthetic construct
MKLLVTYIRWSTKEQDSGDSLRRQTNLIDAFYSKHKNDYYLLPAHRYVDKGKSGFHQQHKAQGSDFRRMFENVMSGAIPEGSLIVVENFDRFSRADIDTAIDDVRQILRKGVSILTLGDGELYDKSALTDPVKLIKHIIIAERAHQESLVKQKRIAQVWNHKTQLARELKKPMGKQAPGWLELSEDGSHYIVDEDKASLVNIIYDKRLSGMSMFAICKWLNEQGYPTINQRKVRISKTKKPDGNWSALSVKHILTSRSVLGYLPAKISTEDRKTVLREEIEGFYPQIVTDSKFYAVQQLLEETGKGKTSSGEHWLYVNILKGLIRCKCGLVMTPTGIRKPVYQGTYRCNGNKESRCSYGTVSRKLLDTQLCSRLFSKLSQLHDEATDTAKLDELQRRLNTVDSELEKLTETLIQLPNITQIQEALRVKQEEKDELIVQLSREKARVKSVSSLDLSGLDMESVEGRTEAQIIIKRLVKEIVVSGNEKLVDIYLHNGNMIRGFPLDGKDDHTLTLEEATDEMQPLDDMLIFGEPVTRIYPAGDMEEVDA

SEQ ID NO: 7943 - protein, 559 aa, synthetic construct
MKTKLYSYIRFSSMRQNDGSSYERQIRMAREIAVKYDLELVNDYQDLGVSAFKGANSKTGALSRFLDAIGRSVPVGSWLFIENLDRLSRADIVSAQELFLSIIRRGITIVTGMDNKIYSLDTVTANPMDLMFSILLFIRGNEESQTKRNRTNSSALIKIKAHQENPQNPAVAIEEIGKNMWWADTTSGYVLPHPVFFPIVQEVVELRRNGRSTAEILDHLNATYTPPPAASHKRHSNWSRAMIERLFHTRALIGIKEISVDGVKYELKDYYPRVLDDAEFYHLKKSIGVRACNFGDKEEAKPIPLLSGVGLLKCEHCGSAMVKVKGTNRRPNQYRYSCDAMRSSRIECVHTNWSFRGDQLEKAVLQLLADKIWIAEDKANPVPALKVQIDEISRKIDNLITLSAMTGATKELADQITTLNSERETLYNQIKMAEEEMYSVDSQGWEKLAEFDLEDVYNEDRIKVRFKIKQALKRIGCSRIDKYKNLFVLEYIDGKTQRVVIENSRGPRKGRIFVDLKTINDRQILESNGLVLHPCLDMLTDKNWKPEEEIPGPLQEFGI

SEQ ID NO: 7944 - protein, 507 aa, synthetic construct
MKRAISYMRFSTEKQIKGDSIRRQSKLVTDWLSKNPDYFLDESLSFKDLGKSAFSGKHLRAGLGDFLTAIKEGLVKAGDTLLIESLDRLSRQDVDQASELLRGILRSGVDVVTLSDGEHYTAESLKDPLSLIKSILIMQRAYEESLRKSERVAAAWNRKKDIISEGIKVSKRCPAWLKLNDDRRGFSIIPEKVEIVKKVFALRLQGLSFWAITRALNDGGYLSLNQYKPQGWSDTSVKTLLRNRSVIGCFTPAGREEVKDYYPAIISESLFYKVQQLNTGQYGRASTSDNPLSVNLFRGIIKCSECGSSVVVGGYAKRRYGMYRCPKNSSHQCHAKAISRKQTDETLLFMLSLVDRMEPDITNQIDSLNLRKSDLETKISKLLELAIELDDMAMVTDKLRDLKKELGQVKHQIEEETKRVRAISTGNLKDIDRSTKEGMIEAQLLIKGVVKSIIIDSAKRRCRVTLHNGKVIGLPISKTPSEELTSALTSMFEGTERGLLSLDEVEL

SEQ ID NO: 7945 - protein, 508 aa, synthetic construct
MKKAIAYMRFSSPGQMSGDSLNRQRRLIAEWLKVNSDYYLDTITYEDLGLSAFKGKHAQSGAFSEFLDAIEHGYILPGTTLLVESLDRLSREKVGEAIERLKLILNHGIDVITLCDNTVYNIDSLNEPYSLIKAILIAQRANEESEIKSSRVKLSWKKKRQDALESGTIMTASCPRWLSLDDKRTAFVPDPDRVKTIELIFKLRMERRSLNAIAKYLNDHAVKNFSGKESAWGPSVIEKLLANKALIGICVPSYRARGKGISEIAGYYPRVISDDLFYAVQEIRLAPFGISNSSKNPMLINLLRTVMKCEACGNTMIVHAVSGSLHGYYVCPMRRLHRCDRPSIKRDLVDYNIINELLFNCSKIQPVENKKDANETLELKIIELQMKINNLIVALSVAPEVTAIAEKIRLLDKELRRASVSLKTLKSKGVNSFSDFYAIDLTSKNGRELCRTLAYKTFEKIIINTDNKTCDIYFMNGIVFKHYPLMKVISAQQAISALKYMIDGEIYF

SEQ ID NO: 7946 - protein, 506 aa, synthetic construct
MRSVITYLRYSSAIQGAEGADSTRRQNDLFKQWLKKNSDAQVVASFSDEGLSGYKGKHLTGQFGDMLARIESGEFTAGTILLVESIDRIGRLEHLETEALMNRILGNGIEIHTLQDGLIYTKDALADDLGISIIQRVKAYIAHQESKQKSFRVSQKWEQRAKLALAGEQRLTKMVPGWIDPDTFKLNEHAETVRLIFKLLLDGESLHNIARHLQSNGIKSFSRRKDANGFSVHSVRTILRSETTTGTLPASQRNDRPAIPNYYEAAIDAATFNKAQEILDKNRKGRTPASDNPLTINIFKGLFRCQCGASVHPTGTKNKYAGVYRCNNHLDGRCDVQPLKRKPFDRWMIDNFLGMIDVGNDGESERKIAALQHEVEIVTARIKKATALLLEMDDIDELKIQLKELNQKRTELQTTIDNMRRKASLTDKELPQLKDIDLTTKAGRVECQLILSKHLKGLTLGKDTVTVTLQNDTEITIPTDPLPLNDGTSIFEIAEKNLLNIDTFQL

SEQ ID NO: 7947 - protein, 559 aa, synthetic construct
MKTKLYSYIRFSSMRQNDGSSYERQIRMAREVAAKYDLELVNDYQDLGVSAFKGANSKTGALSRFLDAIGRSVPVGSWLFIENLDRLSRADIVSAQELFLSIIRRGITIVTGMDNKIYSLDTVTANPMDLMFSILLFIRGNEESQTKRNRTNSSALIKIKAHQENPQNPAVAIEEVGKNMWWTDTTSGYVLPHPVFFPIVQEVVELRRNGRSTAEILDHLNATYTPPPAASHKRHSNWSRAMIERLFHTRALIGIKEISVDGVKYELKDYYPRVLDDAEFYHLKKSIGVRACNYGDKEEAKPIPLLSGVNLLKCEHCGSAMVKVKGTNKRPNQYRYSCDAMRSSRIACVHTNWSFRGDQLEKAVLQLLADKIWIAEDKANPVPALKVQVDEISRKIDNLIALSAMTGATKELADQITTLNSERETLYNQIKMAEEEMYSVDSQGWEKLAEFDLEDVYNEDRIKVRFKIKQALKRIGCSRIDKYKNLFVLEYIDGKTQRVVIENSRGPRKGQIFVDLKTINDRQILESNGLVLHPCLDMLTDKDWKPEEEIPGPLQEFGI

SEQ ID NO: 7948 - protein, 559 aa, synthetic construct
MKTKLYSYIRFSSMRQNDGSSYERQIRMAREIAVKYDLELVNDYQDLGVSAFKGANSKTGALSRFLDAIGRSVPVGSWLFIENLDRLSRADIVSAQELFLSIIRRGITIVTGMDNKIYSLDTVTANPMDLMFSILLFIRGNEESQTKRNRTNSSALIKIKAHQENPQNPAVAIEEVGKNMWWADTTSGYVLPHPVFFPIVQEVVELRRNGRSTAEILDHLNATYTPPPAASHKRHSNWSRAMIERLFHTRALIGIKEISVDGVKYELKDYYPRVLDDAEFYHLKKSIGVRACNYGDKEEAKPIPLLSGVGLLKCEHCGSAMVKVKGTNRRPNQYRYSCDAMRSSRIECVHTNWSFRGDQLEKAVLQLLADKIWIAEDKANPVPALKVQIDEISRKIDNLITLSAMTGATKELADQITTLNSERESLYNQIKMAEEEMYSVDSQGWEKLAEFDLEDVYNEDRIKVRFKIKQALKRIGCSRIDKYKNLFVLEYIDGKTQRVVIENSRGPRKGRIFVDLKTINDRQILESNGLVLHPCLDMLTDKNWKPEEEIPGPLQEFGI

SEQ ID NO: 7949 - protein, 509 aa, synthetic construct
MRRAISYIRFSSERQLKGDSVRRQSKLVTDWLDKNPEFYLDSSLSFKDLGKSAFSGKHLKGGLGDFLTAIEKGLVKAGDTLLIESLDRLSRQDIDIASELLRRILRAGVDIVTLSDGEHYTGESLKDPLSLIKSILIMQRAHEESLRKSERVQAAWNRKKELISEGIKVSRRCPAWLRLNDDRRTFTIIPDKVEVVKRAFDLRLQGLSFWAITRTLNDEGHLSLNQYTPKQKGWSDTAVKKLLRNRAVIGCFTPAGREEVQGYYPAIISESLFYRVQQLNTGQYGRASVSSNPLSVNLFRGIIKCSECGATIVLGGYALKRFGMYRCPNRSANRCSAKAISRKQTDTTILYMLALCDRFETENTDTIDSLKLQREDLQRKISKMAELAIELDDMTIITEKLRDMKNALSKLNHDIEEETKRIKAITTGSLKDIDRTTKEGMIETQLLIKGVLKEIVIDAAKRRCKVTFHNGKVIDLPITENPSEDVTEAIQSLSEVTERGLIDVDVVAI

SEQ ID NO: 7950 - protein, 413 aa, synthetic construct
MAVRLIKTKSNRKKQRVCAYTRVSTTNSSQLDSLENQKAYFETFYVNREDVDFLGVYYDKGISGSKEKRPSFQAMLEACRQGQIDLIHTKSISRFARNTMTVLEVSRELKAPGVGIYFEEQNINTLSNEGEGMLSVLASLAEEELQSMSDNQRWAFQRKFQRGEMVINTKRFMGYDVDDKGELVINEAEAQIVRRIFQLYLDGMGMHRIAKLLNQENVPTVTDAKWHDTTVRNILKNEKYKGTVLLQKYFHVGINGPKRLNQGQVEQYLIEDNHEPIVSKEVWQAVQDKLASKTWKQGVNKHYRFTSMLKCEYCGSTLKRQVTYKKQIVWCCSKYIKEGKASCRGMRVPEKAIEEWKLRTPVTVIERNEYGQKHYSYSSQESAADGHPSASNQNKSGSLLSGVHRPRRTAIKL

SEQ ID NO: 7951 - protein, 559 aa, synthetic construct
MKTKLYSYIRFSSMKQADGSSYERQKRTAAEIAAKYDLELVTSYQDFGVSAFKGANSRTGALSRFLDEIGRSVPVGSWLVVENLDRISRQSIIEAQELFLSIIRRGITIVTGMDGKVYSKESVNANPIDLLLSVMLFARANEESQTKRNRTNSSALIKIKAHQENPQNPAVAIEEIGKNMWWTDTTSGYVLPHPVFFPIVQEVVELRRNGRSTAEILDHLNATYAPPPAASHKRHSNWSRAMIERLFHTRALIGIKEISVDGVKYELKDYYPRVLDDAEFYHLKKSIGVRACNYGDKEEVKPIPLLSGVGLLKCEHCGSAMVKVKGTNKRPNQYRYSCDAMRSSRIACVHTNWSFRGDQLEKAVLQLLADKIWIAEDKANPVPALKVQIDEISRKIDNLITLSAMTGATKELADQITTLNSERETLYNQIKMAEEEMYSVDSQGWEKLAEFDLEDVYNEDRIKVRFKIKQALKRIGCSRIDKYKNLFVLEYIDGKTQRVVIENSRGPRKGRIFVDLKTINDRQILESNGLVLHPCLDMLTDKNWKPEEEIPGPLQEFGI

SEQ ID NO: 7952 - protein, 547 aa, synthetic construct
MKLLVTYIRWSTKEQDSGDSLRRQTNLIDAFYAKHKDDYYLLPAHRYVDKGKSGFHQQHKNQGSDFRRMFENVMSGAIPEGSLIVVENFDRFSRADIDTAIDDVRQILRKGVSILTLGDGELYDKSALTDPVKLIKHIIIAERAHQESLVKQKRIAQVWNHKTQLARELKKPMGKQAPGWLELSEDGSHYIVDEDKASLVNIIYDKRLSGMSMFAICKWLNEQGYPTINQRKVRISKTKKPDGNWSALSVKHILTSRSVLGYLPAKISSEDRKTVLREEIEGFYPQIVTDSKFYAVQQLLEETGKGKTSSGDHWLYVNILKGIIRCKCGLVMTPTGIRKPAYQGTYRCNGNKESRCSYGTVSRKLLDTQLCSRLFSKLSQLHDEATDTAKLDELQRRLNTVDGELEKLTETLIQLPNITQIQEALRVKQEEKDELIVQLSREKARVKSVSSLDLSGLDMESVEGRTEAQIIIKRLVKEIVVSGNEKLVDIYLHNGNMIRGFPLDGKDDHTLTLEEATDEMQPLDDMLIFGEPVTRIYPAGDMEEVDA

SEQ ID NO: 7953 - protein, 508 aa, synthetic construct
MKKAIAYMRFSSPGQMSGDSLNRQRRLIAEWLKVNSDYYLDTITYEDLGLSAFKGKHAQSGAFSEFLDAIEHGYILPGTTLLVESLDRLSREKVGEAIERLKLILNHGIDVITLCDNTVYNIDSLNEPYSLIKAILIAQRANEESEIKSSRVKLSWKKKRQDALESGTIMTASCPRWLSLDDKRTAFVPDPDRVKTIELIFKLRMERRSLNAIAKYLNDHAVKNFSGKESAWGPSVIEKLLANKALIGICVPSYRARGKGISEIAGDYPRVISDDLFYAVQEIRLAPFGISNSSKNPMLINLLRTVMKCEACGNTMIIHAVSGSLHGYYVCPMRRLHRCDRPSIKRDLVDYNIINELLFNCSKIQPVENKKDANETLELKIIELQMKINNLIAALSVAPEVTAIAEKIRVLDKELRRASVSLKTLKSKAVSSLGDFHAIDLTSKNGRELCRTLAYKTFEKIIINTDNKTCDIYFMNGIVFKHYSLMKTISAQQAISTLKYMVDGEVYF

SEQ ID NO: 7954 - protein, 508 aa, synthetic construct
MKKAIAYMRFSSPGQMSGDSLNRQRRLIAEWLKVNSDYYLDTITYEDLGLSAFKGKHAQSGAFSEFLDAIEHGYILPGTTLLVESLDRLSREKVGEAIERLKLILNHGIDVITLCDNTVYNIDSLNEPYSLIKAILIAQRANEESEIKSSRVKLSWKKKRQDALESGTIMTASCPRWLSLDDKRTAFVPDPDRVKTIEIIFKLRMERRSLNAIAKYLNDHAVKNFSGKESAWGPSVIEKLLANKALIGICVPSYRARGKGISEIAGYYPRVISDDLFYAVQEIRLAPFGISNSSKNPMLINLLRTVMKCEACGNTMIVHAVSGSLHGYYVCPMRRLHRCDRPSMKRDLVDYNIINELLFNCSKIQPVENKKDANETLELKIIELQMKINNLIVALSVAPEVTAIAEKIRLLDKELRRASVSLKTLKSKGVNSFSDFYAIDLTSKNGRELCRTLAYKTFEKIIINTDNKTCDIYFMNGIVFKHYPLMKVISAQQAISALKYMVDGEIYF

SEQ ID NO: 7955 - protein, 508 aa, synthetic construct
MKKAIAYMRFSSPGQMSGDSLNRQRRLIAEWLKVNSDYYLDTITYEDLGLSAFKGKHAQSGAFSEFLDAIEHGYILPGTTLLVESLDRLSREKVGEAIERLKLILNHGIDVITLCDNTVYNIDSLNEPYSLIKAILIAQRANEESEIKSSRVKLSWKKKRQDALESGTIMTASCPRWLSLDDKRTGFVPDPDRVKTIELIFKLRMERRSLNAIAKYLNDHAVKNFSGKESAWGPSVIEKLLANKALIGICVPSYRARGKGISEIAGYYPRVISDDLFYAVQEIRLAPFGISNSSKNPMLINLLRTVMKCEACGNTMIVHAVSGSLHGYYVCPMRRLHRCDRPSIKRDLVDYNIINELLFNCSKIQPVENKKDANETLELKIIELQMKINNLIVALSVAPEVTAIAEKIRLLDKELRRASVSLKTLKSKGVNSFSDFYAIDLTSKNGRELCRTLAYKTFEKIIINTDNKTCDIYFMNGIVFKHYPLMKVISAQQAISALKYMVDGEVYF

SEQ ID NO: 7956 - protein, 547 aa, synthetic construct
MKLLVTYIRWSTREQDSGDSLRRQTNLIDAFYAKHKDDYYLLPAHRYVDKGKSGFHQQHKAQGSDFKRMFENVMSGVIPEGSLIVVENFDRFSRADIDTAIDDVRQILRKGVSILTLGDGELYDKSALTDPVKLIKHIIIAERAHQESLVKQKRIAQVWNHKTQLARELKKPMGKQAPGWLELSEDGSHYIVDEDKASLVNIIYDKRLSGMSMFAICKWLNEQGYPTINQRKVRISKTKKPDGNWSALSVKHILTSRSVLGYLPAKISTEDRKTVLREEIEGFYPQIVTDSKFYAVQQLLEETGKGKTSSGEHWLYVNILKGLIRCKCGLVMTPTGIRKPVYQGTYRCNGNKESRCSYGTVSRKLLDTQLCSRLFSKLSQLHDEATDTAKLDELQRRLNTVDGELEKLTETLIQLPNITQIQEALRVKQEEKDELIVQLSREKARVKSVSSLDLSGLDMESVEGRTEAQIIIKRLVKEIVVSGNEKLVDIYLHNGNMIRGFPLDGKDDHTLTLEEATDEMQSLDDMLIFGEPVTRIYPAGDMEEVDA

SEQ ID NO: 7957 - protein, 506 aa, synthetic construct
MRTVITYLRFSSATQGAEGADSTRRQNELFKQWLRKNSDAQVVASFSDEGLSGYKGKHLTGQFGDMLARIESGEFSEGTVLLVEAIDRIGRLEHLETEALMNRIIAHGIEIHTLQDGLIYTRDALSDDLGISIIQRVKSYVAHQESKQKSFRVSQKWKQRAKLALAGEQRLTKMVPGWIDPDTFKCNEHAETVRLIFKLLLDGESLHNIARHLQANNISSFSRRKDANGFSVHSVRTILRSETTIGTLPASQRNDRPAIPNYYEAAIDAATFNKAQEILDKNRKGRTPASDNPLTINIFKGLFRCQCGASVHPTGTKNKYAGVYRCNNNPDGRCDVPPLKRKPFDKWMIDNFLGMIDVGNDGEAEGKIASLQHEVEIVTARIKKATALLLEMDDIDELKIQLKELNQKRTELQTMIDNMRRKASLTDKELPQLKDIDLMTKAGRVECQLILSKHLKGLTLGKDSVTVTLQNDTEIIVPTDPLPLNDGTSIFEIAEKELLEIDAYQL

SEQ ID NO: 7958 - protein, 509 aa, synthetic construct
MRRAISYIRFSSERQLKGDSVRRQSKLVTDWLDKNPEFYLDSSLSFKDLGKSAFSGKHLKGGLGDFLTAIEKGLVKAGDTLLIESLDRLSRQDIDIASELLRRILRAGVDVVTLSDGEHYTKESLKDPLSLIKSILIMQRAHEESLRKSERVQAAWNRKKELISEGIKISRRCPAWLKLNDDRRTFTIIPDKVEVVKRAFDLRLQGLSFWAITRTLNDEGHLSLNQYTPKQKGWSDTAVKKLLRNRAVIGCFTPAGREEVQGYYPAIISESLFYRVQQLNTGQYGRASVSSNPLSVNLFRGIIKCSECGATIVLGGYALKRFGMYRCPNRSANRCSAKAISRKQTDATILYMLALCDRFETENTDTIDSLKLQREDLQRKISKMAELAIELDDMTIITEKLRDMKNALSKLNHDIEEETKRIKAITTGSLKDIDRTTKEGMIETQLLIKGVLKEIVIDAAKRRCKVTFHNGKAITLPITENPSEDVTEAIQSLSEVTEKGLIDVDVVEI

SEQ ID NO: 7959 - protein, 506 aa, synthetic construct
MRSVITYLRYSSAIQGAEGADSTRRQNDLFKQWLKKNSDAQVVASFSDEGLSGYKGKHLTGQFGDMLARIESGEFPEGTILLVESIDRIGRLEHLETEALMNRILGNGLEIHTLQDGLIYTKDALADDLGISIIQRVKAYIAHQESKQKSFRVSQKWEQRAKLALAGEQRLTKMVPGWIDPDTFKLNEHAETVRLIFKLLLSGESLHNIARHLQANNISSFSRRKDANGFSVHSVRTILRSETTIGTLPASQRNDRPAIPNYYEPAIDASTFNKAQEILDKNRKGRTPASDNPLTINIFKGLFRCQCGASVHPTGTKNKYAGVYRCNNHLDGRCDVQPLKRKPFDRWMIDNFLGMIDVGNDGKSKRKIASLQHEVEIVTARIKKATALLLEMDDITELKTQVRELNQKRTELQTTIDTLKRKTSLTDKELTQLKDIDLMTKAGRVECQLILSKHLKGLTLGKDSVTVTLQNDTEITIPTNPLPLNDGSPIFEIADKELLDIDAYQL

SEQ ID NO: 7960 - protein, 507 aa, synthetic construct
MKRAISYIRFSSEKQSRGDSLRRQSKMVTDWLKAHPEYYLDQDLSFRDLGVSGFTGKHLKGGLGDFLTAIEKGLVKAGDTLLIESLDRLSRQNVDRASELLRNILRSGVDVVTLSDGEHYTRESLKDPLALIKSILIMQRSHEESLRKSERIQAAWNRKKELISEGIKISKRCPAWLRLNDDRKSFSVIPEKVETVKRCFQLRLEGKSIWEIVRTLNAEGHQTLNQYKAGKFGQTSVQDLLKNRSVIGYFTPKGCCEIAGYYPSIIPESDFYKVQQLSHSRHGRKPVSDKPLSVNLFKGVIRCSECGHALIITGFSDTRNGIYRCPLRNENRCSAKGLSRKQTDGTLLTLLSRLDRFDSDTTNTIDMLRLHREHISSNIEKLVQLSLEIEDLSAITIKLKQLKGELSQVDADIEKETQRLKSIDTGSLSDCDLSTKAGRIEAQLIIKSAVKEVVLNTAKRRCKVTFHNGKVIDLPITENPSEDVTEAIQSLSEVTERGLIDVDVVAI

SEQ ID NO: 7961 - protein, 507 aa, synthetic construct
MKRVISYIRFSSEKQAKGDSLRRQSKMVTDWLKAHPEYYLDQDLSFRDLGVSGFTGKHLKGGLGDFLTAIEKGLVKAGDTLLIESLDRLSRQDVDQASELLRNILRSGVDVVTLSDGEHYTRESLRDPLALIKSILIMQRAHEESLRKAERIQAAWDAKKEAAKAGIKVSKRCPAWLKLNDDRKSFSVIPEKVETVKRCFQLRLEGKSIWEIVRTLNDEGHQTLNQYKAGKFGQTSVQDLLKNRSVIGYFTPKGCEEISGYYPAIIDETTFYKVQQLSYARYGRKPASDKPLSVNLFKGVIRCSECGHALIITGFSDTRSGIYRCPLRNENRCNAKGLSRKQTDSTLLALLSRLDRFDSDMTNTVDTLKLHREHISNNIEKLVQLSLEIEDLSAITSKLKQLKGELSQVDADIEKETQRLKSIDVGCLSDCDLTTKAGRIEAQLIIKSAVKEVVLNTAKRRCKVTFHNGKVIDLPITENPSEDVTEAIQSLSEVTERGLIDVDEVII

SEQ ID NO: 7962 - protein, 506 aa, synthetic construct
MRSVITYLRYSSAIQGAEGADSTRRQNDLFKQWLKKNSDAQVVASFSDEGLSGYKGKHLTGQFGDMLARIESGEFPEGTILLVESIDRIGRLEHLETEALMNRILGNGIEIHTLQDGLIYTKDALADDLGISIIQRVKAYIAHQESKQKSFRVSQKWEQRAKLALAGEQRLTKMVPGWIDPDTFKLNEHAETVRLIFKLLLSGESLHNIARHLQANNISSFSRRKDANGFSVHSVRTILRSETTIGTLPASQRNDRPAIPNYYEPAIDASTFNKAQEILDKNRKGRTPASDNPLTINIFKGLFRCQCGASVHPTGTKNKYAGVYRCNNHLDGRCDVQPLKRKPFDRWMIDNFLGMIDVGNDGKSKRKIASLQHEVEIVTARIKKATALLLEMDDITELKTQVRELNQKRTELQTTIDTLKRKTSLTDKELTQLKDIDLMTKAGRVECQLILSKHLKGLTLGKDSVTVTLQNDTEITIPTNPLPLNDGSPIFEIADKELLDIDAYQL

SEQ ID NO: 7963 - protein, 547 aa, synthetic construct
MKLLVTYIRWSTREQDSGDSLRRQTNLIDAFYAKHKDDYYLLPAHRYVDKGKSGFHQQHKAQGSDFRRMFENVMSGAIPEGSLIVVENFDRFSRADIDTAIDDVRQILRKGVSILTLGDGELYDKSALTDPVKLIKHIIIAERAHQESLVKQKRIAQVWNHKTQLARELKKPMGKQAPGWLELSEDGSHYIVDEDKASLVNIIYDKRLSGMSMFAICKWLNEQGYPTINQRKVRISKTKKPDGNWSALSVKHILTSRSVLGYLPAKVSSEDRKTVLREEIEGFYPQIVTDSKFYAVQQLLEETGKGKTSSGEHWLYVNILKGLIRCKCGLVMTPTGIRKPVYQGTYRCNGNKESRCSYGTVSRKLLDTQLCSRLFSKLSQLHDEATDTAKLDELQRRLNTVDSELEKLTETLIQLPNITQIQEALRVKQEEKDELIVQLSREKARVKSVSSLDLSGLDMESVEGRTEAQIIIKRLVKEIVVSGNEKLVDIYLHNGNMIRGFPLDGKDDHTLTLEEATDEMQSLDDMLIFGEPVTRIYPAGDMEEVDA

SEQ ID NO: 7964 - protein, 506 aa, synthetic construct
MRSVITYLRYSSAIQGAEGADSTRRQNDLFKQWLKKNSDAQVVASFSDEGLSGYKGKHLTGQFGDMLARIESGEFSEGTILLVEAIDRIGRLEHLETEALMNRILGNGIEIHTLQDGLIYTKDALADDLGISIIQRVKSYIAHQESKQKSFRVSQKWGQRAKLALAGEQRLTKMVPGWIDPETFEVNEHAETVRLIFKLLLDGESLHNIARHLQANNISSFSRRKDANGFSVHSVRTILRSETTIGTLPASQRNDRPAIPNYYEAAIDAATFNKAQEILDKNRKGRTPASDNPLTINIFKGLFRCQCGASVHPTGTKNKYQGVYRCNNHLDGRCDVPPLKRKPFDRWMIDNFLGMIDVVSDGETERRIAALQHEVEIVTARIKKATALLLEMDDITELKAQVKELNQKRTELQTTIDTMKRKTSLSDKGLPQLKDIDLMTKAGRVECQLILSKHLKGLTLGKDSVTVTLQNDTEITIPTNPLPLNDGSPIFEIADKELLDVDAYQL

SEQ ID NO: 7965 - protein, 547 aa, synthetic construct
MKLLVTYIRWSTKEQDSGDSLRRQTNLIDAFYSKHKEEYYLLPAHRYVDKGKSGFHQQHKNQGSDFRRMFDNVMSGVIPEGSLIVVENFDRFSRADIDTAIDDVRQILRKGVSILTLGDGELYDKSALTDPVKLIKHIIIAERAHQESLVKQKRIAQVWNHKTRLARELRKPMGKQAPGWLELSDDGSHYIVDEDKASLVNLIYDKRLSGMSMFAICKWLNEQGYPTINQRKVRISKTKKPDGNWSALSVKHILTSRSVLGYLPAKISTEDRKTVLREEIEGFYPQIVTDSKFYAVQQLLEETGKGKTSSGEHWLYVNILKGLIRCKCGLVMTPTGIRKPVYQGTYRCNGNKESRCSYGTVSRKLLDTQLCSRLFSKLSQLHDEATDTAKLDELQRRLNTVDSELEKLTETLIQLPNITQIQEALRVKQGEKDELIVQLSREKARVKSVSSLDLSGLDMESVEGRTEAQIIIKRLVKEIVVSGNEKLVDIYLHNGNMIRGFPLDGKDDHTLTLEEATDEMQSLDDMLIFGEPVTRIYPAGDMEEVDA

SEQ ID NO: 7966 - protein, 556 aa, synthetic construct
MAMMNEMEYRTIGSALAGGYRAAVYCRLSKDDDLQGESASIANQRDMLEKYCEKQGWEVVAVYQDDGFTGLNMERPDLQRMLRAIERRQINLVITKDLSRLGRNYLQTGHLIEDFFPRNGVRYIAMNDGIDTLRDNNDIAPFKNILNEMYSKDISKKVHSSYLLKAQKGQFTGCLAPFGYRKDPEDRNHLLIDEETAPIVRLIFGYALNGHGPNYIRRRLEEEKIPCPTWWNRERGLRNTRTKWEKKDPENGRYMWDFSVIKDLLMNPVYTGAIASQKKDYRFKIGTIGEKKPEDWIVVEGQHEPLIDRMSFDIVQNKLKSRQRPGQTNEISLFAGLIKCGECGKSLTIRYTNAKHPQQIYSCKTYNAFGKNHCTQHRIDYDTLYSHVLRKIRECARAALMDGKAVADRLTNTCEAEQREQREAMERSLTRDEERIEVLDKMVMRLYEDMIAGRISEQNFNTMLEKTQTEQTELKAKVSEGRKRLSDEAQLANDAKQWVEAIQEYANITELDAATLNRLIKEIVVHERIDEDKTRHISIEIHFNLKPIPEVEQVTA

SEQ ID NO: 7967 - protein, 622 aa, synthetic construct
MARKSERYPALYERLSHDDELQGESNSISNQKRILEDYAEQQGFANCVHFTDDGISGTRFDRPGFQKMIDEVKADRISVVIVKDMSRFGRDYLQVGTYMEVLRKHDTRLIALNDSVDTLKGDDEFTPFRNIMNEWYARDTSKKIRSAFQAKNLAGKHTSSSVPYGYLKSEQDKNQWVIDPVAAPIVQRIYRMAMEGKGPYQIANILSNEHIEIPAYYHQKLGIGLWKTREIKSPYRWGSSTIVHILTNPSYLGHTCNFKTRKHFKDKKSHYVDQDQWNIIKDTHEPIIDQETYDTVQRMRAGIRRYPDGWGEVHPLAGLLYCADCGSPMYIHRTGNGNRTANFSCSGYGKIPVGSKCASGHWVNADSVMKLIQETLREIVRFSKEDEEEFACIVRSEIENRQSSEMKGQKTRLTACQKRLDELETLLCKIYEDNILGKLPDKRYQILEAQYTKEQEALEAEIDSLQKKVDEYEQEQKSADKFIALVKKYQNFEELDAVMLNQFIYKIFVHERDYKGVANSPQTIEIYFNFVGKFGMQEINSPSEEERAALEEKERLRQKRHEAYLRRKASGWQDAYYQKTKAAKKAGIDAKKEAIRSEDRAKGVYYLPNQKYLETEPKGESA

SEQ ID NO: 7968 - protein, 523 aa, synthetic construct
MARKKNIAAGQNAVIYARYSSHNQREVSIEQQVRECMKHAAELGLHVVGTYEDRAISGKTDKRPNFQRMMRDAEKGKFQAVVAWKSNRIGRNMLQAMVNEAKLEDCGVKVFYAEEDFDDTAAGRFALRNMMNVNQFYSENMAEDITRGLYDNASKCMANGRQPLGYKRGEDGRVVLDDANAAVVREIFTRVAAGDLFVDIARDLNAQGIKTSKGANWNKGSFQSICQNERYRGIYIYGDVRVVDGIPRIVSDDLWYRVQEAMRMKKNPVGTRHRVGAEDYLLTGKLRCGHCGSYMTGVSGTSRNGELHYYYTCQKRRTEHACDKKNIRRDVIEPAVAQAIKMYCLTDDVIEWMADRTVEYWEKHDNDLQIEALEQQLEENKKATSNMLKAIEMGIITEATRTRMVELETEQSRLSVQLNTAKEDVVKIDREQIISYLELLQQGDIHDRDFQMELFKNFLVAVYVYDDNRMKLVFSCMGDQNSVEISLETGEDPPDGGLSPDAKMFVLTPDSSTIQFVLEPNLL

SEQ ID NO: 7969 - protein, 524 aa, synthetic construct
MTAVIYARYSSDSQREASIEGQLRDCKDYAEKNGITVVGTYIDRAYSAKTDDRPDFQRMIKDSAKKIFDVVLVWKLDRFARNRFDAVNYKYQLEKNGVHLVSAMEPISQGPEGIMVESMLIGMAEYYSAELALKVARGERENALQCKYNGGVVPLGFTIGKEDRLYHIDPETAPIVQEIFSRYANGEPAEKIAASLNERGLRTRTGKPFVKNSFFQIFRNRRYIGEYRYKDIVTPGGIPAIVDQDLFDRVQQRFEQNRIAHGRPAKEDVSYLLTTKLFCGKCGTLMGGESGTSHMGNTYYYYKCGNAKRHGKAHCDLKAIRKEPLERFVVETAIKVIFSDEIIERLIDLIMEAQQQENTRLPVLKDQLRDTEKRLANLLEAIEQGIITPTTKQRLDELEARKEALNTSILEEELKKPVLTREWMRFWFEKFRKGDMRDMEHQRQIIDTFVNSVYVFDDRVVLNFNFTDDSKTISREEVLGSSAVENAPPNTSHQLWLVALFCCILVRKSVCGKLETRTPAATKF

SEQ ID NO: 7970 - protein, 539 aa, synthetic construct
MTAVIYARYSSDSQREASIEGQLRDCKAYAEKNGITVVGTYIDRAYSAKTDDRPDFQRMIKDSGKKIFDVVLVWKLDRFARNRFDAVNYKYQLEKNGVHLVSAMEPISQGPEGIMVESMLIGMAEYYSAELALKVARGERENALQCKYNGGVVPLGFTIGKEDRLYHIDPETAPIVQEIFSRYADGEPAEKIAASLNERGLRTRTGKPFVKNSFFQIFRNRRYIGEYRYKDIVTPGGIPAIVDQDLFDRVQQRFEQNRIAHGRPAKEDVSYLLTTKLFCGKCGTLMGGESGTSHMGNTYYYYKCGNAKRHGKAHCDLKAIRKEPLERFVVDTAIKVIFSDEIIERLIDLVMEAQQQENTRLPVLKEQLRDTEKRLANLLEAIEQGILTPTTKQRLDELEARKEALNTSILEEELKKPVLTREWIRFWLEKFRKGDVGSTEHQRQIIDTFVNSVYVFDDRVVLNFNFTDDAKTVTREEVLGSSAVDNAPPNMSHQLWLVALFCCILVRKSVCGELGTRTGRRCKAPQAISPVGCCLARGS

SEQ ID NO: 7971 - protein, 480 aa, synthetic construct
MIATNKVAIYIRVSTTNQAEEGYSIEEQQEKLKAYCAIKDWSIYDVYIDGGFTGSNTDRPELKRLVKEAKNKKFDTVLVYKLDRLSRSQKDTLYLIEEVFTKNNIAFLSLLENFDTSSAFGKAMIGILSVFAQLEREQIKERMQLGKVGRAKSGKSMMWAKPSYGYIYHQETGEMTVDEYESIVIKFIFSSYLAGRSITKLRDDLNKKYPKKIAWNYKMVRHILDNPVYCGNIRFKSEIYSGNHEAIISKEDFEKVQEELAIRQRTAAENSNPRPFQAKYMLSGIAQCGYCKAPLKIIMGAIRKDGTRFIHYECYQRHPRTTKGVTVYNDNKKCNSGYYDKKELEQYVLKEVSKLQEDKEYLESLFNVPDKSIERDKIQEQVNILENKISRLNDLYVDDRISLDELKIKSDNFLKMKAVLETELENDPAIKQQKKKENMKKTLKTKDILSMNYEQQKAVIRALIIKVQVTAESIVIKWKI

SEQ ID NO: 7972 - protein, 457 aa, synthetic construct
MRCAIYRRVSTDEQAEKGFSLENQKLRLESFATSQGWEVVEDYVDDGFSGKDTNRPALQRMFSNVDKFDVILVYKLDRFTRSVKDLNEMLETIKENEIAFKSATESIDTTTATGRMILNMMGTTAQWERETISERIKDVFGKLRENGIFSTGHPPYGYRCSGNKSIEIVEEQAETVRYIYELSKTMGLFKISVELNRKGIKTRRNNKFGQSAVKRILHNPFYCGYMEVNNKWVPIKNEGYIPIISEEEFKTTQKILTKRNKAQTRSRSVSYYPFSGIVLCPECQRAMRGDRAKYGDYYYRYYRCVYGRENINCTNRKRIRAEQVDKAFAEYISGSFENTTIKLDSRNIKSDIEYELNHLDSKIERLSDIYIEGDITKSKYNEKMNSLLNEKEKLKKDLTSCKENVDAQFVRDQINKLESIWHLIDDKTKSESIRSIFDTIKIKQDKNKVTIMDHTLL

SEQ ID NO: 7973 - protein, 511 aa, synthetic construct
MHHRTLCDLYLRLSLDRDGKTAIERQEADCRAWAERNGLTVRKVHIDRGRSGYKDVERKGFDSALVAVTAGVVGTLIVWKLDRLSRKGIGQVGKVLDDIEKAGGRLVSVVDGLDTSNDSARMVVAMLAELARSESKNLGTRVAHAKRHLRRQGQWIGGQPPYGLLVNPGTKKLVHDPETAVYARLIADDALAGKSLVQIARLLNEYDIPAARGGQWNAASIMNLLKSPAFAGLMPETESVEAEDGSRKFTSRVFPYRHPETLDTVSIGEGIITVGERERIIRQLEARTRMQAGKRMPKPVGTALLTGMVFCDVPGCGRRMHKVGGSYQCMARRAGNQCPGANAVADRVDQYVSEWFLSLLPTLEPNDPLLVAIADRWVKKADPEMFAKRDAITDEIADQEARLSDLEDARYLRGEFDRPGALERYQRLADRLQSRIDGLRADLASLPLPAVDISPLLDEELLRPAWEASTHEQKRDRLSLAIDGVFISKGERGKRFVPEQRVRVKWAEIKD

SEQ ID NO: 7974 - protein, 562 aa, synthetic construct
MTLRVLGSLRLSVETDNSTAIPRQRDHIQHWVDAPGRDARIVAWAEDTDVSGGLHPFKRPDLGKWFRDDYADRWDVLCVMKVDRLSRRVAHFSEIVQWCQERGKIVVSSQEGIDMSTPMGKMFAQILAVFAEGELDTIRARAADAARTRLAAGTWVAGLAPFGYEIVPLEKGKGKRLRPIEHYEELAREIAEKILEGKSLRSISRELIERGEPTWLSLIQPNSKRGVESQWSNSSIRGIMLNPKIAGYYTYKGEIVEDDEGNPRMIAEKPLLDHETWNRVVLKLRDNRPFAPKVTRSKAMLVGVAVCGSCGGPLTRAVYTNRKPAQGGRPAKEWHYSRYKCSRQQVRATCQSPAAATTLSLEGHFSKLFLEHMGHLPEVRELDADLHDPSSDIAATEARLKRLKDDFGAGRYDTPEKEEIYWSLLNSQSAKLSRLRSKLAEFEECSGKFAPTGRTFADIWNSRDDEGKQLFLKEHQVKVVVYRDPVPGKRFGFMVQLGDVRRMAKALRVELTDDVAHGAVTFNLPTEQHVRDEQLDERQLRIGLDVADAIEASQRLAEASAP

SEQ ID NO: 7975 - protein, 527 aa, synthetic construct
MTTITVQPSADTFGELIPAIGYIRVSTWKEEKISPELQKTSIEDWAKRTRRRIVQWVVDLDATGTNFHRKIMKAIAAIEAGKAREIAVWKFSRFGRSRHGVAINLTRVEKVGGQLYSSTEDADPRTATGRFTRGVLFEVAAFEADRIGEQWKEAHEYRRAAKLPAMGKPRFGYLWHKRYDPVTGVLQKERYEADPELRDIVAELWARYLNGSGFKPLAAWLNSLGCTTTRGGIWGQENLRYYMDSGFAAGLLRRHRQDCPRGKHQGQCNYYDLVPGAQEAIISDETWKEYQERRKLVAATPPRSRLPSTEVTGLTRCGQCTGAATVSRSRGKPGFRCARRTEYGADGCIGVWARGADVVAEVLEWLSSVAHEIDNAPATALDGHSPNDDRARAARERARVQTEHAKVEASLTRLAVDAAKNPDKYPPGVFEAARDELVAERHQLSERISALVEVEEMPEADDYLPLLVGVLDEWETLTVAERNLILRKLIRRIVLHQPKRPGPVTVAIVPVWEEARHPEQRLHAAKA

SEQ ID NO: 7976 - protein, 559 aa, synthetic construct
MKTKLYSYIRFSSMRQNDGSSYERQIRMAREVAAKYDLELVNDYQDLGVSAFKGANSKTGALSRFLDAIGRSVPVGSWLFIENLDRLSRADIVSAQELFLSIIRRGITIVTGMDNKIYSLDTVTANPMDLMFSILLFIRGNEESQTKRNRTNSSALIKIKAHQENPQNPAVAIEEVGKNMWWTDTTSGYVCPDPVYFPIVKEIVELRKNGRSTSEILNYLNETYTPPPAVSNKKHSKWPRAMIGRLFHTRALIGIKEVSVDGVKYELNNYYPRVIDDATFYHLKKNIGARAWNFGDTEEVKPIPLLSGIGLLKCEHCSSAMIKVKGTNKRADQYRYSCEGIRSHRFDCEQPNWSFRGDQLEKAVLQLLADKIWIAEDKANPVPALKVQIDEISRKIDNLIALSAMTGATKELADQITALNNERESLYNQIKMAEEEMYSVDSQGWEKLAEFDLSDVYNEDRIKVRFKIKQALKRIGCSRIDRNKNLFVLEYVDGKTQRVVIENSRGTRKGRIFIDLKTINDRQILESNGLVLHPCLDMLTDKNWKPEEEQAGPLQEFGI

SEQ ID NO: 7977 - protein, 559 aa, synthetic construct
MKTKLYSYIRFSSMRQNDGSSYERQIRMAREIAAKYDLELVNDYQDLGVSAFKGANSKTGALSRFLDAIGRSVPVGSWLFIENLDRLSRADIVSAQELFLSIIRRGITIVTGMDNKIYSLDTVTANPMDLMFSILLFIRGNEESQTKRNRTNSSALIKIKSHQENPQNPAVAIEEVGKNMWWTDTTSGYVLPHPVYFPVVQEIVELRKNGRSTAEILDHLNETYAPPPAVSNKKHSKWSRAMVERLFHTRALIGIKEVSVDGVNYELKDYYPRVIDDATFYHLKKNIGARAWNFGDKEEAKPIPLLSGIGLLKCDHCGCAMVKVKGTNKRSDQYRYTCDATRSRRLDCEHPNWSFRGDQLEKAVLQLLADKIWIAEDKANPVPALKVQVDEISRKIDNLIALSAMTGATKELADQITTLNSERETLYNQIKMAEEEMYSVDSQGWEKLAEFDLEDVYNEERLKVRFKIKQALKRIGCSRIDRNKNLFVLEYIDGKTQRVVIENSRGTRKGRIFIDLKTINDRQILESNGLVLHPCLDMLTDKNWKPEEEIPGPLQEFGI

SEQ ID NO: 7978 - protein, 547 aa, synthetic construct
MKLLVPYIRWSTKEQDSGDSLRRQTNLIDAFYSKHKEEYYLLPAHRYVDKGKSGFHQQHKNQGSDFRRMFENVMSGVIPEGSLIVVENFDRFSRADIDTAIDDVRQILRKGVSILTLGDGELYDKSALTDPVKLIKHIIIAERAHQESLVKQKRIAQVWNHKTQLARELKKPMGKQAPGWLELSEDGSHYIVDEDKASLVNIIYDKRLSGMSMFAICKWLNEQGYPTINQRKVRISKTKKPDGNWSALSVKHILTSRSVLGYLPAKISTEDRKTVLREEIESFYPQIVTDSKFYAVQQLLEETGKGKTSSGEHWLYVNILKGLIRCKCGLVMTPTGIRKPVYQGTYRCNGNKESRCSYGTVSRKLLDTQLCSRLFSKLSQLHDEATDTAKLDELQRRLNTVDSELEKLTETLIQLPNITQIQEALRVKQEEKDELIVQLSREKARVKSVSSLDLSGLDMESVEGRTEAQIIIKRLVKEIVVSGNEKLVDIYLHNGNMIRGFPLDGKDDHTLTLEEATDEMQSLDDMLIFGEPVTRIYPAGDMEEVDA

SEQ ID NO: 7979 - protein, 507 aa, synthetic construct
MKRVISYIRFSSERQAKGDSLRRQSKMVNDWLKAHPEYYLDQDLSFRDLGVSGFTGKHLKGGLGDFLTAIEKGLVKAGDTLLIESLDRLSRQAVDRASELLRNILRSGVDVVTLSDGEHYTSESLKDPLALIKSILIMQRAHEESLRKSERIQAAWNRKKELISEGIKISKRCPAWLRLNDDRKSFSVIPEKVETVKRCFQLRLEGKSIWEIVRTLNDEGHQTLNQHKAGSFGQSSVQDLLKNRSVIGYFTPKGCEEISGYFPPIIPETDFYKVQQLSYSRYGRKPASDKPLSVNLFKGVIRCSECGHALIITGFSDTRNGIYRCPLRNENRCSAKGLSRKQTDGTLLTLLSRLDRFDSDTTNTIDTLKLHREHISSNIEKLVQLSLEIEDLSAITIKLKQLKGELSQVDADIEKETQRLKSIDVGCLSDCDLTTKAGRIEAQLIIKSAVKEVVLNTAKRRCKVTFHNGKAITLPITENPSEDVTEAIQSLSEVTERGLIDVDEVII

SEQ ID NO: 7980 - protein, 506 aa, synthetic construct
MRSVITYLRYSSAIQGAEGADSTRRQNDLFKQWLKKNSDAQVVASFSDEGLSGYKGKHLTGQFGDMLARIESGEFPEGTILLVESIDRIGRLEHLETEALMNRILGNGLEIHTLQDGLIYTKDALADDLGISIIQRVKAYIAHQESKQKSFRVSQKWEQRAKLALAGKQRLTKMVPGWIDPDTFKLNEHAETVRLIFKLLLSGESLHNIARHLQANNISSFSRRKDANGFSVHSVRTILRSVTTIGTLPASQRNDRPAIPNYYEAAIDAATFNKAQEILDKNRKGRTPASDNPLTINIFKGLFRCQCGASVHPTGTKNKYAGVYRCNNHLDGRCDVPPLKRKPFDRWMIDNFLGMIDVGNDGESERKIAALQHEVEIVTSRIKKATALLLEMDDITELKTQVKELNQKRTALQTTIDNMRRKTSLTDKELPQLKDIDLTTKAGRVECQLILSKHLKGLTLGKDSVIVTLQNDTEITIPTNPLPLNDGTSIFEIAEKELLEIDAYQL

SEQ ID NO: 7981 - protein, 559 aa, synthetic construct
MKTKLYSYIRFSSMKQADGSSYERQKRTAAEIAAKYDLELVTSYQDFGVSAFKGANSRTGALSRFLDEIGRSVPVGSWLVVENLDRISRQSIIEAQELFLSIIRRGITIVTGMDGKVYSKESVNANPIDLLLSVMLFARANEESQTKRNRTNSSALIKIKAHQENPQNPAVAIEEIGKNMWWTDTTSGYVLPHPVFFPIVQEVVELRRNGRSTAEILDHLNATYTPPPAASHKRHSNWSRAMIERLFHTRALIGIKEISVDGVKYELKDYYPRVLDDSEFYHLKKSIGVRACNYGDKEEVKPIPLLSGVGLLKCEHCGSAMVKVKGTNKRPNQYRYSCDAMRSSRIACVHTNWSFRGDQLEKAVLQLLADKIWIAEDKANPVPALKVQIDEISRKIDNLITLSAMTGATKELADQITTLNSERETLYNQIKMAEEEMYSVDSQGWEKLAEFDLEDVYNEDRIKVRFKIKQALKRIGCSRIDKYKNLFVLEYIDGKTQRVVIENSRGPRKGRIFVDLKTINDRQILESNGLVLHPCLDMLTDKNWKPEEEIPGPLQEFGI

SEQ ID NO: 7982 - protein, 559 aa, synthetic construct
MKTKLYSYIRFSSMRQNDGSSYERQIRMAREVAAKYDLELVNDYQDLGVSAFKGANSKTGALSRFLDAIGRSVPVGSWLFIENLDRLSRADIVSAQELFLSIIRRGITIVTGMDNKIYSLDTVTANPMDLMFSILLFIRGNEESQTKRNRTNSSALIKIKSHQENPQNPAVAIEEVGKNMWWTDTTSGYVLPHPVYFPVVQEIVELRKNGRSTAEILDHLNETYAPPPAVSNKKHSKWSRAMVERLFHTRALIGIKEVSVDGVNYELKDYYPRVIDDATFYHLKKNIGARAWNFGDKEEAKPIPLLSGIGLLKCDHCGCAMVKVKGTNKRSDQYRYTCDATRSRRLDCEHPNWSFRGDQLEKAVLQLLADKIWIAEDKANPVPALKVQVDEISRKIDNLIALSAMTGATKELADQITTLNSERETLYNQIKMAEEEMYSVDSQGWEKLAEFDLEDVYNEERLKVRFKIKQALKRIGCSRIDRNKNLFVLEYIDGKTQRVVIENSRGTRKGRIFIDLKTINDRQILESNGLVLHPCLDMLTDKNWKPEEEIPGPLQEFGI

SEQ ID NO: 7983 - protein, 508 aa, synthetic construct
MKKAIAYMRFSSPGQMSGDSLNRQRRLIAEWLKVNSDYYLDTITYEDLGLSAFKGKHAQSGAFSEFLDAIEHGYILPGTTLLVESLDRLSREKVGEAIERLKLILNHGIDVITLCDNTVYNIDSLNEPYSLIKAILIAQRANEESEIKSSRVKLSWKKKRQDALESGTIMTASCPRWLSLDDKRTAFVPDPDRVKTIELIFKLRMERRSLNAIAKYLNDHAVKNFSGKESAWGPSVIEKLLANKALIGICVPSYRARGKGISEIAGYYPRVISDDLFYAVQEIRLAPFGISNSSKNPMLINLLRTVMKCEACGNTMIVHAVSGSLHGYYVCPMRRLHRCDRPSIKRDLVDYNIINELLFNCSKIQPVENRKDANETLELKIIELQMKINNLIAALSVAPEVTAIAEKIRVLDKELRRASVSLKTLKSKAVSSLGDFHAIDLTSKNGRELCRTLAYKTFEKIIINTDNKTCDIYFMNGIVFKHYPLMKTISAQQAISTLKYMVDGEVYF

SEQ ID NO: 7984 - protein, 507 aa, synthetic construct
MKRAISYIRFSSEKQSRGDSLRRQSKMVTDWLKAHPEYYLDQDLSFRDLGVSGFTGKHLKGGLGDFLTAIEKGLVKAGDTLLIESLDRLSRQAVDRASELLRNILRSGVDVVTLSDGEHYTRESLKDPLALIKSILIMQRAHEESLRKAERIQAAWDAKKEAAKAGIKISRRCPAWLRLNDDRKTFYVIPEKVATVKRCFQLRLEGKSIWEIVRTLNAEGHQTLNQYKAGSFGQSSVQDLLKNRSVIGYFTPKGCEEIAGYYPSVIDETTFYKVQQLSHYRYGRKPVSDKPLSVNLFKGVIRCSECGHALIITGFSDTRSGIYRCPLRNENRCSAKGLSRKQTDGTLLTLLSRLDRFDSDTTNTIDTLKLHREHISNNIEKLVQLSLEIEDLSAITSKLKQLKGELSQVDADIEKETQRLKSIDVGCLSDCDLTTKAGRIEAQLIIKSAVKEVVLNTAKRRCKVTFHNSKSITLPITENPSEDVTEAIQSLSEVTERGLIDVDVVAI

SEQ ID NO: 7985 - protein, 454 aa, synthetic construct
MIVFYRVDRLVRRMHHLTDMIRWSEDYGVNLVSASESHFDLSTPVGKVIAQLVASFGEMELEAISERNSNAFRHNVKAGKWRGGVPPWGYLPEQQDDGTWKYVQDTKTAVVIRSVVDRVLGGEPLRAIAHDLTERGVPTAKDRFAEHQGRKMSGYQWHPGPLKRSLSSPTLLGYAVTREPLTDDQGRIQRDSNGKKKFGPETVVRADDGSPIIRAEPILTVPVFERMQAELGSRENRKEPTKRSQSLLLQVIKCGVCGRPAYRLKGGTGRAVRYRCASAQYKSTCGNRTIREDYADDVVESLLLTMLGESERKERVRDSGSDHSAELAELDSTLTDLVEQLGTGPFKAGTPQRIKLDQRIAELAARQEELSKAETKAAGWTWQPTGELFSQWWERQTTEQRNIWLRTMGVELTWTFDGDEKEPNVRLNLGDLETLGEQIRFRGAAAMWGDVLSP

SEQ ID NO: 7986 - protein, 512 aa, synthetic construct
MEIFKQIQKEKDQVTPYTDYPYLVYGRVSTDKDEQVSSIENQIDICRDWLEKNSYEWNPDSVFLDNGISGTTILARKAMTLILEKARKREIKMVVFKSISRLARDLKDSLEIKELLLSANVRVVTIEEQYDSLYEGKNDYKFEMFSMFAAQYPKSLSVSISAAHASKVRRGEFRGGRAPYGYRIKDKHLIIQEDEAEVVRMIFDLYNNKGLGFKKVTHELNNALAKGEIVGPERKDKWQVTTIQTIIQNPMYAGVVVLNKYTHVKVDGRKKQIRNPMEKWNIFYDQHPRIISEEEWEKANTKSIIATKRRITPWNELRGLVKCDVCGSNMVVNASWKAKKDGTKTHWDYLKCSSYRRGGEYGCVNHAPIKYEEIRQLVISKLQQHGHDMPLNLKNNMMQKKEKLEKDLKARIEVLKGKSKRLIELYLEDQLISKAEFQVKRSEIEADTKKAEDELFLLSQEKDEQLDIQNIKHAFTALNNTSEDLHEVFKTLIKEIRIGQTGELEIEYTFQP

SEQ ID NO: 7987 - protein, 519 aa, synthetic construct
MIKEDRAYVRVSTKYETQKDSPEHQESFIKECAAREQITIRHVYLDRDTATNIVEREDVKKMISDAQKGYIRSLWFASLSRFSRDALDAITLKRILVNALKIRVVSIEDGYDSAKKDDELLFGIKSVVNQNTSGDISISSRRGIRQSALDKGNIIASKPAFGYRKVTVDKRRTYEIVPEQAAIVELIYELYIDEGFGAKAIVKYLNGDNPQKTVYDSYSGKLWSLSTVQAILENPTYTGYNVAGRYKSEIAYDDITDLMNRRKKLVKNPPSEWEWSKEMTHPAIIPKERYDRATEIRLSRGGRGGRREFVNVFAKMIFCAHCESAMVSMSSIGRGGKRYRYLMCSRRRRLGEAGCPNEKWIPYEEARDELISEILSRISKAIEKFESSGTEELAISIPVNDFEKEKRKLEKRIEGNRKLLFEIRRQHMLDEIDKVQYEFEKEQYEKEIADFEQRLVRILAEEKKVVDLERLIKAAKKTLRELTDITSYNDDVERTRTLLNQVVKRIYVNGEDITVETYI

SEQ ID NO: 7988 - protein, 530 aa, synthetic construct
MKTCIYARRSTLKQGQSETIENQIKICERKAKELGLTIVDIKTDSASGTDDNNRPEVKELLKGAINKEYDCVIMKGISRIYRKTSKGLELIEKLDRHGVRVITVEEHFDSHARENRNGIGNLDTSRITMYLMFAEKESQKLAERIKFTQIEKAYAGEWNQASNAPIGYTYDSTTKKLSIDNSKSYVVRKIFKLYEQGMGMKAIAHYLNGDNPDKKTYPSSKGGRWSEYTVGYILKNRAYVGDVVYNKRSKKERPYKAPEALGKTSDDICIINDYNKEEDWIIAENAHEPLIERELFDKIQTMISTKSRRKGIRSNTSLFAGIAKCAKCGTGMTFKRGRKNSLGQVVTKDNYYCMNYIRYGKQYCDSHHVGARELQEAIFNDLEYILNSKDELQRVLDKNKSVMSLDEKKAKERIVGIQKEMDSLIKKMDKLLEKNLAGDISDTQYKTFNEKYSAELDNLTDELKKARLTIANMSEQADNEMRFRQKLSNAIGIRNKTIEEQRHILLGLIDSIVINGNDIEDITYKFERVD

SEQ ID NO: 7989 - protein, 538 aa, synthetic construct
MLNVRKVFSYLRFSDPRQASGSSADRQLAYAAKWATKNGMELDATLTLKDEGLSAYHERHVKQGALGVFLRAIDEGRINNGSVLIVEGLDRLSRAEPLLAQAQLAQIINGGVTVVTASDGREYNRASLKAQPMDLVYSLLVMIRAHEESDTKSKRVKASIRRQCEGWKAGTYRGLIRNGKDPQWLRLSPEGWELIPERVAAVKRALELYSQGLGAGRAANVMHDEGFKLTDWGISGLQIYRMIKQPALRGVKRLTLDGEDYELEEYYPRILSDTEWAELQHLASQRFRRRGAGEIPGIITGVGLAYCGYCGTAVVAQNIMSRRRADGTIADGHRRLHCTSYSKNGGCTYGGSCSVVPVERAVLSFCSDQINLTRLMQAGDAGQTLQKQLVVARAAVTKITTQLSKVTDALLADESGAAPLAFVRKARELEAQQTAAEQKVAQLEHEAIATSGVVRPAQAERWVELAAEVEAGDYSAREKVRQLVMDTFNRIVIYMRGMQTDGRNGPFIDVQLFSRSGQHRLLRINRKNGAWVASEDWE

SEQ ID NO: 7990 - protein, 604 aa, synthetic construct
MKKVFVYHRVSSDQQLDGSGIARQAELLEGYLERTGICAEMDDPDPVVLSDQGVSAFKGLNISEGELGAWMEQVRNGMWDSSILVVESIDRFSRQNPFDVMGYINALMAHNVAIHDVMANIVISRSNSKDLPFVMMNAQRAYDESKYKSDRIRKGWAKKREQAFNKGTIVTNKRPQWIEVENDKYVVNEKAAVVKEIFALYQTGMGCPTIAKQLQRKEGEQYKFNRPWTGELVHKILTNRRVTGKIFISEIIRNHDDIENPVTQKKYDMDVYPVVINEEEFELVQELLKSRRPNAGRITVKKDGQEEVLIKSNLFSGIARCTECGGPMYHNVVRAKRTPKKGDPKIEEYRYIRCLNERDGLCENKAMTYETVERFVVEHLLGMDLSTVMKEQEFNPEIEVLRIQIDQVKDQITNYENGIERRKSAGKLISFDMREELDDAKSELERLLARQASLATVQVDVPVLQDVNVTELYDVNNVDIRTRYESELNKIVSNIRLKRNGTSYTIDINYKQNELKRHVLFVENKKKEQTLISEVIIEDVDGAKFYYTPSFMIMLKDSDIRFQQTNEDLSIIDYSLLLNYIDAVDRNDAVGVWMRDQFKFLTSN

SEQ ID NO: 7991 - protein, 597 aa, synthetic construct
MKRKLYSYQRWSSAVQSDGTTKARQTFAAEEYAKRNDLEVVEIVDAGISGFKSDNSKSGALSKFLAAVDEGLIPNNAYLFVESLDRITRDEIDVALELFMGILRRGITIVTGMDNKVYTRAGIKGNPIDLLTSILLFTRAHEESKTKQNRTNGNALAMIRRFQSGLPTTIKAVGSHPWWIDCSTDKFEAVRRHPTLWQPAQDAINMFMEGVSVFKVVQYLNEKYPHAYKSKAWKTANIRKLRFNKAVYGVREITVDGTDYALPNYFPSLITEGQFLRLEKIRETTKYIGKVGEGKTITDEEGNSKVIAERNNINLLAGMKLFRCGHCGGTMMAMRHGDTIRYLCEKGRGHQNDCKTWSLPGILVEHTLMLVTTIAYINMQRKGGVDKEDYTAQISSTEKLIEDISKKISNGTSLVLGGLGDVEEVIAQLQELKDSRSNLVLELEVLQRKQLLAEDHTFEGLMMDFFTYAQYGVLQDPIHEYRSKLRDIVYSSIGDVRAWKVDRRLMISFQIKGDDEYYTFSAGDEQYNYIFYYGSPVQLKEGLSPQGNYELPEEIKQRIREHRGVYEATMALMNTAHELLATVNYPQLDGRLFWPRK

SEQ ID NO: 7992 - protein, 559 aa, synthetic construct
MATAVIYLRVSTKDQAQRGGESEGFSIPAQREACEKRAESLGAKVVMEFVDAGESARSADRPELQLMLKFLDRNPCDYVIVHKVDRLARNRVDDVEINVAIQRSGAKLVSVTENIDETPSGMLMHGIMSSIAEFYSRNLATETRKGMAQKVKNGGTPGMVPFGYLNVRTRTAEGYEIRTVAVDPDRADHVRWIFDAYASGEWTMTQIREELSRREVTSLPRPKRPSRPMATSHIENILSNRYYLGFVKFEGTWHLGRHEPLISEDTWERVQEVRAARVKSREKPQQHPHHLKGSLFCGHCGELLGIEIVRNGQGVRYPYFFCLGRRKGRANCNFKAISITRVEQLIEEHWGTRQMSDSERETIREYIMEYVDKALPDRNKRVRAAERSVKRLIDERDTLLHAHYAGAVPLDQLKTEQERISSALADAQRELNSQNTDRDGLRKGLDAALNILRDSEDFYAKSHPRERRLMVQSVFERLYITDDEIGEVQLTELFDRLLDPNLKESLDAELADGTIPVQEPGTTPRMSKSSNLRPRCEGTSSNFSTLVAGTGFEPATSGL

SEQ ID NO: 7993 - protein, 615 aa, synthetic construct
MKPYDITATMFGTPTEDAAVDVKDAVSLLRVSSKRQMDTAVDIDPDGLSIATQRRVVELKANSVGTHVVKEFLEPGYSAKTIDERPIFKELLHYLNTHPNIGFVIVYMRSRAFRNQYDAAMVQMHLQKRGIRLISAKEDFGEGPYAEAMEGMVDIMNGLTNKLQGLDIQTKMYEKARHGGTNGQTRLGYLNVRDVYDGKPFNTVRLDPKRAPLVKKAWELYATGDYTLERLADTMTDLGLTARANRRWPERPVSYKWYHRMFKDIYYLGFITYKGKGEQTQIFPGRHEPLIEQELFDRVQDVLNQRSRKGQRDRIHQHYLKGHLFCARCERHGRTSRLIYTEAKSRNGSYYRYFMCRARQDKLGCDLPLLPAELVEDTITDHYHTLALPADFIDSVRELLSQTLADEQGSVRTMHAQLAKRIKDLDQKEERLIDLAADDSLPQDKIRIRLRRIQNDRASAQAGLLSTTAELNTGADILKSALAALSNPASYYQRADDTTRRFMNQTFYTKFLLDDEGVVDHRLNPPFDDFHQAKATWNTTKPATLTDYLNAHPPQTQKRPPSRETPSHNLEPTLAGIVSVPGLSTASMVELRGIEPLTFSMRTRRATNCAIAPRR

SEQ ID NO: 7994 - protein, 510 aa, synthetic construct
MGARVSVLSGPQKVSHEAQIDTATKWANAQDYPVVGVFEDLGVSASVPPHERPDLGPWIRERSHEWEVIIWSKLDRAFRSMRHCSDFIEWAEANKKIVVFAEDGMTLNYLNPSSKIDSILGELFVTIAAAFAQIELNRFKSRAEDMHRAIRPTTRWAAGLPPLGYQVVDHPSGRGKGLAIDPDAANLVREMADKLVDGWSFVRITEWLNESGKLTSQGRSRKARGLEPKGRWTTTNVIEILTGYRTLGIKTHKGQPVLDDSGEPIRLAPPLFTPERWDEVQRAAQLRKGKPRTPSDTSNPMLGVGYCGAPCSHKRSGSECLGDCQGICGSSLAQQFSKTRPRKSDGHVTFYRYYRCSRTPINCKAVFVVADDLDELLSEQFLLERGDRRVTERVFIPGEDNSYELDFINQRIELLREDRASGLFPSGEDELVYRNQMKQLLARRDELASVPVRQAGYENVELEKTYREVWPGAAPEDKRKMLIDAEISIRLRESPGKSIRAEMIVGSPYT

SEQ ID NO: 7995 - protein, 498 aa, synthetic construct
MEGETKRALIVTRLSRVTEATTSPERQMEICQVLCDDRGYEVVGHAEDLDVSGSVDPFDRRRRPNIARWLANEAEPFDVIVVYRVDRLTRSLRHLQKLVHWAEDNDKLVVSATEPHFDMTTPFAPVLIALIGTVAQMELEAIRERNSSAARHNIRAGRWRGGQPPWGYVSSNASGEWRLVPCPEQVELINEVAARVLGGEPLQRIAHDLTSRGIPTPKGRTEWNVTPLKRSLTSEAMLGYVMSGDKPLRNDDGSPIIRAEPILSREVFDRVKVELESRSRRGEPTKRSSSLLLRVLYCGVCQLPAYQFNGGSHSKSPRYRCSSTGKSTKCENLTVRMDLADQAFTENLLDMFGDSERLERIWDTGSDHSAELADINEILEDLTGLLGTGPYKAGTPQRSALDSRIAALASRQAELSTEAVRPSGWVWRTTGEMFADWWDNQDTERRNVWLRSMNIKVTYNNSSGAVTWGLDWGDLKKFEEQLKFGKSAQRAVLQITEA

SEQ ID NO: 7996 - protein, 620 aa, synthetic construct
MSTRHTSADLLQGYTKTAPAGDGADLAVTLLRVSTKKQLYTAIDIDADGNSIATQRDVTALKADALGATITREFIEPGNSGKTVDQRPVFKELLGYLHEHPEVRYVIVYMRSRAFRNHFDAALVQIQLAKIGVRLVSAKEDFGQGAAAVAMEGMVDIMNGFQNTLQGLDVQAKMGRKARAGGTVSLAKIGYLNIRAEFKGKLVNTVGLDPERAPLLRKAWELYATGEYTIARLEATLADLGLTSRPTRTVPPGKPVSSSTLQKMLRDPYYAGFVRYKGELYPGRHEALVSQALFDQVQDVLDARSREGQRDRIHMHYLKNTLFCERCRRNGESSRLIYTKVRGQNGGYYEYFLCRGRQEGYCDLPHQPVHLVEEAIVDYYATLGLPETFIIEVRERLESTVQDNQARTRELHASLTRKLAAIDTKESRLIDLAADDLMPRDKIRQKLNELKQERARIEAGLTSTDEQLSVGAQVLRDALHLVEDPQQLYRDAPNNVRRHLNSAFYERFYLDDLVVADADKTPLFDDLHEAADAHHSARIRRTRPTGVNSAKSPEKGPEMARNPRNAGVPSGVTGLDHPNLATVLTVPSSSTTSLVGVAGFEPTTSSSRTKRATKLRHTPL

SEQ ID NO: 7997 - protein, 522 aa, synthetic construct
MTANSTRAIVGARVSIFTDGKESQITQRTKGTAYAESQGWTVVGAFEDLDVSAIKQSPWDRPDLKQWLTDRADDWDALVFAKTDRVFRSAADCVKLSEWCRDHKKILVLVDDGIKLDYYHPDSQQDAFAGAMSKVFLILASVFAEIEGQRFVQRALDRVTQYRHQPRWAYGVPPYGFQVVDRPEGGKTLGHDLEAQQVLQGIATRLLGGDSLTRITADLNETGVLSPADRLRQRAGKELRGSRWTVITVQTILTNPATQGIKTAKGKPVLDAGGEPVRVGPPSFDSETWGRIHSELAQRSQSGQQRRHSDNPLLGVAKCGACGKNMRHFQRTKGGRHYRYYICGSTPKACPGVLINADNAELAVETSFLDVHTNRRIKERVWRAGSDHSAELEQTTNTIKALWEDRALGLFTTPEDQDMFRSQIAALVAKRDALALTPVIKAGWVDVETEQTYGAAWPDATPVERRKMLTDAGMKLTVYRANEYETCVDLDKAIGEGSVGEELHNELEARAADERRRCGIPD

SEQ ID NO: 7998 - protein, 491 aa, synthetic construct
MGARVSVLSGPQKVSHEAQIDTATKWAKAHDYPVVGAFEDLGVSASVPPDERPDLGPWIRVRSHEWEVIIWSKLDRAFRSMRHCSDFIKWAETNKKIVVFAEDGMTLNYLNPSKGIDSILGELFVQIAAAFAQIELNRFKSRAEDMHRAIRPTTRWAAGLPPLGYQVVDHPSGRGKGLAIDSDAANLVREMADKLVDGWSFVRITEWLNESGKLTSQGRSRKARGLEPKGRWTTTNVIEILTGYRTLGIKTHKGQPVLDDNGEPIRLAPPLFTPERWDEVQRAAQLRKGKPRTPSDTSNPMLEVGFCAVCGSSLAQQFAKTRPRKSDGHVTHYRYYRCSRTPINCKTVFVVADDLDELLSEQFLLERGDRRVTERVFIPGEDNSYELDFINQRIELLREDRASGLFPSGEDELVYRNQMKQLLARRDELASVPVRQAGYENVELEKTYREVWPGATPEEKRKMLIDAEISIRLGESPGKSLRAELVIGTPY

SEQ ID NO: 7999 - protein, 620 aa, synthetic construct
MSTRHTSADLLQGYTQRAPAGDGVDLAVTLLRVSTKKQLYTAIDIDADGNSIATQRDVTALKADALGATIDREFIEPGNSGKTVDQRPVLKELLGYLHEHPEVRYVIVYMRSRAFRNHFDAALVQIQLAKIGVRLVSAKEDFGEGAAAVAMEGMVDIMNGFQNTLQGLDVQAKMGRKARAGGTVSLAKIGYLNIRAEFKGKLVNTVGLDPDRAPLLRRAWELYASGEYTIARLEATMADLGLTSRPTQTIPPGQPISSSTLQKMLRDPYYAGFVRYKDELYPGRHEALVSQALFDQVQDVLDARSRDGQRDRIHMHYLKNTLFCERCRRNGENSRLIYTKVKGHNGSYYEYFLCRGRQEGHCDLPHQPVHLVEDAIVDYYATLGLPETFITDVRERLESTVTDNQASARELHASLTRKLAAIDTKESRLIDLAADDLMPRDKIRQKLGELKQERARIEAGLTSTDEQLSIGAQVLRDALHLVEDPQRLYSDAPNNVRRHLNSTFYERFYLDDLVIADADKTPLFDDLHEAADAHHSARIRRTRPTGANSAKTPEKDPQMARNPRNAGVPSGVTGLDHPNLATVLTVPSSSTTSLVGVAGFEPTTSSSRTKRATKLRHTPL

SEQ ID NO: 8000 - protein, 498 aa, synthetic construct
MEGETKRALIVTRLSRVTEATTSPERQMEICQGLCDDRGYEVVGHAEDLDVSGSVDPFDRKRRPNIARWLANEAEPFDVIVVYRVDRLTRSLRHLQKLVHWAEDNGKLVVSATEPHFDMTTPFAPVLIALIGTVAEMELEAIRERNSSAARHNIRAGRWRGGQPPWGYVSSNASGEWRLVPCPEQVELINEVVARVLSGEPLQRIAHDLTSRSIPTPKGRTEWNVTPLKRSLTSEAMLGYVISGDKPLRNDDGSPIVRAEPILSREVFDRVKVELESRSRRGEPTKRSSSLLLRVLYCGVCQRPAYQFNGGSHSKSPRYRCSSTGKSTKCENLTVRMDLADQAFTENLLDLFGDSERLERIWDTGSDHSAELADINEILEDLTGLLGTGPYKAGTPQRSALDSRIAALASRQAELSTEAVRPSGWVWRTTGEMFADWWDNQDTESRNVWLRSMNIKVTYNNSSGAVTWGLDWGDLKKFEEQLKFGKSAQRAVLQITEA

SEQ ID NO: 8001 - protein, 531 aa, synthetic construct
MKPRALVVVRLSRVTDATTSPERQVTACRELCATRGYEVVGVAEDLDVSAGKTTPFDRPQLGRWLADPSQFDVIVFFRVDRIVRRLFDLADLIRWSREHAVTLVSATETHFDLSTDFGDIIALLVAKVAEMELEAISERNASAFRHNIKAGKYRGGMPPWGYVPTRDEDSGDWRLVQDPIQVSVIHDVVERVLKGEPLRVIAHDLTAQGIPTPKDRFAQTQGREASGYEWHSAPLKRALTSPTLLGRVVTREPLLDAQGRIQRDTKGRKVFGPETVVVGDDGSPVIRAEPILSREVFDRVGVELSGRENRKEPTKRSSGLLLRVIYCGECGRPAYRLKGGTGRKARYRCASAQYKDPCPNRTIALDWAESELERRILMNLGPLERKRRVWFPGNDHSDELSEVNELLSDLTDQLGTGTFKRGTPQRVRLDERIQSLTKRQEVLAALPQEPAGWRYEATGELFSDWWESQDTEARNIWLRQMNFRVVWKSHAEGVSTVVDEFKLDGDLTMDLDADQLFGPIVDIARALSNAR

SEQ ID NO: 8002 - protein, 498 aa, synthetic construct
MEGETKRALIVTRLSRVTEATTSPERQMEICQGLCDDRGYEVVGHAEDLDVSGSVDPFDRKRRPNIARWLANEAEPFDVIVVYRVDRLTRSLRHLQKLVHWAEDNGKLVVSATEPHFDMTTPFAPVLIALIGTVAEMELEAIRERNSSAARHNIRAGRWRGGQPPWGYISSNASGEWRLVPCPEQVELINEVVARVLSGEPLQRIAHDLTSRSIPTPKGRTEWNVTPLKRSLTSEAMLGYVISGDKPLRNDDGSPIVRAEPILSREVFDRVKVELESRSRRGEPTKRSSSLLLRVLYCGVCLRPAYQFNGGSHSKSPRYRCSSTGKSTKCENLTVRMDLADQAFTENLLDLFGDSERLERIWDTGSDHSAELADINEILEDLTGLLGTGPYKAGTPQRSALDSRIAALASRQAELSTEAVRPSGWVWRTTGEMFADWWDNQDTERRNVWLRSMNIKVTYNNSSGAVTWGLDWGDLKKFEEQLKFGKSAQRAVLQITEA

SEQ ID NO: 8003 - protein, 615 aa, synthetic construct
MKPYDITATMFGTPTEDATVEVKDAVSLLRVSSKRQMDTAVDIDPDGLSIATQRRVVELKANSVGTHVVKEFLEPGYSAKTIDERPIFKELLHYLNTHPNIGFVIVYMRSRAFRNQYDAAMVQMHLQKRGIRLISAKEDFGEGPYAEAMEGMVDIMNGLTNKLQGLDIQTKMYEKARHGGTNGQTRLGYLNVRDVYDGKPFNTVRLDPKRAPLVKKAWELYATGDYTLERVADTMTDLGLTARANRRWPERPVSYKWYHRMFKDIYYLGFITYKGKSEQTQIFPGRHEPLIEQELFDRVQDVLNQRSRKGQRDRIHQHYLKGHLFCARCERQGRTSRLIYTEAKSRNGSYYGYFMCRARQDKLGCDLPLLPAELVEDTITDHYHTLALPADFIDSVRELLSQTLADEQGSVRTMHAQLAKRIKDLDQKEERLIDLAADDSLPQDKIRIRLRRIQSDRASAQAGLLSTTAELNTGADILKSALAALSNPASYYQRADDTTRRFMNQTFYTKFLLDDEGVVDHCLNPPFDDFHQAKAAWSTTKPATLTDYLNAHPPQTQKRLPSRETPSHNLEPTLTGIVSVPGLSTASMVELRGIEPLTFSMRTRRATNCAIAPRR

SEQ ID NO: 8004 - protein, 531 aa, synthetic construct
MKPRALVVVRLSRVTDATTSPERQVTACRELCATRGYEVVGVAEDLDVSAGKTTPFDRPQLGRWLADPSQFDVIVFFRVDRIVRRLFDLADLIRWSREHAVTLVSATETHFDLSTDFGDIIALLVAKVAEMELEAISERNASAFRHNIKAGKYRGGMPPWGYVPTRDEDSGDWRLVQDPIQVSVIHDVVERVLKGEPLRAIAHDLTAQGIPTPKDRFAQTQGREASGYEWHSAPLKRALTSPTLLGRVVTREPLLDAQGRIQRDTKGRKVFGPETVVVGDDGSPVIRAEPILSREVFDRVGVELSGRENRKEPTKRSSGLLLRVIYCGECGRPAYRLKGGTGRKARYRCASAQYKDPCPNRTIALDWAESELERRILMNLGPLERKRRVWFPGNDHSDELSEVNELLSDLTDQLGTGTFKRGTPQRVRLDERIQSLTKRQEVLAALPQEPAGWRYEATGELFSDWWESQDTEARNIWLRQMNFRVVWKSHAEGVSTVVDEFKLDGDLTMDLDADQLFGPIVDIARALSNAR

SEQ ID NO: 8005 - protein, 448 aa, synthetic construct
MRTGLYVRVSTAEQEKHGYSIKVQLEKLRSFASAKDYAVVKEYVDAAQSGAKLERPGLKQLIEDTQNNALDCVLVYRLDRLSRSQKDTMYLIEDVFLKNNVAFVSLQESFDTTSSFGRAMVGMLSVFAQLERDNITERLFSGRAHRAKRGFHHGGGIIPFGYRYDVENGELKRFKNESDEVLAMFEMIANGKSVSSVAKKFNTYDTTIRRRIANPVYIGKIQFNGETFDGQHEPIVSKELFEKANARMNARASSLPFKRTYLLSGLIYCGKCGERCSAYESRSKHNGKEYRRAYYRCNARTWKYKQKHGRTCEQPHIRVDELEQAVMEQVKRLPLKHKAKKRAFDFKPVENKIATIDKQKERLLDLYLNEHLDNEMFNKKSRELDKSRDKLAKQLERMRMQAADSVESYQWLDGIDWGALDKDTLREVLERIIERIVIRDKDVEIYFK

SEQ ID NO: 8006 - protein, 527 aa, synthetic construct
MARTVTAIPATRALHTGAPLGQTTLRRVAGYARVSTDHDDQVTSYEAQVDYYTRYISDHAGWQFVKVYTDEGITGTSTKHRAGFQQMVTDALDGKIDLIITKSVSRFARNTVDSLTTVRALKDKGVEVFFEKEGIWTFDAKGELLITIMSSLAQEEARSISENVTWGHRKRFADGKVTVPYSRFLGYDKGEDGSLVINPEQAKLVRRIYNMYLGGMSIGTIARTLTDEPETFTAAGNKTWYYRSIRAILTNEKYKGDALLQKSYVADYLTKRQVINQGEVPQYYVTASHEAIISPAVWDFVQAEIAKGARDQRTQHRTRPFSSTLECSQCGHFFGSKTWHAGSKYEKVIWRCGHKYAGQEKCAIGHISDQRLKDMFLEAIRLRFGSSTDTGVNQAVLDALDTSDLEVEAAGLLAQINEVAKKLQSMIAHNARVAQDQQTYEKAFNASHEQHQALLADHAAVLAEIQNKHNRLAAYRYYQQETSRLDVDQLAFSPYLCITLLDKGTVNIDGTVTFHFRDGSQIRIANE

SEQ ID NO: 8007 - protein, 496 aa, synthetic construct
MYGYNLKPCLTRRNTLKRMEQITPPPISASPLVKVAAYARISMETERTPLSLSTQVSYYQQLIHDTPGWTFAGVFADSGISGTTTHRPQFQEMLALAREGAIDLILTKSISRFARNTVDLLETARELKDLEVEVRFEKENISSTSADGELMLTLLASFAQAESEQISQNVKWRIWKGFEEGKANGFHLYGYTDSADGTDVQIIEEEAAVVRWIFDQYMKKISCEKMAAQLIADGRVPHLADNKLPGEWVRHILKNPHYTGDLLLGRWSTPEGKPGRAVRNTGQLPQYLVENAIPAIIDRDTFVAVQTEIARRRELGARANWSIETVALTSKIKCVSCNCSFVRNVRNPKTQNSISTEHWICTERKKGRKTGCGTCEISDTALKGFIARVLGIEAFDEDVFNERIDHIDVQGKDHYTFHYTDGTSSSHTWRPNLKKSSWTPVRKAAWGELVRARWAEAKRLGLDNPRQAPTPPEALAKYRAVAKAEAERLRAERGER

SEQ ID NO: 8008 - protein, 528 aa, synthetic construct
MARTVTAIPATRALHTGAPLGQTTLRRVAGYARVSTDHDDQVTSYEAQVDYYTRYISDHAGWQFVKVYTDEGITGTSTKHRAGFQQMVTDALDGKIDLIITKSVSRFARNTVDSLTTVRALKDKGVEVFFEKEGIWTFDAKGELLITIMSSLAQEEARSISENVTWGHRKRFADGKVTVPYSRFLGYDKGEDGSLVINTKQAKLVRRIYNMYLGGMSIGTIARTLTDEPETFTAAGNKTWYYQSIRAILTNEKYKGDALLQKSYIADYLTKRQVINQGEVPQYYVTASHEAIISPAVWDFVQAEIAKGARDQRTQHRTRPFSSTLECSQCGHFFGSKTWHAGSKYEKVIWRCGHKYAGQEKCATGHISDQRLKDMFLKAIRLRFGSSTDTGVNQAVLDALDTSDLEVEAAGLLAQINEVAKKLQSMIAHNARVAQDQQTYEKAFNASHEQHQALLADHAAVVAEIQNKNNRLAAYHYYMQETANLDLERLVFSPYLCVALLDKGTVDVDGNVTFQFRDGSTQVVAIKQ

SEQ ID NO: 8009 - protein, 496 aa, synthetic construct
MYGYNLKPCLTRRNTLKGMEQITPPPISASPLVKVAAYARISMETERTPLSLSTQVSYYQQLIHDTPGWTFAGVFADSGISGTTINRPQFQELLALARKGAIDLILTKSISRFARNTVDLLETVRELKDLGVEVRFEKENISSTSADGELMLTLLASFAQAESEQISQNVKWRIWKGFEEGKANGFHLYGYTDSADGTDVQIIEEEAAVVRWIFAQYMKKTSCEKMAAQLIADGRVPHLADNKLPGEWVRHILKNPHYTGDLLLGRWSTPEGKPGRAVRNTGQLPQYLVENAIPAIIDRDTFTAVQTEIARRRELGARANWSIETVALTSKIKCVSCDCSFVRNVRNPKTQNSISTEHWICTERKKGRKTGCGTCEISDTALKGFIAQVLGIDAFDEDVFTERIDHIDVQGKDQYTFHYTDGTSSSHTWRPNLKKSSWTPARKAAWGELVRARWAEAKRLGLNNPRQAPTPPEALAKYRAVAKAEAERLRAERGER

SEQ ID NO: 8010 - protein, 540 aa, synthetic construct
MPKAISYIRFSSRIQASGDSTKRQNKYINEWLKNNPDYHLDESLRFQDLGISGYSGANAKSGAFGEFLAAVESGVIEAGSVLLVESLDRVSRQDIDTARERLRKILLAGVDVVTLADNSWYKKESLNDPLSLIKAVLIMQRANEESATKSKRLRSAWDAKREEAAKGKIMSRRCVAWLRVSDDMSHFELIPDNVKAVQRVFQLRLEGLPFVRIARQMNEEGFYTLNQRNPVKGAWSHTTVKALLDNRSVIGFKVPSNCTVTKGVKEIPNYYPAVISEEHFYAVQQLKQGAGRRPSSEKPLLTNLFKGVMRCAECGFVTIVNCATEKWHGVYRCSMRYEGRCHAKSINRRLADKALVQGLLYNTNRLSLNRDNGSAIGSLQSELEQLQKQRERLIKLAMLADDTESMAKDLKALNSQIKDAEKAISDVHQREQSTQLETISHLDLTVKKDRIEAQIIIKRIVKEIRLNTAGKKCDVFLHNGLKLLNFPLDRVVDGAQWLEVLPLIDGDEFDFEGFTTKPRHIALEEAPNWVKEMEEQSNQP

SEQ ID NO: 8011 - protein, 508 aa, synthetic construct
MKKAIAYMRFSSPGQMSGDSLNRQRRLITEWLKVNSDYYLDTVTYENLGLSAFNGKHAQSGAFSEFLDAIEHGYILPGTTLLVESLDRLSREKVGEAIERLKLILNHGIDVITLCDNTVYNIDSLNEPYSLIKAILIAQRANEESEIKSSRVKLSWKKKRQDALESGTIMTASCPRWLSLDDKRTAFVPDPDRVKTIELIFKLRMERRSLNAIAKYLNDHAVKNFSGKESAWGPSVIEKLLANKALIGICVPSYRARGKGISEIAGYYPRVISDDLFYAVQEIRLAPFGISNSSKNPMLINLLRTVMKCEACGNTMIVHAVSGSLHGYYVCPMRRLHRCDRPSIKRDLVDYNIINELLFNCSKIQPVENKKDANETLELKIIELQMKINNLIAALSVAPEVTAIAEKIRVLDKELRRASVSLKTLKSKAVSSLGDFHAIDLTSKNGRELCRTLAYKTFEKIIINTDNKTCDIYFMNGIVFKHYPLMKTISAQQAISTLKYMVDGEVYF

SEQ ID NO: 8012 - protein, 547 aa, synthetic construct
MKLLVTYIRWSTKEQDSGDSLRRQTNLIDAFYSKHKEEYYLLPAHRYVDKGKSGFHQQHKNQGSDFRRMFENVMSGVIPEGSLIVVENFDRFSRADIDTAIDDVRQILRKGVSILTLGDGELYDKSALTDPVKLIKHIIIAERAHQESLVKQKRIAQVWNHKTQLARELKKPMGKQAPGWLELSEDGSHYIVDEDKASLVNIIYDKRLSGMSMFAICKWLNEQGYPTINQRKVRISKTKKPDGNWSALSVKHILTSRSVLGYLPAKISTEDRKTVLREEIESFYPQIVTDSKFYAVQQLLEETGKGKTSSGEHWLYVNILKGLIRCKCGLVMTPTGIRKPVYQGTYRCNGNKESRCNYGTVSRKLLDTQLCSRLFSKLSQLHDEATDTAKLDELQRRLNTVDGELEKLTETLIQLPNITQIQEALRVKQGEKDELIVQLSREKARVKSVSSLNLSGLDMESVEGRTEAQIIIKRLVKEIVVSGNEKLVDIYLHNGNMIRGFPLDGKDDHTLTLEEATDEMQSLDDMLIFGEPVTRIYPAGDMEEVDA

SEQ ID NO: 8013 - protein, 507 aa, synthetic construct
MKRVISYIRFSSERQAKGDSLRRQSKMVNDWLKAHPEYYLDQDLSFRDLGVSGFTGKHLKGGLGDFLTAIEKGLVKAGDTLLIESLDRLSRQDVDQASELLRNILRSGVDVVTLSDGEHYTRESLRDPLALIKSILIMQRSHEESLRKSERIQAAWNRKKELISEGIKISKRCPAWLKLNDDRKSFSVIPDKVETVKRCFQLRLEGKSIWEIVRTMNAEGHQTLHQHKPGSFGQSSVQDLLKNRSVIGYFTPKGCEEISSYYPSVIDETTFYKVQQLSHSRYGRKPVSDKPLSVNLFKGVIRCSECGHALIITGFSDTRSGIYRCPLRNENRCSAKGLSRKQTDGTLLTLLSRLDRFDSDMTNTIDMLRLHREHISSNIEKLVQLSLEIEDLSAITNKLKQLKNELSQVDADIEKETQRLKSIDVGCLSDCDLTTKAGRIEAQLIIKSAVKEVVLNTAKRRCKVTFHNGRAITLPITENPSEDVTEAIQSLSEVTERGLLDVDEVII

SEQ ID NO: 8014 - protein, 545 aa, synthetic construct
METRPTKRVALYIRVSTQEQALEGHSIQAQEQNGRQFAERMGYEVVEVYADEGISGKSTKNRFAYQRMMNDARNHRFDLLVIWKLTRLGRNMLDVLQTVEELLRYDVGLHSISEQFDVTTSTGKLMLQLLGSFGEFERNQIAENVQMSMQSLVKDKKRYAGGRRLGYVSGIDANGQKQLVIEPEEAKIVRLIYAKYLGGAGYRAIANFLNRQGYQTVKKNAFSTTAVKDILRNKIYAGYLEYARYINWETKRRKGKNPKPILVKGTHEPIISEEDYQKVQERFALEGKQPKWNHTGENVLTGLLRCPECGAPMAASNVTNTLKDGTKKRIRYYSCSVFRNKGASVCHANSIRAEQAETFVADRLKEIIQLPEVLPRLVAALNEEIARQSQPLEQELVVLLERKEELKTKIEKWEAALEDSPELFPMLKDRLDELTEKRRQLHIRENEILGIFQQQGEPIQVKDVQRILTSLDRFLAQSEKKQIKALYRTFIEKITFDPNYKEILEITMKFTPAVVQQLNEQYQIAVSKTKDTAIFVLKTPFTLTI

SEQ ID NO: 8015 - protein, 457 aa, synthetic construct
MRVACYDRTSVYEEAKISNDAQYDAVKEYVLEEYEQIPQRFSDKGESGGQADRPAFRQLRAWVCASEEEGVIYVWRYDRLARQAKIALEFIELCQQHQVQVYSISEPLPASFSHASTNKLFVQLLFTFAEQQRNVIIENVRAGLAYKKQQRQYLSSAVPYGYRLVNGKIQQEAHEAKVVRHIFQLYVTQNYGYKKLCQRLTQQKLFFRERPFQPYHIYSILKNPLYYGEIKGGSLGKYLGTFEPILSKTTFLQAQEIRQSRRTAKKDTYPYLLRQKIRCPFCGRHLSSKYQWNTKKTKTLHYYHCTDRSCQGIFLRAERVESEVLEKVQTFFQHEGVYQALIAQLTQQLAEKRKDEKHKVIQQKKQEARWLKAFEEGNCSLEELKQQLQALQKPRSTSSFLSLQQCEAKVKEWLQLKDLSSRQLLCDHVCRIEVTKEKTVCGIYFRQLTQNILEGNE

SEQ ID NO: 8016 - protein, 559 aa, synthetic construct
MSATALANRPTGNPSPSDTPVTTTALLRGVRAVRLSVLTDETTSPERQREATDIAALAQGIDLADREAVDLGVSASKTTPFERPELGAWLRRPDEFDALVFWRFDRAVRSMDDMHELAKWARDHRKVIVFAEGPGGRLVLDFRNPLDPMSSLMVTLFAFAAQMEAQAIKERVLGAQAAMRVMPLRWRGSRPPYGYMPVELEGGGWTLVPDPDAVAVIERMIRDLMAGMTASLLAAELNAEGVLSPRDYWAVKQGRKTGGKTGGAKGQRGKEAVQRERFKWTPNVIRKVLTSLAMLGQKLHNGKPVRDADGNPVMATNSPIMERAEYDAVCALFEERAQTPSKERKDTNALLLGVIHCDHCGGRMYLSVQDGRQPTYKCNSHGRGDLCEAPANVRGDWVDDYVEREFLALLGSLHVTRTIETPGYDPAPEIAEVTAEIAEHMPTRKFFTAKSAVAAWEDRTVALNARLNALEATPKREAQREVIRTGKTYADLWAESDTAARRRMLTSAGAILTVKRGTRGGWRSLDTRRIGFGVHELDHMEAAERLEEIRAEETYAEAA

SEQ ID NO: 8017 - protein, 559 aa, synthetic construct
MRKVYCYVRFSSKKQQLGDSIERQQKLIERYLTEHNAEIAEQFSDLGISAFRGKNVKVGALSRFLERVKSGEISHGDTLIVESLDRISRQKELNTLEILISILNAGVIIYTLADGRIYNAKTEDQANLVFQINFIISRAYDESLNKQKRSISAWTRKHEEARKAKTVMTRKLPYWLKVVENGGETRIEVIEERAREVRKAFELAKFKLGAQAIASRLNKDGAQKRWTLIAVRHLLTSKSVYGSFEAFKTKAQSGTLEKNQAYEEIEGYFPAVIEKEEYYNVQSCLQKNKETYATRGRASKGFRNIFKGIIKCIDCDSYMHQNFLKRKGKEYMYLVCHKSLVNACPAGKKVIVPYRHILEPFLLFFKNYGIDELFSEPSDTQSLNQRLTAIREERSDKKGALQRMSDDIEKNNGEIPKTILALIGKIESQLSSLDEEENRTIAQIESLRVSKSVKEEITKSDIDELLETEEGRLKFNSLLSERKIELLVSREFEEEYSNLFILFKEKGFSENIKFNRKEAIFPFMGVYNFNRKTYSDGFGGEPKPNEQVDYEKFRIDWSL

SEQ ID NO: 8018 - protein, 541 aa, synthetic construct
MSMAKVYSYMRFSDPRQATGSSADRQLAYASAWASKHGMELDATLTLRDEGLSAYHETHVKQGALGAFLRAIDAGRIPVGSVLIVEGLDRLSRAEPLLAQAQLGQIVSAGITVVTASDGREYNRDGLKAEPMNLVYSLLVMIRAHEESDTKSKRVKAAVRRQCEAWVAGSYRGRIVSGKDPQWLTWGGDSWQFIPERVEAVRFALDAYRSGIGAARLVRLMHEKGMVLSDWGIAAQQVYRLVRLPALRGAKRISIDGEDFMLEDYYPRLLSDEEFSELETLVGQRYRRRGKDEIVGIVTGIGITRCGYCGTALVAQNLMQRVKADGSLVDGHRRLHCVSYSKNGGCNAGSCSSVPIEHAVLAYCSDQMNLQRLLEPSSADEELRTRLAEAQQGVAEVERQLQRVTDALVVDDSGAAPLSFVRKARELEEELERRRSAVRVLERELVAMASSVPVAEASKWAELAEQAKSVSNVEAREQARQLVMDTFERIVVYMRGVVPEGRRSKYIDVLLVSRAGQSRWLRVGRRTGAWSAGGDWNGSAP

SEQ ID NO: 8019 - protein, 543 aa, synthetic construct
MGKNGARVYSYLRFSDPRQATGSSADRQLAYASAWASKHGMELDATLTLRDEGLSAYHETHVKQGALGAFLRAVDEGRIPAGSVLIVEGLDRLSRAEPLLAQAQLGQIVNAGITVVTASDGREYNREGLKAEPMNLVYSLLVMIRAHEESDTKSKRVKAAVRRQCEAWVAGSYRGRIVSGKDPQWLAWDGDSWQFIPERVEAVRFALDAYRSGIGAARLVRLMHEKGMVLSDWGIAAQQVYRLVRLPALRGAKRISIDGEDFMLEDYYPRLLSDEEFSELETLVGQRYRRRGKDEIVGIVTGIGITRCGYCGTALVAQNLMQRVKADGSLEDGHRRLHCVSYSKNGGCNGGSCSSVPIERAVLAYCSDQMNLQRLLEPSSAGEDLRPRLVEAQKVVAEIERQLERVTDALLADDSGAAPLAFVRKARELEEDLERRRSAVRALEQELVAKSASAPAAGASKWAELAERAKSMVDVDAREQARQLVMDTFETLVVYMRGVIPNPKGRYIDVMMKSRAGQTRWIRVDRRTGVWKEGADRPTTRRS

SEQ ID NO: 8020 - protein, 525 aa, synthetic construct
MPSAFSYVRFSSGKQAKGSSEHRQRAMLGQWLEQHPSFTLSDLRFEDLGRSGFSGEHLDHGLGQLLAAIDSGAIKSGDVILVEAVDRIGRLEPLEMLPLFSQIVKAGVSVITLEDGHVYDRSSINETSLFLLVAKIQQAHEYSNRLSRRINASYTARREKAKAGLGIKRETPVWLTTDGQLVPHVAPHIAQAFQDYADGLGERRICRKLRESGLEEFSKTNATTVRRWLKNRTAIGYWNDIPDVYPHVVDPALFYQVQQRLDAPKVDRAKPSAHYLTGLVKCAVCGRNYNYKQRKHTDPAMLCTSRARLAGEGCSNSKTYPVIVLDQVRKLTSLPFLQHAMESASSQADPSSQRLAVIDGEIGELSRKIGEATKALLALGFTPEIQESLEQLKTAREALEEERATLLLPQAEKLTAAQLEAFSNGLLDDEPMKLNHVLQTAGYSMVVHPDGSIDVDGKRFVYEGASRKEKVYKLRLIGEDKQWSLPILTPQMATYKSLFMAAVRLPGDPSEEELRRFEEAKHSER

SEQ ID NO: 8021 - protein, 506 aa, synthetic construct
MRSVITYLRYSSAIQGAEGADSTRRQNDLFKQWLKKNSDAQVVASFSDEGLSGYKGKHLTGQFGDMLARIESGEFPEGTILLVESIDRIGRLEHLETEALMNRILGNGLEIHTLQDGLIYTKDALADDLGISIIQRVKAYIAHQESKQKSFRVSQKWEQRAKLALAGEQRLTKMVPGWIDPDTFKLNEHAETVRLIFKLLLSGESLHNIARHLQANNISSFSRRKDANGFSVHSVRTILRSETTIGTLPASQRNDRPAIPNYYEAAIDAATFNKAQEILDKNRKGRTPASDNPLTINIFKGLFRCQCGASVHPTGTKNKYAGVYRCNNNPDGRCDVPPLKRKPFDKWMIDNFLGMIDVGNDGEAEGKIAALQHEVEIVTARIKKATALLLEMDDITELKTQVKGLNQKRTELQTTIDNMRRKASLTDKELPQLKDIDLTTKAGRVECQLILSKHLKGLTLGKDSVTVTLQNDTEIIVPTDPLPLNDGTSIFEIAEKELLEIDAYQL

SEQ ID NO: 8022 - protein, 480 aa, synthetic construct
MLRNRASLYVRLSKAAGETNASLEGMIKELRELCAKEGLREVALHVDDGLSGGFRDRPEFQKWITDARQEYADVLMTPHVDRLTREGLNVAASLLDVVEGKDSTTGRVMHHPVRLLDAKGIDSSHGDSFRFRFVLQAEVARSERERMRDRTRLSVRRLRRAHRWPGGTPPYGYKVIPNPDGPGNALGLNPEEAAVVREAARGVLAGDALTLVCRRLNHEGSRPRRAAEWSRVSLGRVLTGDAVLGRITVNGALLRNDEGEIETPYPAVLTVDQSVALREALAPDPTRPTSSGRHPARLLSGLLYCHGCPSKMTVSRRSKGVVYRCQTRSQGGVCEAPVSISAPLVEEYVTGVYLDVAGSLPYLREEVHVSNASELALVESDIAEAVRLLASEATAEGFARLQQLQARKAELADQRPERLVTFVDTGKLTREVFEAALVDDQRAMLSAAFEEIVIGPGQRGPKRLSPERVTIRWAADEPDI

SEQ ID NO: 8023 - protein, 543 aa, synthetic construct
MVTVSLYARVSSRQQAQENTIESQIVELERRISSDGHELLDEHRFVDNGYSGSNLERPGLESLRDRVAEGKIDKIYIHSPDRLSRKFSYQMILLEEFKKAGSEIVFLNHKFDDNPDSHLFLQIQGAIAEYERAKIMERNRRGKLHAAKAGCISVMGRAPYGYRYIAKHVGEGSAQFEVDEEEANIVRKIFSRVGQERASIGEVVHELNKIPIITRTGKRYWKRSTIWNMLKNPAYIGQAAYGKTRTCSKPQVKKSKKGTCGKLKSGRFNSDKENWTYIPVPKIINENLFDSVQTQLAENRQRARVRQRRETYLLQGLMVCQRCQYTYCGTNHVHKKSTYYYYRCSGTNSSKFNGNKICDNKSIRTDVLDTVVWEEVKSILKEPDRIANEYQRRLSENKKPLHNQTREKQESKLRLSIKKFIDSYAKGFISQEEFEPRITTMKQHLKEIEEEKEKVLDQKKLQQELSLVTDSLKNFSSSVESKLDQVDWQTKQNIIRMLIHQIEINHNHLYIVFRIKSLANFDQNRHNRIMQCCTSSQYCWIAR

SEQ ID NO: 8024 - protein, 515 aa, synthetic construct
MKTAIYLRKSRADLEAEARGEGETLAKHRTTLLKIAKEMNLNVLSVREEIVSGESLVKRPEMLALLEEIEDNKYDVVLCMDMDRLGRGGMKEQGIILETFKRSNTKIMTPRKTYDLNDEWDEEYSEFEAFMARKELKIITRRMQRGRIASVEAGNYLGTHAPYGYDIHRLNKRERTLTINPEEASVVRMIFDWYAHEDMGANAIRSKLNDLGYKSKLGNEWNPYSILDILKNNVYIGKVTWQKRKEVKRPDAVKRSCARQDKSEWIIAVGKHEPIIPESLFEQVQEKLNSRYHIPYNTNGIKNPLAGIIKCAKCGYSMVQRYPKNRKETMDCKHRGCENKSSYTELIEKRLLEALKEWYINYKADFEKHKQDDKLKETQVIQMNEAALRKLEKELVDVQKQKNNLHDLLERGVYTVDMFLERSNVVSDRITEITSTMENLKKEIKTEIKKEKVKKDTIPQVQHVLDLYFKTDDPKKKNSLLKSVLEKAVYKKEKWQRLDDFELVLYPKLPQDGDI

SEQ ID NO: 8025 - protein, 515 aa, synthetic construct
MKTAIYLRKSRADLEAEARGEGETLAKHRTTLLKIAKEMNLNVLAVREEIVSGESLVKRPEMLALLEEIEDNKYDVVLCMDMDRLGRGGMKEQGIILETFKRSNTKIMTPRKTYDLNDEWDEEYSEFEAFMARKELKIITRRMQRGRIASVEAGNYLGTHAPYGYDIHRLNKRERTLTINSEEASVVRMIFDWYANEDMGANAIRSKLNDLGYKSKLGNEWNPYSILDILKNNVYIGKVTWQKRKEVKRPDAVKRSCARQDKSDWIIVDGKHEPIIPESLFEQVQEKLNSRYHIPYNTNGIKNPLAGIIKCSKCGYSMVQRYPKNRKETMDCKHRGCENKSSYTELIEKRLLEALKEWYINYKADFEKHKQDDKLKETQVIQMNEAALRKLEKELVDVQKQKNNLHDLLERGVYTVDMFLERSNVVSDRITEITSTMENLKKEIKTEIKKEKVKKDTIPQVEHVLDLYFKTDDPQKKNSLLKSVLEKAVYKKEKWQRLDDFELVLYPKLPQDGDI

SEQ ID NO: 8026 - protein, 460 aa, synthetic construct
MKCAIYRRVSTDEQAEKGFSLENQLLRLQAFAESQGWEVVHDYMDDGYSGKNMNRPQIKRMLHDLKLNKFDIVLVYRLDRFTRSVKDLNDLLEVFKENEVDFKSATESIDTSTATGRMILNMMVSTAQWERETISERVKDVVRKKKDLGLISTGYPPYGYAMNDGVISQVPHEVEIVKFIFEKAKVYGFQKISKLLNEQGLVTRNGTKWLISTASRIAHNPFYSGEMRYKRDGETSTVPINVEGYEPVITKEEHKEVLKAIKKRNRNQTRAKSNEVYPFSGIVLCPECGHPMKGTRVSSRGYYYKYYRCDRASDHFCNGKLIRCEKLDKAFAEYIHDAFQIDRIEIKEETNTKDIQREIKRCKSKIERLKDLYVDGDISKKKYKNDVGELNEKIYDLEQKLLSAENKISHDHIRENLKRLSEFWGLIDDNTKMESIRGVFDTITVDIQGNDVVITDHTLL

SEQ ID NO: 8027 - protein, 481 aa, synthetic construct
MRCAIYARVSTEEQALEGYSISAQKKKLKSYCDAQDWDVVGYYVDEGISAKNTNRPELKRMIEHIEKGLIDCVLVYRLDRLTRSVLDLYTLLDVFEKHDCKFKSATEVYDTTTAIGRLFITIIAALAQWERENIGERVRVGQQEKVRQGKYTSGRKPYGYSVDHKKGTLKIIEEEAKVVRSIFNDYLKGYSAMRISKKLNTLGTPGRDYWNEKAIMYILENPLYIGTLRWRKETEHYFEVPDSVPTIIEQEIFDNVQKLRESRRDSHPRSQYGSYIFSGIIKCPRCGGPLVGNYVKAKKQDGTVTKYKHYFCRGRRLNVCNMGSMSERKLEKIIIPHILSFYVDATEEISDEEVTIGNSNIEDEITQIKNELKVIEKRRKKWQYAWANDHLKDEEFTELMQEENEREKSLTEALYKLKPAENKKLNTEELKSILKDIKLNWSNLNDEEKKMFMQIILKKIVVERSDQWYAYELKIVETEFN

SEQ ID NO: 8028 - protein, 515 aa, synthetic construct
MRTAIYLRKSRADLEAEARGEGETLAKHRTTLLKIAKEKSLNVLAVREEIVSGESLVKRPEMLALLEEIEDNKYDVVLCMDMDRLGRGGMKEQGIILETFKRSNTKIMTPRKTYDLNDEWDEEYSEFEAFMARKELKIITRRMQRGRIASVEAGNYLGTHAPYGYDIHRLNKRERTLTINLEEASVVRMIFEWYANEDMGASMITNKLNQLGYKSKLGNDWNPYSVLDMLKNNIYIGKVTWQKRKEVKHPDATKRSCTRQDKSEWIIADGKHDSIISESLFEKAQEKLNTRYHVPYNTNGLKNPLAGIIRCGKCGYSMVQRYPKNRKKTMDCKHRGCENKSSYTELIERRLLEALKEWYINYKADFAKNIQDSLSKEKQVIKINQATLRKLEKELLDVQKQKNNLHDLLERGVYTVDMFLERSNVVSDRMNEITDMMENLQKEINTEITKERVKKDTIPQVEHVLNLYFKTDDPMKKNSLLKSVLKKAIYTKEKWQRLDDFKLVLYPKLPKDGDK

SEQ ID NO: 8029 - protein, 487 aa, synthetic construct
MAYAVYVRVSSDKDEQVSSVENQIDICRYWLENNGFEWDEHAVYFDDGISGTAWLERHAMQRILNKARKKELDTVIFKSIHRLARDLKDALEIKEILLGHGVRLITIEEGYDSHYEGKNDMKFEMYAMFASQLPKTLSVSVTAALAAKVRRGGYTGGFVPYGYEIVDDKYAINDEEAALVKEIFELYSQGFGYIKIANTINDKGARTRKGAPWTFSTLCKMIKNPAYKGTYTMQKYGTVKVNGRKKKVINPKEKWVIFENHHPAIISHELWDMANDKDPNKFKKKRRVSTSNELRGITVCAHCGTAMSKRNSINVSKNGKVTEYSYMICNWSRITARRECVKHVPIHYKDLRALVLDELKEKESDLEKEFYSDENRLHVKLKKLNKDIKDLKVKKERLLDLYLEGERIDKDTFTVRNKKLEKEIEVKELEIQKANNIETQMKEKQEVRDAFALLEESKDLNSVFKKLIKRIEVAQDGAVDIHYRFAE

SEQ ID NO: 8030 - protein, 515 aa, synthetic construct
MKTAIYLRKSRADLEAEARGEGETLAKHRTTLLKIAKEMNLNVLSVREEIVSGESLVKRPEMLALLEEIEDNKYDVVLCMDMDRLGRGGMKEQGIILETFKRSNTKIMTPRKTYDLNDEWDEEYSEFEAFMARKELKIITRRMQRGRIASVEAGNYLGTHAPYGYDIHRLNKRERTLTINPEEASVVRMIFDWYAHEEMGANAIRSKLNDLGYKSKLGNEWNPYSILDILKNNVYIGKVTWQKRKEVKRPDAVKRSCARQDKSDWIIADGKHESIIPESLFEQVQEKLNSRYHIPYNTNGIKNPLAGIIKCSKCGYSMVQRYPKNRKETMDCKHRGCENKSSYTELIEKRLLEALKEWYINYKADFEKHKQDDKLKETQVIQMNEAALRKLEKELVDVQKQKNNLHDLLERGVYTVDMFLERSNVVSDRITEITSTMENLKKEIKTEIKKEKVKQDTIPQVENVLDLYFKTDDPKKKNSLLKSVLEKAVYKKEKWQRLDDFELVLYPKLPQDGDI

SEQ ID NO: 8031 - protein, 515 aa, synthetic construct
MKTAIYLRKSRADLEAEARGEGETLAKHRTTLLKIAKEMNLNVLSVREEIVSGESLVKRPEMLALLEEIEDNKYDVVLCMDMDRLGRGGMKEQGIILETFKRSNTKIMTPRKTYDLNDEWDEEYSEFEAFMARKELKIITRRMQRGRVASVEAGNYLGTHAPFGYDIHRLNKRERTLTINPEEASVVRMIFDWYANEDMGANAIRSKLNDLGYKSKLGNEWNPYSILDILKNNVYIGKVTWQKRKEVKRPDAVKRSCARQDKSDWIIADGKHEPIIPESLFEQVQEKLNSRYHIPYNTNGIKNPLAGIIKCSKCGYSMVQRYPKNRKETMDCKHRGCENKSSYTELIEKRLLEALKEWYINYKADFEKHKQDDKLKETQVIQMNEAALRKLEKEVVDVQKQKNNLHDLLERGVYTVDMFLERSNVISNRITEITSTMENLKKEIKTEIKKEKVKKDTIPQVEHVLDLYFKTDDPKKKNSLLKSVLEKAVYKKEKWQRLDDFELVLYPKLPQDGDI

SEQ ID NO: 8032 - protein, 515 aa, synthetic construct
MKTAIYLRKSRADLEAEARGEGETLAKHRTTLLKIAKEMNLNVLSVHEEIVSGESLVKRPEMLALLEEIEDNKYDVVLCMDMDRLGRGGMKEQGIILETFKRSNTKIMTPRKTYDLNDEWDEEYSEFEAFMARKELKIITRRMQRGRVASVEAGNYLGTHAPFGYDIHRLNKRERTLTINPEEASVVRMIFDWYANEDMGANAIRSKLNDLGYKSKLGNEWNPYSILDILKNNVYIGKVTWQKRKEVKRPDAVKRSCARQDKSDWIIADGKHEPIIPESLFEQVQEKLNSRYHIPYNTNGIKNPLAGIIKCAKCGYSMVQRYPKNRKETMDCKHRGCENKSSYTELIEKRLLEALKEWYINYKADFEKHKQDDKLKETQVIQINEAALRKLEKELVDVQKQKNNLHDLLERGVYTVDMFLERSNVVSDRITEITSTMENLKKEIKTEIKKEKVKKDTIPQVENVLDLYFKTDDPKKKNSLLKSVLEKAVYKKEKWQRLDDFELVLYPKLPQDGDI

SEQ ID NO: 8033 - protein, 515 aa, synthetic construct
MKTAIYLRKSRADLEAEARGEGETLAKHRTTLLKIAKEMNLNVLSVREEIVSGESLVKRPEMLALLEEIEDNKYDVVLCMDMDRLGRGGMKEQGIILETFKRSNTKIMTPRKTYDLNDEWDEEYSEFEAFMARKELKIITRRMQRGRVASVEAGNYLGTHAPFGYDIHRLNKRERTLTINPEEASVVRMIFDWYANEDMGANAIRSKLNDLGYKSKLGNEWNPYSILDILKNNVYIGKVTWQKRKEVKRPDAVKRSCARQEKSDWIIADGKHEPIIPESLFEQVQEKLNSRYHVPYNTNGIKNPLAGIIKCSKCGYSMVQRYPKNRKETMDCKHRGCENKSSYTELIEKRLLEALKEWYINYKADFEKHKQDDKLKETQVIQMNEAALRKLEKELVDVQKQKNNLHDLLERGVYTVDMFLERSNVVSDRITEITSTMENLKKEIKTEIKKEKVKKDTIPQVEHVLDLYFKTDDPKKKNSLLKSVLEKAVYKKEKWQRLDDFELVLYPKLPQDGDI

SEQ ID NO: 8034 - protein, 457 aa, synthetic construct
MRCAIYRRVSTDEQAEKGFSLENQKLRLESFATSQGWEVVEDYVDDGFSGKDTNRPALQRMFSNVDKFDVILVYKLDRFTRSVKDLNEMLETIKKNEIAFKSATESIDTTTATGRMILNMMGTTAQWERETISERIKDVFGKLRENGIFSTGHPPYGYRCSGNKSIEIVEEQAEMVRYIYELSKTMGLFKISVELNGKGIKTRRNNKFGQSAVKRILHNPFYCGYMEVDNKWVPIKNEGYTPIISEEEFKTTQKILTKRTKAQTRSRSVSYYPFSGIVLCPECQRAMRGDRAKYGDYYYRYYRCVYGRENINCTNRKRIRAEQVDKAFAEYISRSFENTTIKLDSRDIKSDIEYELKHLDSKIERLSDIYIEGDITKSKYNEKMNSLLNEKEKLKKDLTSCKEHVDAEFVRNQINKLESIWNLIDDKTKSESIRSIFDTIKIKQDKNTVTIMDHTLL

SEQ ID NO: 8035 - protein, 515 aa, synthetic construct
MKTAIYLRKSRADLEAEARGEGETLAKHRSTLLKIAKEMNLNVLAVREEIVSGESLVKRPEMLALLEEIEDNKYDVVLCMDMDRLGRGGMKEQGIILETFKRSNTKIMTPRKTYDLNDEWDEEYSEFEAFMARKELKIITRRMQRGRVASVEAGNYLGTHAPFGYDIHRLNKRERTLTINSEEASVVRMIFDWYANEDMGASAIRNKLNDLGYKSKLGNEWNPYSILDILKNNVYIGKVTWQKRKEVKRPDAVKRSCARQDKSDWIIADGKHDPIIPESLFEQVQEKLNSRYHVPYNTNGIKNPLAGIIKCSKCGYSMVQRYPKNRKETMDCKHRGCENKSSYTELIEKRLLEALKEWYINYKADFEKHKQDDKLKETQVIQMNEAALRKLEKELVDVQKQKNNLHDLLERGVYTVDMFLERSNVVSDRVTEITSTMENLKKEIKTEIKKEKVKKDTIPQVEHVLDLYFKTDDPKKKNSLLKSVLEKAVYKKEKWQRLDDFELVLYPRLPQDGDI

SEQ ID NO: 8036 - protein, 515 aa, synthetic construct
MKTAIYLRKSRADLEAEARGEGETLAKHRTTLLKIAKEMNLNVLSVREEIVSGESLVKRPEMLALLEEIEDNKYDVVLCMDMDRLGRGGMKEQGIILETFKRSNTKIMTPRKTYDLNDEWDEEYSEFEAFMARKELKIITRRMQRGRVASVEAGNYLGTHAPFGYDIHRLNKRERTLTINSEEASVVRMIFDWYANEDMGANAIRSKLNDLGYKSKLGNEWNPYSILDILKNNVYIGKVTWQKRKEVKQPDAVKRSCARQDKSDWIIADGKHEPIIPESLFEQVQEKLNSRYHVPYNTNGIKNPLAGIIKCSKCGYSMVQRYPKNRKETMDCKHRGCENKSSYTELIEKRLLEALKEWYINYKADFEKHKQDNKLKETQVIQMNEAALRKLDKELVDVQKQKNNLHDLLERGVYTVDMFLERSNVISNRITEITSTMENLKKEIKTEIKKEKVKKDTIPQVEHVLDLYFKTDDPKKKNSLLKSVLEKAVYKKEKWQRLDDFELVLYPKLPQDGDI

SEQ ID NO: 8037 - protein, 477 aa, synthetic construct
MRCAIYARVSTEEQAEEGYSISAQKKKLTAYCEAQDWNVVGYYVDEGISAKNTNRPELIRLIDHIKKGLIDCVLVYRLDRLTRSVLDLYTLLDVFEKYDCKFKSATEVYDTTTAIGRLFITIIAALAQWERENIGERVRVGQQEKIRQGKYTSGRKPYGYNADHKEGVLTIIEEEAKVVRSIFNDYLKGHSAQRICKKLNSIGTSGRDYWNEKAVLYILENPLYVGTLRWRKETEHYFEIPNSVPAIIEKDLFNSVQKLREARRESHPRSAYGSYIFSGIIKCPRCGRSLVGNYVTSKKKDGTVTKYKQYFCRGRKLNVCNMSGMSERKLEKTIIPYILSLHIHATDEDVSAGQDNTEDEIIQIKNELKVIEKRRKKWQYAWANEHLKDEEFTELMKEESDREKVLTEELYKLKPAENKKLKNDELIEILNDMKLNWNNLNDEEKKILMQIILKRIIVERSNEWQAYELKIVEMEFN

SEQ ID NO: 8038 - protein, 515 aa, synthetic construct
MKTAIYLRKSRADLEAEARGEGETLAKHRSTLLKIAKEMNLNVLSVREEIVSGESLVKRPEMLALLEEIEDNKYDVVLCMDMDRLGRGGMKEQGIILETFKRSNTKIMTPRKTYDLNDEWDEEYSEFEAFMARKELKIITRRMQRGRIASVEAGNYLGTHAPYGYDIHRLNKRERTLTINPEEASVVRMIFDWYANEDMGANAIRSKLNDLGYKSKLGNEWNPYSILDILKNNVYIGKVTWQKRKEVKRPDAVKRSCARQEKSDWIIADGKHEPIIPESLFEQVQEKLNSRYHVPYNTNGIKNPLAGIIKCSKCGYSMVQRYPKNRKETMDCKHRGCENKSSYTELIEKRLLEALKEWYINYKADFEKHKQDDKLKETQVIQMNEAALRKLEKELVDVQKQKNNLHDLLERGVYTVDMFLERSNVVSDRITEITSTMENLKKEIKTEIKKEKVKKDTIPQVEHVLDLYFKTDDPKKKNSLLKSVLEKAVYKKEKWQRLDDFELVLYPKLPQDGDI

SEQ ID NO: 8039 - protein, 460 aa, synthetic construct
MKCAIYRRVSTDEQAEKGFSLENQLLRLQAFAESQGWEVVHDYMDDGYSGKNMNRPQIKRMLHDLKSNKFDIVLVYRLDRFTRSVKDLNDLLEVFKEHEVDFKSATESIDTATATGRMILNMMVSTAQWERETISERVKDVVRKKKDLGLISTGYPPYGYAMNDGVISQVPHEVEIVKFVFEKAKVYGFQKISKLLNEQGLVTRNGTKWLISTASRIAHNPFYSGEMRYKRDGETSTVPINVEGYEPVITKEEHKEVLKAIKKRNRNQTRAKSNEVYPFSGIVLCPECGHPMKGTRVSSRGYYYKYYRCDRASDHFCNGKLIRYEKLDKAFAEYIHDAFQIDRIEIKEETNTKDIQREIKRCKSKIERLKDLYVDGDISKKKYKNDVGELNEKIYDLEQKLLSAENKISHDHIRENLKRLSEFWGLIDDNTKMESIRGVFDTITVELQGNDVVITDHTLL

SEQ ID NO: 8040 - protein, 515 aa, synthetic construct
MKTAIYLRKSRADLEAEARGEGETLAKHRSTLLKIAKEMNLNVLAVREEIVSGESLVKRPEMLALLEEIEDNKYDVVLCMDMDRLGRGGMKEQGIILETFKRSNTKIMTPRKTYDLNDEWDEEYSEFEAFMARKELKIITRRMQRGRIASVEAGNYLGTHAPFGYDIHRLNKRERTLTINSEEASVVRMIFDWYANEDMGANAIRSKLNDLGYKSKLGNEWNPYSILDILKNNVYIGKVTWQKRKEVKRPDAVKRSCARQDKSDWIIADGKHESIIPESLFEQVQEKLNSRYHIPYNTNGIKNPLAGIIKCAKCGYSMVQRYPKNRKETMDCKHRGCENKSSYTELIEKRLLEALKEWYINYKADFEKHKQDDKLKETQVIQMNEAALRKLEKELVDVQKQKNNLHDLLERGVYTVDMFLERSNVVSNRITEITSTMENLKKEIKTEIRKEKVKKDTIPQVEHVLDLYFKTDDPKKKNSLLKSVLEKAVYKKEKWQRLDDFELVLYPKLPQDGDI

SEQ ID NO: 8041 - protein, 475 aa, synthetic construct
MKCVIYRRVSTDMQAEEGFSLEAQKMRLEAYAQSQGWDVVDDYMDDGYSAKNMDRPELQRMLKDARDRKFEIILVYKLDRLCRSTRDLNDMIEEFEENKVKFKSATEVLDTTTATGRLFINLIGTLAQWEREQTAERVTETMYNRAARGYLNGGPIPFGYKRVDKKTIIDTDEAKIVKMIFKDALSHGTHWICKKLNDSGIKSKTGTHWSKITVIQMLRNPIYCGYVRYGYTTDNETVQTKIQEEGFTPIISEEFYNKVQISMDHRSKKSAKPRKNRYHYFSTILVCPHCKGRLSGVSNVAKGKEYRYYRCLNSLRGDIVCPGIRLRSEDVDKEFLNNLNIIIDDISINDTSDNNIDLDLINNQLEKLKVKKARIKELYIDGIIDKGEFQRRSNDISLDEMELTRKSEVEYDEISKEEIISTLRNLKDNWDIFSDEVKAQAIGSLFDSISIEVAYKDKNRKRLVELFEIVGYEFK

SEQ ID NO: 8042 - protein, 515 aa, synthetic construct
MKTAIYLRKSRADLEAEERGEGETLAKHRTTLLKIAKELNLDVLSVREEIVSGESLVKRPEMLALLEEIEDNKYDVVLCMDMDRLGRGGMKEQGIILETFKRSNTKIMTPRKTYDLNDEWDEEYSEFEAFMARKELKIITRRMQRGRIASVEAGNYLGTHAPYGYDIHRLNKRERTLTINSEEASVVRMIFEWYANEDMGANAIMRKLNELGYKSKLGNDWNPYSILDMLKNNVYIGKVTWQKRKEVKRPDATKRSCTRQDKSEWIIADGKHDPIIPESLFEKAQEKLNTRYHVPYNTNGLKNPLAGIIKCGKCGYSMVQRYPKNRKQTMDCKHRGCENKSSYTELIEKRLFEALKEWYINYKADFEKNKQDENTKETQIIQMNEAALRKLEKELVDVQKQKNNLHDLLERGVYTVDMFLERSNVVSDRINEITETMENLRKEIKTEITKEKVKKDTIPQIEHVLDLYFKTDDPQKKNSLLKSVLEKAVYTKEKWQRLDNFKLVLYPKLPQDGDK

SEQ ID NO: 8043 - protein, 491 aa, synthetic construct
MGLAAIYLRLSRNEEQLNIDEILLNHRNALTKLSKQHKLTYDIYQEISSGVNTERPQLNLLLSRLDDYDALLVMDIDRISRDNAHAEEIKKMLIVHDIKILTPQGAIDLSQESNEMLFSFQAMMANFEYKQIRKRLGRGRLAAAEQGKWTMSNRVPLGYKKNEEKRLEVVEDEAKIIRFIFQKTLERVSANEIAKQLDILGWRSRQGKVLTSAHISNMRKNVVYYGVVKACRKVNGRVVDDVFVENAHEPIVSKQMFLEVQKILEENANGNFFNKLKATRKLQNLIYCNCCKRKRYIQCDGNGVDYIKSCIYKVDNNKCRDRGYKYEPIEQFVLQKVKEKKPAFEQELQMLKSLDTTEVEKKLSMQRESLEKQINRFNKRQRNLKEMRMDGEITKAEFYEMRDENEEQIKQVKQQMELIDIKLENLSNTDEEQARLQDAIKKLDKLEELKAESCNTFLKKFIKKIWFSSNTEANHDTTRPREDATVEIEWL

SEQ ID NO: 8044 - protein, 515 aa, synthetic construct
MKTAIYLRKSRADLEAEARGEGETLAKHRTTLLKIAKELNLDVLSVREEIVSGESLVKRPEMLALLEEIEDNKYDVVLCMDMDRLGRGGMKEQGIILETFKRSNTKIMTPRKTYDLNDEWDEEYSEFEAFMARKELKIITRRMQRGRIASVEAGNYLGTHAPYGYDILRLNKRERTLTINSEEASVVRMIFEWYANEDMGASVITNKLNQLGYKSKLGNDWNPYSVLDMLKNNIYIGKVTWQKRKEVKRPDATKRSCARQDKSEWIIADGKHDPIISKSLFEKAQEKLNTRYHVPYNTNGLKNPLAGIIRCGKCGYSMVQRYPKNRKKTMDCKHRGCENKSSYTELIERRLLEALKEWYINYKADFAKNNQDSLSKEKQVIKINQAALRKLEKELLDVQKQKNNLHDLLERGVYTVDMFLERSNVVSDRMNEITEMMENLQKEINTEIKKERVKKDTIPQVEHVLDLYFKTDDPKKKNSLLKSVLEKAVYTKEKWQRLDDFKLVLYPRLPKDGDK

SEQ ID NO: 8045 - protein, 481 aa, synthetic construct
MKYAVYVRVSTDRDEQVSSVQNQIDICRYWLEKNDYEWDSNAVYFDDGISGTAWLERHAMQLILEKARRNELDTVVFKSIHRLARDLRDALEIKEILIGHGIRLVTIEENYDSLYEGGNDIKFEMFAMFAAQLPKTLSVSISAAMQAKARRGEAIGKPGLGYDVIDKRLVINEKEAEVVRGIFDLSKKGFGYKKIASILNDKGMYTKLGQLWSDTTIAKVLKNQKYKGDLVLNRYKTVKVDGRKKRIHTPKDRLTIIEDHYPAIVSKELWGAVNDNRLSQKKTKLDMKNEFRGMIFCNHCGGSITVKYSGRYSKKNKKEWVYLKCSNFLRYHQCVNFKPIYYDEIREVVIYRLKQKEKELEIHFNPKIHEKREAKSMEIKKYITLLKAKKEKLIDLYVDGLIDKDVFSKRDLNFENEIKEQELELLKLMDQNKRMKEDQQIKKAFSMLDEEKDMHEVFKILIKKITLSKDKYIEIEYTFSL

SEQ ID NO: 8046 - protein, 515 aa, synthetic construct
MKTALYLRKSRADLEAEARGEGETLAKHRSTLLKIAKEMNLNVLSVREEIVSGESLVKRPEMLALLEEIEDKKYDVVLCMDMDRLGRGGMKEQGIILETFKRSNTKIMTPRKTYDLNDEWDEEYSEFEAFMARKELKIITRRMQRGRIASVEAGNYLGTHAPYGYDIHRLNKRERTLTINSEEASVVRMIFDWYANEDMGANAIRSKLNDLGYKSKLGNEWNPYSILDILKNNVYIGKVTWQKRKEVKQPDAVKRSCARQDKSDWIIADGKHEPIIPESLFEQVQEKLNSRYHVPYNTNGIKNPLAGIIKCSKCGYSMVQRYPKNRKETMDCKHRGCENKSSYTELIEKRLLEALKEWYINYKADFEKHKQDEKLKETQVIQMNEAALRKLEKELVDVQKQKNNLHDLLERGVYTVDMFLERSNVVSDRITEITSTMENLKKEIKTEIKKERVKKDTIPQVEHVLDLYFKTDDPKKKNSLLKSVLEKAVYKKEKWQRLDDFELVLYPKLPQDGDI

SEQ ID NO: 8047 - protein, 515 aa, synthetic construct
MKTAIYLRKSRADLEAEARGEGETLAKHRTTLLKIAKEMNLNVLAVREEIVSGESLVKRPEMLALLEEIEDNKYDVVLCMDMDRLGRGGMKEQGIILETFKRSNTKIMTPRKTYDLNDEWDEEYSEFEAFMARKELKIITRRMQRGRVASIEAGNYLGTHAPFGYDIHRLNKRERTLTINPEEASVVRMIFDWYANEDMGANAIRSKLNDLGYKSKLGNEWNPYSILDILKNNVYIGKVTWQKRKEVKRPDAVKRSCARQDKSDWIIADGKHEPIIPESLFEQVQEKLNSRYHIPYNTNGIKNPLAGIIKCAKCGYSMVQRYPKNRKETMDCKHRGCENKSSYTELIEKRLLEALKEWYINYKADFEKHKQDDKLKETQVIQMNEAALRKLEKELVDVQKQKNNLHDLLERGVYTVDMFLERSNIVSDRITEITSTMENLKKEIKTEIKKEKVKKDTIPQVEHVLDLYFKTDDPKKKNSLLKSVLEKAVYKKEKWQRLDDFELVLYPKLPQDGDI

SEQ ID NO: 8048 - protein, 515 aa, synthetic construct
MKTAIYLRKSRADLEAEARGEGETLAKHRTTLLKIAKEMNLNVLSVREEIVSGESLVKRPEMLALLEEIEDNKYDVVLCMDMDRLGRGGMKEQGIILETFKRSNTKIMTPRKTYDLNDEWDEEYSEFEAFMARKELKIITRRMQRGRVASVEAGNYLGTHAPFGYDIHRLNKRERTLTINSEEASVVRMIFDWYANEDMGANAIRSKLNDLGYKSKLGNEWNPYSILDILKNNVYIGKVTWQKRKEVKRPDAVKRSCARQDKSDWIIADGKHEPIIPESLFEQVQEKLNSRYHIPYNTNGIKNPLAGIIKCAKCGYSMVQRYPKNRKETMDCKHRGCENKSSYTELIEKRLLEALKEWYINYKADFEKHKQDDKLKETQVIQMNEAALRKLEKELVDVQKQKNNLHDLLERGVYTVDMFLERSNVVSDRITEITSTMENLKKEIKTEIKKEKVKKDTIPQVEHVLDLYFKTDDPKKKNSLLKSVLEKAVYKKEKWQRLDDFELVLYPKLPQDGDI

SEQ ID NO: 8049 - protein, 501 aa, synthetic construct
MKPNIKDVAIYLRKSRDESDGKEDVLAKHESLLLEYAKNHNLKYKIYKEIGSSEYIDSRPKMVRLLSDVSQKLYDAVLVVDLDRLSRGDLEEMGRISRVFRDSKTIVITPTKTYDFNNEDQALINNFEMVFANHEFRMIRKRMIRGKQQGTKAGKWTNGRPPFPYVYNRLTKELDVDPDKVKVYELMKKMFLEDMKATYEIAWKLNELGFKTNRNSYWYENTVRRILKNEVYLGKVVYGKTSGSGSKKKLNANGVQIKDRSEWIIAEGSHQPLKTEEEHQRILAILESRRYTPKGTRTNVQVLSKLIYCGKCNRVMSFTGKASGKRYVKTCLTTDRFGYRCHNRSLSVEVIYAQLFLDLERYEQQLLSHEPKEKQGDSSTLQLALQNKHEDLERLEKGIERIKDLFIDEIIDKLEMQKRIEKQKQLMQTKKEEIRSIEQSLAVIENVRTDNDRLHAIRKFKTAWDTEGISKRELNILAKQLINRVEYIREGDNVQMKIQFI

SEQ ID NO: 8050 - protein, 515 aa, synthetic construct
MKTAIYLRKSRADLEAEARGEGETLAKHRSTLLKIAKEMNLNVLSVREEIVSGESLVKRPEMLALLEEIEDNKYDVVLCMDMDRLGRGGMKEQGIILETFKRSNTKIMTPRKTYDLNDEWDEEYSEFEAFMARKELKIITRRMQRGRVASVEAGNYLGTHAPFGYDIHRLNKRERTLTINSEEASVVRMIFDWYANEDMGASAIRNKLNDLGYKSKLGNEWNPYSILDILKNNVYIGKVTWQKRKEVKRPDAVKRSCARQDKSDWIIADGKHEPIIPESLFEQVQEKLNSRYHIPYNTNGIKNPLAGIIKCAKCGYSMVQRYPKNRKETMDCKHRGCENKSSYTELIEKRLLEALKEWYINYKADFEAHKQGDKLKETQVIQMNEAALRKLEKELVDVQKQKNNLHDLLERGVYTVDMFLERSKVISDRINEITSTMENLQKEIKTEIKKEKVKKDTIPQVEHVLDLYFKTDDPKKKNSLLKSVLEKAVYKKEKWQRLDDFELVLYPRLPQDGDI

SEQ ID NO: 8051 - protein, 515 aa, synthetic construct
MYRPQELDVFIYLRKSRKDLEEEKKAIEHGKHYDTLERHRTQLLELAQKEHHNIIDILEEVVSGEYISERPMMQKLLREVETGIADAVLVMDLDRLGRGDMVDQGTIYRVFRYSETFIITPTEVINPNDENQELTFSIKSLIAREELKTIVKRMQRGRRASAKEGKSISRVPPYGYLRDNNLKLYPDPEKSWVIPKIFEYMADGMGRQTIAQELDRLGISPPEGEYWNPSTISSITKNEVYLGHIIWGKIRYTKQNGKYIRKKVPKERWQRHDHAHTPLVSEELFQKANIAHSKRWRPPTIKTKKLSNPLAGILLCKLCGHSMLYQPRKDRPNPQVRCVQPSCKGVQKGASLALVEQRILDGLKQIIESFEIQENMVQKKKSKNNIQLHQKALEKKEQQINDLQKQKNKLHDLLEKGVYDIETFLERQSSIVIRLKSTQEEIKQLEHEIKSTLKREKHINEFVPKIKNVLEAYHATEDVEKKNRLLKSVLEKVTYLRRKSWQRKDEFVVELYTRI

SEQ ID NO: 8052 - protein, 522 aa, synthetic construct
MKLSHILQPNMKAAFYGRHSTDKQDMDMQLNSVMEVIRKYDCIHTHSFLDKAVSARKNKITSRKELENMFEAAKRKEFDFVIVYKSDRLARDPLEHQTIRIVMKTLDIPIIISSTESVYNTDTDLIVQLMEDGFTKYEVDTIIARTRSGLENKAKQGKWLGGKPPFGYTYDKNSEQFIEHTEELCYVKEIFSLYVNGHGFQYIANTLPNGSRRGKDLGKENVKAIVLNPFYCGLLSWRRQTDGKQNARDIWIEAPNHYVKPIISRTTWESCWRIYSEKRNGNMVPKHYKTSFLLQGLLSCEKCQELMKTKNQQTISSTNKQYGGKIYFCTNCKLRIDADLLHDKVVNQTLTDVKISGFHNVYHAIEQKIQYEIQELNNNIQKHQRLFENYTIKLHNTTEELKQRMKNNDDKRFLKSLAIYRLDVQRKLDGVTQQINDFKKQITLKEKVEKSKETWLHTLNEVFQDDVKLQEISDMDKRRFLLPLIQSVSIKENKKRNEYDISLQLRTDFSKRDVKNQISLIL

SEQ ID NO: 8053 - protein, 457 aa, synthetic construct
MRCAIYRRVSTDEQAEKGFSLENQKLRLESFATSQGWEVVEDYVDDGFSGKDTNRPALQRMFSNVDKFDVILVYKLDRFTRSVKDLNEMLETIKENEIAFKSATESIDTTTATGRMILNMMGTTAQWERETISERIKDVFGKLRENGIFSTGHPPYGYRCSGNKSIEIVEEQAEIVRYIYELSKTMGLFKISVELNRKGIKTRRNNKFGQSAVKRILHNPFYCGYMEVNNKWVPIKNEGYIPIISEEEFKTTQKILTKRNKAQTRSRSVSYYPFSGIVLCPECQRAMRGDRAKYGDYYYRYYRCVYGRENINCTNRKRIRAEQVDKAFAEYISGSFENTTIKLDSKDIKSNIEYELKHLDSKIERLSDIYIEGDITKSKYNEKMNSLLNEKEKLKKDLTSCKENVDAEFVRDQINKLESIWHLIDDKTKSESIRSIFDTIKIKQDKNKVTIMDHTLL

SEQ ID NO: 8054 - protein, 515 aa, synthetic construct
MKTAIYLRKSRADLEAEARGEGETLAKHRTTLLKIAKEMNLNVLSVREEIVSGESLVKRPEMLALLEEIEDNKYDVVLCMDMDRLGRGGMKEQGIILETFKRSNTKIMTPRKTYDLNDEWDEEYSEFEAFMARKELKIITRRMQRGRIASVEAGNYLGTHAPFGYDIHRLNKRERTLTINSEEASVVRMIFDWYANEDMGASAIRSKLNDLGYKSKLGNEWNPYSILDILKNNVYIGKVTWQKRKEVKQPDAVKRSCARQDKSDWIIADGKHEPIIPESLFEQVQEKLNSRYHVPYNTNGIKNPLAGIIKCSKCGYSMVQRYPKNRKETMDCKHRGCENKSSYTELIEKRLLEALKEWYINYKADFEKHKQDDKLKETQVIQMNEAALRKLEKELVDVQKQKSNLHDLLERGVYTVDMFLERSNVVSDRITEITSTMENLKKEIKTEIKKEKVKKDTIPQVEHVLDLYFKTDDPKKKNSLLKSVLEKAVYKKEKWQRLDDFELVLYPKLPQDGDI

SEQ ID NO: 8055 - protein, 515 aa, synthetic construct
MKTAIYLRKSRADLEAEARGEGETLAKHRSTLLKIAKEMSLNVLSVREEIVSGESLVKRPEMLALLEEIEDNKYDVVLCMDMDRLGRGGMKEQGIILETFKRSNTKIMTPRKTYDLNDEWDEEYSEFEAFMARKELKIITRRMQRGRIASVEAGNYLGTHAPFGYDIHRLNKRERTLTINSEEASVVRMIFDWYANEDMGASAIRSKLNDLGYKSKLGNEWNPYSILDILKNNVYIGKVTWQKRKEVKQPDAVKRSCARQDKSDWIIADGKHEPIIPESLFEQVQEKLNSRYHVPYNTNGIKNPLAGIIKCSKCGYSMVQRYPKNRKETMDCKHRGCENKSSYTELIEKRLLEALKEWYINYKADFEVHKQGDKLKETQVIQMNEAALRKLEKELVDVQKQKNNLHDLLERGVYTVDIFLERSKAVSDRINEITSTMENLKKEIKTEIKKEKVKKDTIPQVEHVLDLYFKTDDPKKKNSLLKSVLEKAVYRKEKWQRLDDFELVLYPKLPQDGDI

SEQ ID NO: 8056 - protein, 515 aa, synthetic construct
MKTAIYLRKSRADLEAEARGEGETLAKHRTTLLKIAKEMNLNVLSVREEIVSGESLVKRPEMLVLLEEIEDNKYDVVLCMDMDRLGRGGMKEQGIILETFKRSNTKIMTPRKTYDLNDEWDEEYSEFEAFMARKELKIITRRMQRGRVASVEAGNYLGTHAPFGYDIHRLNKRERTLTINSEEASVVRMIFDWYANEDMGANAIRSKLNDLGYKSKLGNEWNPYSILDILKNNVYIGKVTWQKRKEVKRPDAVKRSCARQDKSDWIIADGKHEPIIPESLFEQVQEKLNSRYHIPYNTNGIKNPLAGIIKCAKCGYSMVQRYPKNRKETMDCKHRGCENKSSYTELIEKRLLEALKEWYINYKADFEKHKQDDKLKETQVIQMNEAALRKLEKELVDVQKQKNNLHDLLERGVYTVDMFLERSNVVSDRITEITSTMENLKKEIKTEIKKEKVKKDTIPQVEHVLDLYFKTDDPKKKNSLLKSVLEKAVYKKEKWQRLDDFELVLYPKLPQDGDI

SEQ ID NO: 8057 - protein, 509 aa, synthetic construct
MATGQKKLVAIYVRKSRLKDADAIEIDRQLELLTDYADKNNMEYEVFAEEGSSEDWNRPEFQRMLMDLKRNIYDGVLCTDQDRITRDRTDFGLFVRFMKAEALQFYTLNKTYNFMNDEDVFVTGIQSEMDNHFMRMTKRKLRRGRIQAIQKGVYFGIAPYGYTKDEAKHLLPHPTEAKIVEDIFDMYVNQGLNQAEICEQLTLRGIKTRSGKNFTPRATSLILSNVAYRGIVHYELQGEDAITVEEAHPALVDADTYNKAQEIRAKKRAVPQKSQRGIYTLSKLLVCPSCGQTLSFCNKYVSRSSRKTLDKSQRELYLLNCYSSMSQRAKQEFTGERCKNNATKASRVEEVIFSKLKGHLTDLDEKIEAIIAGDTSFLSSVAKKQQELTLQYNKLEEQKKRVQDGFKAGIYEAEEASEEIKNIKEQQLQINKELQGLEGADAKSVVDKHKKAKAKIEMLLSMDTDANPTKANKLLHDVIDKVYYWKEQSDRDGKPKSFEIRIVYKGEES

SEQ ID NO: 8058 - protein, 501 aa, synthetic construct
MKPNIKEVAIYLRKSRDESDGKEDVLAKHESLLLEYAKNHNLKYRIYKEIGSSEYIDSRPKMVRLLSDVSQKLYDAVLVVDLDRLSRGDLEEMGRISRVFRDSKTIVITPTKTYDFNNEDQALINNFEMVFANHEFRMIRKRMIRGKQQGTKAGKWTNGRPPFPYVYNRLTKELDVDPDKVKVYELMKKMFLEDMKATYEIAWRLNELGFKTNRNSYWYENTVRRILKNEVHLGKVVYGKTSGSGSKKKLNANGVQIKDRSEWIIAEGSHQPLKTEEEHQRILAILESRRYTPKGTRTNVQVLSKLIYCGKCNRVMSFTGKASGKRYVKTCLTTDRFGYRCHNRSLNVEVIYAQLFLDLERYEQQLLGHEPKEKQDDSSTLQLALQNKDEELERLEKGIERIKDLFIDEIIDKLEMQKRIEKHKKLMQTKKEEIRSIEQSLAVIESVRTDNDRINAIREFKKAWNTEGITKRELNTLAKQLIERIEYVREGNNINMKIQFL

SEQ ID NO: 8059 - protein, 515 aa, synthetic construct
MKTAIYLRKSRADLEAEARGEGETLAKHRTTLLKIAKEKKLNVLAVREEIVSGESLVKRPEMLALLEEIEDNKYDVVLCMDMDRLGRGGMKEQGIILETFKRSNTKIMTPRKTYDLNDEWDEEYSEFEAFMARKELKIITRRMQRGRIASVEAGNYLGTHAPYGYDIHRLNKRERTLTINAEEASVVRMIFEWYANEDMGANAIMRKLNELGYKSKLGNDWNPYSILDMLKNNVYIGKVTWQKRKEIKRPDATKRSCARQDKSEWIIADGKHDPIIPESLFEKTQEKLNTRYHVPYNTNGLKNPLAGIIKCGKCGYSMVQRYPKNRKQTMDCKHRGCENKSSYTELIEKCLFEALKEWYINYKADFEKNKQDENTKETQIIQMNEAALRKLEKELVDVQKQKNNLHDLLERGVYTVDMFLERSNVVSNRINEITETMENLRKEIKTEITKEKVKKDTIPQVEHVLDLYFKTDDPQKKNSLLKSVLEKAVYTKEKWQRLDDFKLVLYPKLPQDGDK

SEQ ID NO: 8060 - protein, 515 aa, synthetic construct
MKTAIYLRKSRADLEAEARGEGETLAKHRSTLLKIAKEMNLNVLAVREEIVSGESLVKRPEMLALLEEIEDNKYDVVLCMDMDRLGRGGMKEQGIILETFKRSNTKIMTPRKTYDLNDEWDEEYSEFEAFMARKELKIITRRMQRGRVASVEAGNYLGTHAPFGYDIHRLNKRERTLTINSEEASVVRMIFDWYANEDMGASAIRSKLNDLGYKSKLGNEWNPYSILDILKNNVYIGKVTWQKRKEVKRPDAVKRSCARQDKSDWIIADGKHEPIIPESLFEQVQEKLNSRYHVPYNTNGIKNPLAGIIKCSKCGYSMVQRYPKNRKETMDCKHRGCENKSSYTELIEKRLLEALKEWYINYKADFEKHKQDDRLKETQVIQINEAALRKLEKELLDVQKQKNNLHDLLERGVYTVDMFLERSNVISNRITEITSTMENLKKEIKTEITKEKVKKDTIPQVEHVLDLYFKTDDPKKKNSLLKSVLEKAVYKKEKWQRLDDFELVLYPKLPQDGDI

SEQ ID NO: 8061 - protein, 515 aa, synthetic construct
MKTAIYLRKSRADLEAEARGEGETLAKHRTTLLKIAKEMNLNVLSVREEIVSGESLVKRPEMLALLEEIEDNKYDVVLCMDMDRLGRGGMKEQGIILETFKRSNTKIMTPRKTYDLNDEWDEEYSEFEAFMARKELKIITRRMQRGRVASVEAGNYLGTHAPFGYDIHRLNKRERTLTINPEEASVVRMIFDWYANEDMGANAIRSKLNDLGYKSKLGNEWNPYSILDILKNNVYIGKVTWQKRKEVKRPDAVKRSCARQDKSDWIIADGKHEPIIPESLFEQVQEKLNSRYHIPYNTNGIKNPLAGIIKCSKCGYSMVQRYPKNRKETMDCKHRGCENKSSYTELIEKRLLEALKEWYINYKADFEKHKQDDKLKETQVIQMNEAALRKLEKELVDVQKQKNNLHDLLERGVYTVDMFLERSNVISNRITEITSTMENLKKEIKTEIKKEKVKKDTIPQVEHVLDLYFKTDDPKKKNSLLKSVLEKAVYKKEKWQRLDDFELVLYPKLPQDGDI

SEQ ID NO: 8062 - protein, 515 aa, synthetic construct
MKTAIYLRKSRADLEAEARGEGETLAKHRTTLLKIAKEMNLNILSVREEIVSGESLVKRPEMLALLEEIEDNKYDVVLCMDMDRLGRGGMKEQGIILETFKRSNTKIMTPRKTYDLNDEWDEEYSEFEAFMARKELKIITRRMQRGRVASVEAGNYLGTHAPFGYDIHRLNKRERTLTINSEEASVVRMIFDWYANEDMGANAIRSKLNDLGYKSKLGNEWNPYSILDILKNNVYIGKVTWQKRKEVKRPDAVKRSCARQDKSDWIIADGKHEPIIPESLFEQVQEKLNSRYHVPYNTNGIKNPLAGIIKCSKCGYSMVQRYPKNRKETMDCKHRGCENKSSYTELIEKRLLEALKEWYINYKADFEKHKQDDKLKETQVIQMNEAALRKLEKELVDVQKQKNNLHDLLERGVYTVDMFLERSNVVSDRITEITSMMENLKKEIKIEIKKEKVKKDTIPQVEHVLDLYFKTDDPKKKNSLLKSVLEKAVYKKEKWQRLDDFELVLYPKLPQDGDI

SEQ ID NO: 8063 - protein, 501 aa, synthetic construct
MKPNIKEVAIYLRKSRDESDGKEDVLAKHESLLLEYVKNHNLKYEIYKEIGSSEYIDSRPKMVRLLSDVSQKLYDAVLVVDLDRLSRGDLEEMGRISRVFRDSKTLVLTPSKSYDFNNEDQVLINNFEMVFANHEYRMIKKRMLRGKLQGTKAGKWTNGRPPFPYVYNRLTKELDVDPDKVKVYELMKKMFLEDMKATYEIAWKLNELGFKTNRNSYWYENTVRRILKNEVHLGKVVYGKTSGSGSKKKLNANGVQIKDRSEWIIAEGSHQPLKTEEEHQRILAILESRRYTPKGTRTNVQVLSKLIYCGKCNRVMSFTGKTSGKRYVKTCLTTDRFGYRCHNRSLNVEVIYAQLFLDLERYEQQLLSHEPKEKQGDSSTLQLALQNKHEDLERLEKGIERIKDLFIDEVIDKLEMKKRIEKQQQLMQTKKEEIRSIEQSLAVIENVRTEDDRLHAIWEFKKAWNTEGISKRELNTLAKQLIDRIEYTREGNNVQINIYYL

SEQ ID NO: 8064 - protein, 491 aa, synthetic construct
MGLAAIYLRLSRNEEQLNIDEILLNHRNALTKLAKQQKLTYDIYQEISSGVNMERPELNLLLSRLDDYDALLVMDIDRISRDNAHAEEIKKMLIIHDIKILTPQGAIDLSQESNEMLFSFQAMMANFEYKQIRKRLGRGRLAAAEQGKWTMSNRVPLGYKKNKEKRLEVVEDEAKIIRFIFQKTLERVSANEIAKQLDILGWRSRQGKVLTSAHISNMRRNVVYYGVVKAGRKVNGRVVDEVFVEDAHEPIVSKQMFLEVQKILEENTTGNFFNKLKATRKLQNLIYCNCCKRKRYIQCDGNGVDYIKSCIYKVDNNKCRDRGYKYEPIEQFVLQKVKEKKPDFEQELQMLKSLDTTEVEKKLSIQRESLEKQINRFNKRQRNLKEMRMDGEISKAEFYEMRDENEEQIKQVKQQMELIDIKLENLSNTDEEQARLQDAIKTLDKLEELKAESCNTFLKKFIKKIWFSSNTEANHDTTRPKEDATIEIEWL

SEQ ID NO: 8065 - protein, 515 aa, synthetic construct
MKTAIYLRKSRADLEAEARGEGETLAKHRTTLLKIAKELNLDVLSVREEIVSGESLVKRPEMLALLEEIEDNKYDVVLCMDMDRLGRGGMKEQGIILETFKRSNTKIMTPRKTYDLNDEWDEEYSEFEAFMARKELKIITRRMQRGRIASVEAGNYLGTHAPYGYDILRLNKRERTLTINSEEASVVRMIFEWYANEDMGASVITNKLNQLGYKSKLGNDWNPYSILDMLKNNVYIGKVTWQKRKEVKRPDATKRSCTRQDKSEWIIADGKHDPIIPESLFEKAQEKLNTRYHVPYNTNGLKNPLAGIIRCGKCGYSMVQRYPKNRKHTMDCKHRGCENKSSYTELIEKRLLEALKEWYINYKADFEKNKQDESTKETQIIQMNEAALRKLEKELVDVQKQKNNLHDLLERGVYTVDMFLERSNVVSNRINEITETMENLRKEIKTEITKEKVKKDTIPQVEHVLDLYFKTDDPQKKNSLLKSVLEKAVYTKEKWQRLDDFKLVLYPKLPQGDDK

SEQ ID NO: 8066 - protein, 501 aa, synthetic construct
MKTNIKDVAIYLRKSRDDSDGQEDVLAKHESLLLEYAKSHNFKYKIYKEIGSSEYIDLRPEMVRLLTDVEQELYDAVLVVDLDRLSRGDLEEMGRISRVFRNSKTLVLTPSKTYDFNNEDQALINNFEMVFANHEFRMINKRMIRGKKQGAKSGRWTNGTPPFPYVYNRLTKELDVDPDKVKVYELMKKMFLDDMKATYEIAWKLNELGFKTNRNSYWYENTVRRILKNEVHLGKVVYGKTSGSGSKKKPSANGVQIKDRSEWIIAEGSHQPLKTEEEHQRILAILESRRYTPKGTRTNVQVLSKLIYCGKCNRVMSFTGKASGKKYVKTCLTTDHFGNRCHNRCLNVEVIYAQLFLDLEQYEQQLLSHEPKEKQVDSSTLQLALQNKYEELERLEKGINRIKDLFIDEVIDKLEMKKRIEKHQQLMQTKKEEIRSIEQSLAVIENVRTDDDRLHAIREFKKAWDTEGISERELNILAKQIIDRIEYIRQGNNVKINIKFL

SEQ ID NO: 8067 - protein, 477 aa, synthetic construct
MRCAIYTRVSTEEQAVEGYSISAQKKKLKAYCDAQDWDVVGYYVDEGISAKNTNRPELKRMIEHIKKGLIDCVLVYRLDRLTRSVLDLYTLLDIFEKYDCKFKSATEVYDTTTAIGRLFITIIAALAQWERENIGERVRVGQQEKVRQGKYTSGRKPYGYNADHKKGTLQIIEEEAKVVRSIFNDYLKGHSAMRISKKLNTLGTPGRDYWNEKAVMYIIENPLYVGTLRWRKETEHYFEVPNSVPAIIEKEIFDSVQRLRESRRESHSRGQYGSYIFSGIIKCPRCGGPLIGNYVVSKKRDGAVTKYKQYFCRGRRLSVCDMGSMSERKLEKVIIPHILSFYIDTTDEDVAVGQNNIEDEITQIKNELKIIEKRRKKWQYAWANDHLKDDEFTELMQEENDREKSLTEELYRLKPTENKKLKNEELKAILKDIKLNWMNLDDEEKKMFMQIILKKIVVERSDKWHGYELKIVEMEFN

SEQ ID NO: 8068 - protein, 515 aa, synthetic construct
MKTAIYLRKSRADLEAEARGEGETLAKHRTTLLKIAKELNLDVLSVREEIVSGESLVKRPEMLALLEEIEDNKYDVVLCMDMDRLGRGGMKEQGIILETFKRSNTKIMTPRKTYDLNDEWDEEYSEFEAFMARKELKIITRRMQRGRIASVEAGNYLGTHAPYGYDILRLNKRERTLTINSEEASVVRMIFEWYANEDMGASVITNKLNQLGYKSKLGNDWNPYSVLDMLKNNIYIGKVTWQKRKEVKRPDATKRSCARQDKSEWIIADGKHDPIISKSLFEKAQEKLNMRYHVPYNTNGLKNPLAGIIRCGKCGYSMVQRYPKNRKKTMDCKHRGCENKSSYTELIERRLLEALKEWYINYKADFAKNNQDSLSKEKQVIKINQAALRKLEKELLDVQKQKNNLHDLLERGVYTVDMFLERSNVVSDRMNEITEMMENLQKEINTEIKKERVKKDTIPQVEHVLDLYFKTDNPKKKNSLLKSVLEKAVYTKEKWQRLDDFKLVLYPRLPKDGDK

SEQ ID NO: 8069 - protein, 515 aa, synthetic construct
MKTAIYLRKSRADLEAEARGEGETLAKHRSTLLKIAKEMNLNILSVREEIVSGESLVKRPEMLALLEEIEDNKYDVVLCMDMDRLGRGGMKEQGIILETFKRSNTKIMTPRKTYDLNDEWDEEYSEFEAFMARKELKIITRRMQRGRVASVEAGNYLGTHAPFGYDIHRLNKRERTLTINSEEASVVRMIFDWYANEDMGANAIRSKLNDLGYKSKLGNEWNPYSILDILKNNVYIGKVTWQKRKEVKRPDAVKRSCARQDKSDWIIADGKHEPIIPESLFEQVQEKLNSRYHVPYNTNGIKNPLAGIIKCSKCGYSMVQRYPKNRKETMDCKHRGCENKSSYTELIEKRLLEALKEWYINYKADFEKHKQGDKLKETQVIQMNEAALRKLEKELVDVQKQKNNLHDLLERGVYTVDMFLERSNVVSDRITEITSTMENLKKEIKTEIKKEKVKKDTIPQVEHVLDLYFKTDDPKKKNSLLKSVLEKAVYKKEKWQRLDDFELVLYPKLPQDGDI

SEQ ID NO: 8070 - protein, 515 aa, synthetic construct
MKTAIYLRKSRADLEAEARGEGETLAKHRTTLLKIAKEMNLNVLAVREEIVSGESLVKRPEMLALLEEIEDNKYDVVLCMDMDRLGRGGMKEQGIILETFKRSNTKIMTPRKTYDLNDEWDEEYSEFEAFMARKELKIITRRMQRGRVASVEAGNYLGTHAPFGYDIHRLNKRERTLTINSEEASVVRMIFDWYANEDMGANAIRSKLNDLGYKSKLGNEWNPYSILDILKNNVYIGKVTWQKRKEVKRPDSVKRSCARQDKSEWIIADGKHEPIIPESLFEQVQEKLNSRYHIPYNTNGIKNPLAGIIKCSKCGYSMVQRYPKNRKETMDCKHRGCENKSSYTELIEKRLLEALKEWYINYKADFEKHKQDDKLKETQVIQMNETALRKLEKELVDVQKQKSNLHDLLERGVYTVDMFLERSNVVSDRITEITSTMENLKKEIKTEIKKEKVKKDTIPQVEHVLDLYFKTDDPKKKNSLLKSVLEKAVYKKEKWQRLDDFELVLYPKLPQDGDI

SEQ ID NO: 8071 - protein, 515 aa, synthetic construct
MKTAIYLRKSRADLEAEARGEGETLAKHRTTLLKIAKEMNLNVLAVREEIVSGESLVKRPEMLALLEEIEDNKYDVVLCMDMDRLGRGGMKEQGIILETFKRSNTKIMTPRKTYDLNDEWDEEYSEFEAFMARKELKIITRRMQRGRIASVEAGNYLGTHAPFGYDIHRLNKRERTLTINSEEASVIRMIFDWYANEDMGASTIRNKLNDLGYKSKLGNDWNPYSILDILKNNVYVGKVTWQKRKEEKRPDAVKRSRARNDKSDWIIADGKHDPIIPESLFEQVQEKLNSRYHVPYNTNGIKNPLAGIIKCSKCGYSMVQRYPKNRKETMDCKHRGCENKSSYTELIEKRLLEALKEWYINYKADFEAHKQDDKLKETQVIQMNEAALRKLEKELVDVQKQKNNLHDLLERGVYTVDIFLERSKAVSDRINEITSTMENLKKEIKTEIKKEKVKKDTIPQVEHVLDLYFKTDDPKKKNSLLKSVLEKAVYRKEKWQRLDDFELVLYPKLPQDGDI

SEQ ID NO: 8072 - protein, 515 aa, synthetic construct
MKTAIYLRKSRADLEAEARGEGETLAKHRTTLLKIAKEMNLNVLAVREEIVSGESLVKRPEMLALLEEIEDNKYDVVLCMDMDRLGRGGMKEQGIILETFKRSNTKIMTPRKTYDLNDEWDEEYSEFEAFMARKELKIITRRMQRGRVASVEAGNYLGTHAPFGYDIHRLNKRERTLTINSEEASVVRMIFDWYANEDMGASAIRNKLNELGYKSKLGNEWNHYSVLDILKNNVYIGKVTWQKRKEVKRPDAVKRSCARQDKSDWIIADGKHEPIIPESLFEQVQEKLNSRYHIPYNTNGIKNPLAGIIKCAKCGYSMVQRYPKNRKETMDCKHRGCENKSSYTELIEKRLLEALKEWYINYKADFEKHKQDDKLKETQVIQMNEAALRKLEKELVDVQKQKSNLHDLLERGVYTVDMFLERSNVVSDRITEITSTMENLKKEIKTEIKKEKVKKDTIPQVEHVLDLYFKTDDPKKKNSLLKSVLEKAVYKKEKWQRLDDFELVLYPKLPQDGDI

SEQ ID NO: 8073 - protein, 515 aa, synthetic construct
MKTAIYLRKSRADLEAEARGEGETLAKHRSTLLKIAKEMNLNVLSVREEIVSGESLVKRPEMLALLEEIEDKKYDVVLCMDMDRLGRGGMKEQGIILETFKRSNTKIMTPRKTYDLNDEWDEEYSEFEAFMARKELKIITRRMQRGRIASVEAGNYLGTHAPYGYDIHRLNKRERTLTINSEEASVVRMIFDWYANEDMGANAIRSKLNDLGYKSKLGNEWNPYSILDILKNNVYIGKVTWQKRKEVKQPDAVKRSCARQDKSDWIIADGKHEPIIPESLFEQVQEKLNSRYHVPYNTNGIKNPLAGIIKCSKCGYSMVQRYPKNRKETMDCKHRGCENKSSYTELIEKRLLEALKEWYINYKADFEKHKQDDKLKETQVIQMNEAALRKLEKELVDVQKQKNNLHDLLERGVYTVDMFLERSNVVSDRITEITSTMENLKKEIKTEIKKEKVKKDTIPQVENVLDLYFKTDDPKKKNSLLKSVLEKAVYKKEKWQRLDDFELVLYPKLPQDGDI

SEQ ID NO: 8074 - protein, 515 aa, synthetic construct
MKTAIYLRKSRADLEAEARGEGETLAKHRTTLLKIAKEMNLNVLSVREEIVSGESLVKRPEMLALLEEIEDNKYDVVLCMDMDRLGRGGMKEQGIILETFKRSNTKIMTPRKTYDLNDEWDEEYSEFEAFMARKELKIITRRMQRGRIASVEAGNYLGTHAPYGYDIHRLNKRERTLTINPEEASVVRMIFDWYAHEDMGANAIRSKLNDLGYKSKLGNEWNPYSILDILKNNVYIGKVTWQKRKEVKRPDAVKRSCARQDKSDWIIADGKHEPIIPESLFEQVQEKLNSRYHIPYNTNGIKNPLAGIIKCAKCGYSMVQRYPKNRKETMDCKHRGCENKSSYTELIEKRLLEALKEWYINYKADFEKHKQDDKLKETQVIQMNEAALRKLEKELVDVQKQKNNLHDLLERGVYTVDMFLERSNVVSNRITEITSTMENLKKEIKTEIKKEKVKKDTIPQVENVLDLYFKTDNPKKKNSLLKSVLEKAVYKKEKWQRLDDFELVLYPKLPQDGDI

SEQ ID NO: 8075 - protein, 477 aa, synthetic construct
MRCAIYARVSTEEQAVEGYSISAQKKKLTAYCEAQDWDVVGYYVDEGISAKNTNRPELIRMIDHIKKGLIDCVLVYRLDRLTRSVLDLYNLLDVFEKYDCKFKSATEVYDTTTAIGRLFITIIAALAQWERENIGERVRVGQQEKVRQGKYTSGRKPYGYNADHKEGVLTVIEEEAKVVRSVFNDYLKGHSAQRICKKLNTIGTPGRNYWNEKAILYILENPLYVGTLRWRKETEHYFEIPNSVPPIIDKELFDNVQKLRESRRESHPRSAYGNYIFSGIIKCPRCGRSLVGNYVTSKKKDGTVTKYKQYFCRGRKLNVCNMGSMSERKLEKVIIPYILSLHIHATDEDVLTGQSNTEDEIIQIKNELKVIEKRRKKWQYAWANEHLKDEEFTELMQEESDREKVLTEELYKLKPAENKKLKNDELKEILNDMKLNWNNLNDEEKKILMQIILKRIVVERSDEWQAYELKIVEMEFN

SEQ ID NO: 8076 - protein, 515 aa, synthetic construct
MKTALYLRKSRADLEAEARGEGETLAKHRSTLLKIAKEMNLNVLSVREEIVSGESLVKRPEMLALLEEIEDKKYDVVLCMDMDRLGRGGMKEQGIILETFKRSNTKIMTPRKTYDLNDEWDEEYSEFEAFMARKELKIITRRMQRGRIASVEAGNYLGTHAPYGYDIHRLNKRERTLTINSEEASVVRMIFDWYANEDMGANAIRSKLNDLGYKSKLGNEWNPYSILDILKNNVYIGKVTWQKRKEVKQPDAVKRSCARQDKSDWIIADGKHEPIIPESLFEQVQEKLNSRYHVPYNTNGIKNPLAGIIKCSKCGYSMVQRYPKNRKETMDCKHRGCENKSSYTELIEKRLLEALKEWYINYKADFEKHKQDDKLKETQVIQMNEAALRKLEKELVDVQKQKNNLHDLLERGVYTVDMFLERSNVVSDRITEITSTMENLKKEIKTEIKKERVKKDTIPQVEHVLDLYFKTDDPKKKNSLLKSVLEKAVYKKEKWQRLDDFELVLYPKLPQDGDI

SEQ ID NO: 8077 - protein, 515 aa, synthetic construct
MKTAIYLRKSRADLEAEARGEGETLAKHRTTLLKIAKEMNLNVLAVREEIVSGESLVKRPEMLALLEEIEDNKYDVVLCMDMDRLGRGGMKEQGIILETFKRSNTKIMTPRKTYDLNDEWDEEYSEFEAFMARKELKIITRRMQRGRVASVEAGNYLGTHAPFGYDIHRLNKRERTLTINPEEASVVRMIFDWYAHEDMGANAIRSKLNDLGYKSKLGNEWNPYSILDILKNNVYIGKVTWQKRKEVKRPDAVKRSCARQDKSDWIIADGKHEPIIPESLFEQVQEKLNSRYHIPYNTNGIKNPLAGIIKCSKCGYSMVQRYPKNRKETMDCKHRGCENKSSYTELIEKRLLEALKEWYINYKADFEKHKQDDKLKETQVIQMNEAALRKLEKELVDVQKQKNNLHDLLERGVYTVDMFLERSNVVCDRITEITSTMENLKKEIKTEIKKEKVKKDTIPQVEHVLDLYFKTDDPKKKNSLLKSVLEKAVYKKEKWQRLDDFELVLYPKLPQDGDI

SEQ ID NO: 8078 - protein, 450 aa, synthetic construct
MTKAAIYIRVSTQDQVENYSIEVQRERIRAFCKAKNWDVYDEYIDGGYSGSNLERPGIKKLLNDLKNIDVVVVYKLDRLSRSQRDTLELIEEHFLKSNVDFVSITETLDTSTPFGKAMIGILSVFAQLERETIAERMRMGHIKRAENGLRGNGGDYDPSGYTRENGYLIIKTDEAKHIKRVFDLYEQYHSITRVQEILKEEGYPIWRFRRYRDILSNILYIGRVTFAGKEYEGQHEPIISSEQFKRVQVLLERHKGHNAHKAKQSLLSGLITCSCCGENYVAYSTGKSKDVESKRYYYYICRAKRFPAEYEERCMNKTWSRKKLEEVVISELKSLTEEKKQTHKKEKKINYAKLIKDIDKKMERLLDLFMNTTNISRNLLEQQMEKLNLEKEKLLLKQQRSEESLSREVTLTAIDDLFETLEFKEKQIIINNFIEQIYINNENVEIIWRF

SEQ ID NO: 8079 - protein, 457 aa, synthetic construct
MRCAIYRRVSTDEQAEKGFSLENQKLRLESFATSQGWEVVEDYVDDGFSGKDTNRPALQRMFSNVDKFDVILVYKLDRFTRSVKDLNEMLETIKENEIAFKSATESIDTTTATGRMILNMMGTTAQWERETISERIKDVFGKLRENGIFSTGHPPYGYRCSGNKSIEIVEEQAEIVRYIYELSKTMGLFKISVELNRKGIKTRRNNKFGQSAVKRILHNPFYCGYMEVNNKWVPIKNEGYIPIISEEEFKTTQKILTKRNKAQTRSRSVSYYPFSGIVLCPECQRAMRGDRAKYGDYYYRYYRCVYGRENINCTNRKRIRAEQVDKAFAEYISGSFENTTIKLDSKDIKSNIEYELKHLDSKIERLSDIYIEGDITKSKYNEKMNSLLNEKEKLKKDLTSCKENVDAEFVRDQINKLESIWDLIDDKTKSESIRSIFDTIKIKQDKNKVTIMDHTLL

SEQ ID NO: 8080 - protein, 515 aa, synthetic construct
MKTAIYLRKSRADLEAEARGEGETLAKHRTTLLKIAKEMNLNVLAVREEIVSGESLVKRPEMLALLEEIEDNKYDVVLCMDMDRLGRGGMKEQGIILETFKRSNTKIMTPRKTYDLNDEWDEEYSEFEAFMARKELKIITRRMQRGRIASVEAGNYLGTHAPFGYDIHRLNKRERTLTINPEEASVVRMIFDWYANEDMGANAIRSKLNDLGYKSKLGNEWNPYSILDILKNNVYIGKVTWQKRKEVKRPDAVKRSCARQDKSDWIIADGKHEPIIPESLFEQVQEKLNSRYHVPYNTNGIKNPLAGIIKCRKCGYSMVQRYPKNRKETMDCKHRGCENKSSYTELIEKRLLEALKEWYINYKADFEKHKQDDKLKETQVIQMNEAALRKLEKELVDVQKQKNNLHDLLERGIYTVDMFLERSNVVSDRITEITSTMENLKKEIKTEIKKEKVKKDTIPQVEHVLDLYFKTDDPKKKNSLLKSVLEKAVYKKEKWQRLDDFELVLYPKLPQDGDI

SEQ ID NO: 8081 - protein, 515 aa, synthetic construct
MKTAIYLRKSRADLEAEARGEGETLAKHRSTLLKIAKEMNLNVLAVREEIVSGESLVKRPEMLALLEEIEDNKYDVVLCMDMDRLGRGGMKEQGIILETFKRSNTKIMTPRKTYDLNDEWDEEYSEFEAFMARKELKIITRRMQRGRVASVEAGNYLGTHAPYGYDIHRLNKRERTLTINSEEASVVRMIFEWYANENMGANAIMRKLNELGYKSKLGNDWNPYSILDMLKNHVYIGKVTWQKRKEVKRPDATKRSCARQDKSEWIIADGKHDPIIPESLFEKVQEKLSTRYHVPYNTNGLTNPLAGIIKCGKCRYSMVQRYPKNRKHTMDCKHRGCENKSSYTELIEKRLLEALKEWYINYKADFEKNKQDKSTKEIQIIQMNEAALRKLEKELVDVQKQKNNLHDLLERGVYTVDMFLERSNVVSDRINEITETMENLRKEIKTEITKEKVKKDTIPQVEHVLDLYFKTDDPQKKNSLLKSVLEKAVYTKEKWQRLDDFKLVLYPKLPQDGDK

SEQ ID NO: 8082 - protein, 482 aa, synthetic construct
MKYAVYVRVSTDRDEQESSVENQIDICRYWLEKNGYEWNQSSVYFDDGISGTAWLERHAMQLILEKARKKELDTVVFKSIHRLARDLKDALEIKEILLGHGIRLVTIEENYDSLYEGKNDMKFEMYAMFASQLPKTLSVSISAALTAKVRRGEHTGKIPFGYDRVDKKLVINQDEATIVKKIFDLYEKGTGYKTIAKYLNEQGTRTKTGNIWSAPTVKSILVNSLYKGESIMNKYSTVKIDGRKKRIKNPMEKWTVLENHHPEIISNTQWSRVNNVDKLRQNKTKVDKRNEFRGMMYCAHCGTAIRAVYSGKYTKGEKREWIYMKCARYKRYGTCVNHEPIQYHDIRQVILSMLKEKEKYVDIQLSPQNGDRNQEKIKTIKREIKQLKSKKDKLIELYIEELIGREVFSKRDARLDNDIKEKELQLIKLNDIKAQTEEKKEVKKAFSLLHEKQDLYEVFNILINRITLYQNKKLQIEYTFGV

SEQ ID NO: 8083 - protein, 515 aa, synthetic construct
MKTAIYLRKSRADLEAEARGEGETLAKHRTTLLKIAKELNLDVLSVREEIVSGESLVKRPEMLALLEEIEDNKYDVVLCMDMDRLGRGGMKEQGIILETFKRSNTKIMTPRKTYDLNDEWDEEYSEFEAFMARKELKIITRRMQRGRIASVEAGNYLGTHAPYGYDILRLNKRERTLTINSEEASVVRMIFEWYANEDMGASVITNKLNQLGYKSKLGNDWNPYSVLDMLKNNIYIGKVTWQKRKEVKRPDATKRSCARQDKSEWIIADGKHDPIISKSLFEKAQEKLNMRYHVPYNTNGLKNPLAGVIRCGKCGYSMVQRYPKNRKKTMDCKHRGCENKSSYTELIERRLLEALKEWYINYKADFAKNNQDSLSKEKQVIKINQAALRKLEKELLDVQKQKNNLHDLLERGVYTVDMFLERSNVVSDRMNEITEMMENLQKEINTEIKKERVKKDTIPQVEHVLDLYFKTDNPKKKNSLLKSVLEKAVYTKEKWQRLDDFKLVLYPRLPKDGDK

SEQ ID NO: 8084 - protein, 515 aa, synthetic construct
MKTAIYLRKSRADLEAEARGEGETLAKHRTTLLKIAKEMNLNVLAVREEIVSGESLVKRPEMLALLEEIEDNKYDVVLCMDMDRLGRGGMKEQGIILETFKRSNTKIMTPRKTYDLNDEWDEEYSEFEAFMARKELKIITRRMQRGRVASVEAGNYLGTHAPFGYDIHRLNKRERTLTINPEEASVVRMIFDWYANEDMGANAIRSKLNDLGYKSKLGNEWNPYSILDILKNNVYIGKVTWQKRKEVKRPDAVKRSCARQDKSDWIIADGKHEPIIPESLFEQVQEKLNSRYHIPYNTNGIKNPLAGIIKCSKCGYSMVQRYPKNRKETMDCKHRGCENKSSYTELIEKRLLEALKEWYINYKADFEKHKQDDKLKETQVIQINEAALRKLEKELLDVQKQKNNLHDLLERGVYTVDMFLERSNVISDRITEITSTMENLKKEIKTEIKKEKVKKDTIPQVEHVLDLYFKTDDPKKKNSLLKSVLEKAVYKKEKWQRLDDFELVLYPKLPQDGDI

SEQ ID NO: 8085 - protein, 515 aa, synthetic construct
MKTAIYLRKSRADLEAEARGEGETLAKHRSTLLKIAKEKNLNVLTVREEIVSGESLVKRPEMLALLEEIEDNKYDVVLCMDMDRLGRGGMKEQGIILETFKRSNTKIMTPRKTYDLNDEWDEEYSEFEAFMARKELKIITRRMQRGRIASVEAGNYLGTHAPYGYDIHRLNKRERTLTINLEEASVVRMIFEWYANEDMGANAIMRKLNELGYKSKLGNDWNPYSILDMLKNNVYIGKVTWQKRKEVKRPDATKRSCTRQDKSEWIIADGKHDPIIPESLFEKAQDKLNTRYHVPYNTNGLKNPLAGIVRCGKCGYSMVQRYPKNRKHTMDCKHRGCENKSSYTELIEKRLLEALKEWYINYKADFEKNKQDESTKETQIIQMNEAALRKLEKELVDVQKQKNNLHDLLERGVYTVDMFLERSNVVSNRINEITETMENLRKEIKTEITKEKVKKDTIPQVEHVLDLYFKTDDPKKKNSLLKSVLEKAVYTKEKWQRLDDFKLVLYPKLPQDDDK

SEQ ID NO: 8086 - protein, 515 aa, synthetic construct
MKTAIYLRKSRADLEAEARGEGETLAKHRTTLLKIAKEMNLNVLTVREEIVSGESLVKRPEMLALLEEIEDNKYDVVLCMDMDRLGRGGMKEQGIILETFKRSNTKIMTPRKTYDLNDEWDEEYSEFEAFMARKELKIITRRMQRGRVASVEAGNYLGTHAPFGYDIHRLNKRERTLTINSEEASVVRMIFDWYANEDMGANAIRSKLNDLGYKSKLGNEWNPYSILDILKNNIYIGKVTWQKRKEVKRPDAVKRSCARQDKSDWIIADGKHEPIIPESLFEQVQDKLNSRYHVPYNTNGIKNPLAGIIKCSKCGYSMVQRYPKNRKETMDCKHRGCENKSSYTELIEKRLLEALKEWYINYKADFEKHKQDDKLKETQVIQMNEAALRKLEKELMDVQKQKNNLHDLLERGVYTVDMFLERSNVVSDRITEITSTMENLKKEIKTEIKKEKVKKDTIPQVEHVLDLYFKTDDPKKKNSLLKSVLEKAVYKKEKWQRLDDFELVLYPKLPQDGDI

SEQ ID NO: 8087 - protein, 515 aa, synthetic construct
MKTAIYLRKSRADLEAEARGEGETLAKHRTTLLKIAKEMNLNVLAVREEIVSGESLVKRPEMLALLEEIEDNKYDVVLCMDMDRLGRGGMKEQGIILETFKRSNTKIMTPRKTYDLNDEWDEEYSEFEAFMARKELKIITRRMQRGRVASVEAGNYLGTHAPFGYDIHRLNKRERTLTINPEEASVVRMIFDWYANEDMGANAIRSKLNDLGYKSKLGNEWNPYSILDILKNNVYIGKVTWQKRKEVKQPDAVKRSCARQDKSDWIIADGKHEPIIPESLFEQAQEKLNSRYHVPYNTNGIRNPLAGIIKCSKCGYSMVQRYPKNRKETMDCKHRGCENKSSYTELIEKRLIAALKEWYINYKADFEKHKQGNKLKETQVIQMNEAALRKLEKELVDVQKQKNNLHDLLERGVYTVDMFLERSNVVSDRITEITSTMENLKKEIKTEIKKEKVKKDTIPQVEHVLDLYFKTDDPKKKNSLLKSVLEKAVYKKEKWQRLDDFELVLYPKLPQDGDI

SEQ ID NO: 8088 - protein, 515 aa, synthetic construct
MKTAIYLRKSRADLEAEARGEGETLAKHRSTLLKIAKEKNLNVLTVREEIVSGESLVKRPEMLALLEEIEDNKYDVVLCMDMDRLGRGGMKEQGIILETFKRSNTKIMTPRKTYDLNDEWDEEYSEFEAFMARKELKIITRRMQRGRIASVEAGNYLGTHAPYGYDIHRLNKRERTLTINLEEASVVRMIFEWYAHEDMGANAIMRKLNELGYKSKLGNDWNPYSILDMLKNNVYIGKVTWQKRKEVKRPDATKRSCTRQDKSEWIIADGKHDPIIPESLFEKAQEKLNTRYHVPYNTNGLKNPLAGIVRCGKCGYSMVQRYPKNRKHTMDCKHRGCENKSSYTELIEKRLLEALKEWYINYKADFEKNKQDESTKETQIIQMNEAALRKLEKELVDVQKQKNNLHDLLERGVYTVDMFLERSNVVSNRINEITETMENLRKEIKTEITKEKVKKDTIPQVEHVLDLYFKTDDPKKKNSLLKSVLEKAVYTKEKWQRLDDFKLVLYPKLPQDDDK

SEQ ID NO: 8089 - protein, 477 aa, synthetic construct
MRCAIYARVSTEEQAVEGYSISAQKKKLKAYCDAQDWDVVGYYVDEGISAKNTNRPELKRMIEHIKKGLIDCVLVYRLDRLTRSVLDLYTLLDIFEKYDCKFKSATEVYDTTTAIGRLFITIIAALAQWERENIGERVRVGQQEKVRQGKYTSGRKPYGYNADHKKGTLQIIEEEAKVVRSIFNDYLKGHSAMRISKKLNTLGTPGRDYWNEKAVMYIIENPLYVGTLRWRKETEHYFEVPNSVPAIIEKEIFDSVQKLRESRRESHSRSQYGSYIFSGIIKCPRCGRPLIGNYVVSKKQDGTVTKYKQYFCRGRRLSVCDMGSMSERKLEKVIIPHILSFYIDATDADVAAGQSNIEDEITQIKNELKIIEKRRKKWQYAWANDHLRDDEFTELMQEETDREKTLTEELYKLKPTENKKLKNEELKAILKDIKLNWLNLNDEEKKMFMQITLKKIVVERSDKWHGYELKIVEIEFN

SEQ ID NO: 8090 - protein, 487 aa, synthetic construct
MKYAVYVRVSTDKDEQVSSIQNQIEICRYWIEKNGFEWDENSIYKDEAVSGTAWLERRAMQLILGKARKKELDTVVFKSIHRLGRDLRDALEIKEILLGHGVRLVTIEEGYDSYYEGKNDLKFEMYAMFASQLPKTLSVSISAALAAKVRRGEYTGGTVPYGYKIVDKKYVINQEEAEIVREMYELYDNGLGYLRISNALNDVGKYKRSGKLWTYSAVKLIITNPMYKGDYVMGRSTEVKVDGRKKRIQEPREKWVVFENHHPAIIERSLWDKINNPKINKKIKRRVAVTNELRGIARCIHCGSPFVLHTYKYKNKEGEELNYGYLTCGTYKLTGGRGCVKHSGLRYERLRSLVLRKLKEKERDLEKVFKLNDKDKHQEKQKKLRKEKKELEIKRERLLDLYLDGGSIDKATFTKRDANFAKNIKEKELEILKLDDVKALIVEQQKVKDAFKLLEDSENLYPVFKKLIARIDISQNGAVDIRYRFEE

SEQ ID NO: 8091 - protein, 515 aa, synthetic construct
MKTAIYLRKSRADLEAEARGEGETLAKHRTTLLKIAKEMNLNVLAVREEIVSGESLVKRPEMLALLEEIEDNKYDVVLCMDMDRLGRGGMKEQGIILETFKRSNTKIMTPRKTYDLNDEWDEEYSEFEAFMARKELKIITRRMQRGRVASVEAGNYLGTHAPFGYDIHRLNKRERTLTINSEEASVVRMIFDWYANEDMGANAIRSKLNDLGYKSKLGNEWNPYSILDILKNNVYIGKVTWQKRKEVKRPDAVKRSCARQDKSDWIIADGKHEPIIPESLFEQVQEKLNSRYHIPYNTNGIKNPLAGIIKCAKCGYSMVQRYPKNRKETMDCKHRGCENKSSYTELIEKRLLEALKEWYINYKADFEKHKQDDKLKETQVIQMNEAALRKLEKELVDVQKQKNNLHDLLERGVYTVDMFLERSNVVSDRITEITSTMENLKKEIKTEIKKEKVKKDTIPQVEHVLDLYFKTDDPKKKNSLLKSVLEKAVYKKEKWQRLDDFELVLYPKLPQDGDI

SEQ ID NO: 8092 - protein, 546 aa, synthetic construct
MIESMTTKTVAIYARVSTIEQAEEGYSIDEQIRVLNKFCEREGYLVYDEYVDRGISGKNISGRPAIQRLLLDAEQKKFEVVLVWKMNRLARKSLDLMNIVEKLDSKNIAFRSYTERYETETSTGKLQFQLMAAIAEYERNNIAENVKMGMIARAKEGRWNGGQVLGYDVVEISSDNRKRKDTHLVINEREANTVQLIFQMYSSGHGYKSIANCINKKGYRTKKGKTFSLNAIKIIVTNPVYAGYIRYNVRKDWNEKRRNNINPNPIIQKGEHEPIISEEVWQIAQNVYQSRSCKPNRIHDGEFPLTGIMRCPVCGAGMVIGRTTNKLKDGTKRVLEYYVCGACKNKGTLVCRSNGVRTEYADAFTLGKLQRLMHSDKLIKELVKSVNSRNGKIFAPLQKEFDMYAKQMDKAEQKLLKTFDAYTDELISKAMYVEKAKRLEGQIQELKELMEPLRKQIKGNTVKIVSYEMIKGVLLNFSKAFQNALTREQRKRLLHLLIHKITINEDREIESIQLKLNNEVLKELKIGVDDSSSDESSTSFSVLIAI

SEQ ID NO: 8093 - protein, 522 aa, synthetic construct
MDHNKRKIAIYVRVSTEEQANEGFSLRAQEDCLREYAKNKGYEVYDVYIDDGYSGKNYNRPEIQRLFKDLYQDKFTGILVKSVDRISRRVSDVTKLIDDVLAPRKCYVLVSDNNLDSSTTGGTAFIQLLATFAEYERSMIVQRVKAGMSKRAELGHWNGGRVLGYNVEDKELKVNKEESEIVRKVFNLRAEGKGYKAIAVILNQQGFKTKRGQLFSICTIKTIVENPLYIGYCRWGRKKNRIEETSKEKIDEYNLVKGKHEPIISEGLWKKVQGVNYAHKKSISKNRNFNGEFVLSGILRCPSCGAGMVMHKTKKRDGSGYHLYYMCQTFHSKGKLACKSNLIRKEQIEGKVIQCVNKIISMPSIVDKTLEHIQEKREWGMERIKSDLLYINEELKRRKNRIVKLNKDYFDEKIRVETYTELSDPLRKEIDELEVEKDKLGRKVESAEVPITKEIIIRALENFTDLYKHANYELKKSLLRAIIKKIEIQSNRTDIKQITYWFDYGNNPDDALLVSKEGRTVS

SEQ ID NO: 8094 - protein, 515 aa, synthetic construct
MKTAIYLRKSRADLEAEARGEGETLAKHRSTLLKIAKEMNLNVLAVREEIVSGESLVKRPEMLALLEEIEDNKYDVVLCMDMDRLGRGGMKEQGIILETFKRSNTKIMTPRKTYDLNDEWDEEYSEFEAFMARKELKIITRRMQRGRVASVEAGNYLGTHAPFGYNIHRLNKRERTLTINSEEASVVRMIFDWYANEDMGANAIRSKLNDLGYKSKLGNEWNPYSILDILKNNVYIGKVTWQKRKEVKRPDAVKRSCARQDKSDWIIADGKHEPIIPESLFEQVQEKLNSRYHVPYNTNGIKNPLAGIIKCSKCGYSMVQRYPKNRKETMDCKHRGCENKSSYTELIEKRLLEALKEWYINYKADFEKHKQDDKLKETQVIQMNEAALRKLEKELVDVQKQKNNLHDLLERGVYTVDMFLERSNVVSDRITEITSTMENLKKEIKTEIKKEKVKKDTIPQVEHVLDLYFKTDDPKKKNSLLKSVLEKAVYKKEKWQRLDDFELVLYPKLPQDGDI

SEQ ID NO: 8095 - protein, 566 aa, synthetic construct
MINQQILEKTKNDVFQNTVISSAVQIKRVAIYARVSTTEQAEEGYSIDEQERLLSDWCTNNGYIIHQVYADRGISGKSIKKRPALKQMLSDARNQLFDIVLVWKTNRLARNILDLLKIVEVFNQNYISFRSFTENHETETSSGKFQFHMMAAIAEFERNTISENVKMGMLARAREGKWNGGQVLGYDLEEMSSHGNKRKHTKLVINEKEAQTVRRIFELYISGKGYKAIANCINKEGHRGKKGRPFSINTIKTILENPVYIGVIRYNVRRNWTDKRRGDINPSPIFQKGEHDAIISQVNWEKAQQILKQRSHKPNRVHGGTFPFTGILRCPKCGAGMVVSRTVNTLKNGTKKTIEYYACGAWKNKGTSVCNSNTIRADKAEAYIFERLQQLATNEQLIQDIVDTVNGKRSNNDEPIKHEFATLTKELEQLKHKKEKAMEMFEDDLITKVELQQRLNKINELIDQVELRLQPIKLQMQSLKTHRINKTLIKEVMSNFHKAFKQSITQEQQKHLVTLLIKEITINEERKIDSIQIQFNNAVLNYFTEKGVDKSSYDDLSAPFLITFNI

SEQ ID NO: 8096 - protein, 515 aa, synthetic construct
MKTAIYLRKSRADLEAEARGEGETLAKHRTTLLKIAKEMNLNVLSVREEIVSGESLVKRPEMLALLEEIEDKKYDVVLCMDMDRLGRGGMKEQGIILETFKRSNTKIMTPRKTYDLNDEWDEEYSEFEAFMARKELKIITRRMQRGRIASVEAGNYLGTHAPYGYDIHRLNKRERTLTINSEEASVVRMIFDWYANEDMGANAIRSKLNDLGYKSKLGNEWNPYSILDILKNNVYIGKVTWQKRKEVKQPDAVKRSCTRQDKSDWIIADGKHEPIIPESLFEQVQEKLNSRYHVPYNTNGIKNPLAGIIKCSKCGYSMVQRYPKNRKETMDCKHRGCENKSSYTELIEKRLLEALKEWYINYKADFEKHKQDDKLKETQVIQMNEAALRKLEKELVDVQKQKNNLHDLLERGVYTVDMFLERSNVVSDRITEITSTMENLKKEIKTEIKKEKVKKDTIPQVENVLDLYFKTDDPKKKNSLLKSVLEKAVYKKEKWQRLDDFELVLYPKLPQDGDI

SEQ ID NO: 8097 - protein, 501 aa, synthetic construct
MKPNIKEVAIYLRKSRDESDGKEDVLAKHESLLLEYAKNHNLKYKIYKEIGSSEYIDSRPKMVRLLSDVSQKLYDAVLVVDLDRLSRGDLEEMGRISRVFRDSKTIVITPTKTYDFNNEDQALINNFEMVFANHEFRMIRKRMIRGKQQGTKAGKWTNGRPPFPYVYNRLTKELDVDPDKVKVYELMKKMFLEDMKATYEIAWKLNELGFKTNRNSYWYENTVRRILKNEVHLGKVVYGKTSGSGSKKKLNASGVQIKDRSEWIIAEGSHQPLKTEEEHQRILAILESRRYTPKGTRTNVQVLSKLIYCGKCNRVMSFTGKTSGKKYVKTCLTTDRFGYRCHNRSLNVEVIYAQLFLDLERYEKQLLSHEPKEKQGDSSTLQLALQNKHEELERLEKGIERIKDLFIDEIIDKSEMKKRIEKQQQLMQTKKEEIRSIEQSLAVIGNVRTDDDRLHAIREFKKAWNTKGISKRELNTLAKQLIDRVEYIREGNNVQINIKFL

SEQ ID NO: 8098 - protein, 518 aa, synthetic construct
MKVALYVRVSTEEQAEEGYSIEGQVKTLTDYCKSHKYDIYNTYKDDGFSGKSTERPALQQLLNDCKNHKFNMIIVWKISRLSRKQLDFLQLIDYFDNNNVLFSSVSESIDASTATGKAMMQMMGTFAELERNTIVDNVKMGMKQRAREGKWNGGSMLGYTSKNKQLVIVESEAELVKKIFHLYLNGKGYKAIANQLNHEGHKTKRNMAFSTNSVRTILHNSAYAGYISFNKVTEWSEKRRKGNNQDPIIVKGEHTAIIDENTWQKTQTLLKRKSNKPTKTFIGNFPLTTLLRCPMCGQGMIGHKIRKSPSTNEYIRYYQCGNFHYKGSAVCKSNLIRADYAEQYVFEKLEEIVSDPLILQDIIDNVNNKISKHLQPLKNELKTTNEQISSTEKNINRYFNLFEATKIPGDLLANKLESLNQELTQLKGRRQYVEQKLQEPTIKEVSFDKVFDTLSAFSKLLPTLPAEKQKHFLHTLIDRIFVNHSDDIKKRSIKDIILFFDTSSSNNYVLTYDTVPHD

SEQ ID NO: 8099 - protein, 515 aa, synthetic construct
MKTAIYLRKSRADLEAEARGEGETLAKHRTTLLKIAKEKNLNVLAVREEIVSGESLVKRPEMLALLEEIEDNKYDIVLCMDMDRLGRGGMKEQGIILETFKRSNTKIMTPRKTYDLNDEWDEEYSEFEAFMARKELKIITRRMQRGRIASVEAGNYLGTHAPYGYDIHRLNKRERTLTINSEEASVVRMIFEWYANEDMGANAIMRKLNELGYKSKLGNDWSPYSILDILKNNVYIGKVTWQKRKEVKRPDSVKRSCARQDKSEWIIADGKHEPILSESLFEKVQEKLNSRYHVPYNTNGLKNPLAGIIKCGKCGYSMVQRYPKNRKQTMDCKHRGCENKSSYTELIEKRLLEALKEWYINYKADFEKNKQDESTKETQIIQMNEATLRKLEKELVDVQKQKNNLHDLLERGVYTVDMFLERSNVVSNRINEITETMENLRKEIKTEITKEKVKKDTIPQVEHVLDLYFKTDDPQKKNSLLKSVLEKAVYTKEKWQRLDDFKLLLYPKLPQDGDK

SEQ ID NO: 8100 - protein, 501 aa, synthetic construct
MKPNIKEVAIYLRKSRDESDGKEDVLAKHESLLLEYAKNHNLKYEIYKEIGSSEYVDSRPKMVRLLSDVSQKLYDAVLVVDLDRLSRGDLEEMGRISRVFRDSKTIVITPTKTYDFNNEEQTLINNFEMVFANHEFHMIKKRMLRGKQQGTKAGKWTNGRPPFPYVYNRLTKELDVDPDKVKVYELMKKMFLEDMKATYEIAWKLNELGFKTNRNSYWYENTVRRILKNEVHLGKVVYGKTSGSGSKKKLNANGVQIKDRSEWIIAEGSHQQLKTEEEHQRILAILESRRYTPKGTRTNIQVLSKLIYCGKCNRVMSFTGKASGKKYVKTCLTTDYFGNRCHNRCINVEVIYAQLFLDLEQYEQQLLNHEPKKRQEDSSTLQLALHNKMEDLERLEKGINRIKDLFIDEIIDKLEMKKRIEKQKQLMQTKKEETRSIEQSLAVIENVRTDDGRLHAIREFKKAWDTEGISERELNILAKQLIDRIEYVREGNNVQINIKFL

SEQ ID NO: 8101 - protein, 515 aa, synthetic construct
MKTAIYLRKSRADLEAEARGEGETLAKHRSTLLKIAKEMNLNVLAVREEIVSGESLVKRPEMLALLEEIEDNKYDVVLCMDMDRLGRGGMKEQGIILETFKRSNTKIMTPRKTYDLNDEWDEEYSEFEAFMARKELKIITRRMQRGRVASVEAGNYLGTHAPFGYDIHRLNKRERTLTINSEEASVVRMIFDWYANEDMGANAIRSKLNDLGYKSKLGNEWNPYSILDILKNNVYIGKVTWQKRKEVKRPDAVKRSCARQDKSEWIIADGKHEPIIPESLFEQVQEKLNSRYHVPYNTNGIKNPLAGIIKCSKCGYSMVQRYPKNRKETMDCKHRGCENKSSYTELIEKRLLEALKEWYINYKADFEKHKQDDKLKETQVIQMNEAALRKLEKELVDVQKQKSNLHDLLERGVYTVDMFLERSNVVSDRLTEITSTMENLKKEIKTEIKKEKVKKDTIPQVEHVLDLYFKTDDPKKKNSLLKSVLEKAVYKKEKWQRLDDFELVLYPKLPQDGDI

SEQ ID NO: 8102 - protein, 598 aa, synthetic construct
MTKAYSYIRISSKKQVDGLGITRQMEKTLKYVRDNNLELDTDLRDVGSGYHGDHVRFGALGGFLKLVRAGKIPDNSTLIVESLDRLSREDVLTAQSQFIDILRAGITIVTLLDNQVYHKDRDFTQLIMSLSIMKRANDESQTKHERSTYNVKKNRLEALEGKPRQVQTIVRWIDQKKVPGTERDFEFTLNKHADTIKEIFELRDIGMGARSIAKHLNDRNIPVLKPGMSKTQKWKDPIIRLILQNEAAIGTYHVFETVDGKRVPMGEPIKNYFPAAVDEDLFWRVQGKNKQLTTRGAKGRHHTNLLYQLSRCSVCGSRMRIKHSGGIKKAGDDPRYRLYACMGYEVMGKSVCNTQRKSVPYEPLEKAVLDKATEFYLASDLAGTLAYRESDLKRMITQLSERITKNEKKRANFVAAVGSAEDAAERLEYQNQASAMRQQIEADKAELTEHEITLRQITEQEAERSNVAEMIAMERLRWTTGTDDEILQSRSRVSLALRKFISRIEVNLDQQESIVFVAGGLKGYRFDSAGALTGRFDLTSSFKAIDGETPWTQEHLTNHMDALGFSDVEKATAKEAAAQILSRAGITPQAKPKPLHFE

SEQ ID NO: 8103 - protein, 499 aa, synthetic construct
MIAIYARVSTEEQAQHGASLETQVAACRKHIGITVEPVQEFIDGGVSGTLLERPQLTALRQAAERGEISRLVIFDPDRLSRKLVHQLLLTEEFERRGVVLEFVNFEWQHTPEGRLFYSLRGAISEFEREKIRERTRRGWLAKAYSGQLVAGMQRYGYKYDTQTKTLAIDPVTGPVVQEIFRLAADEHLSTGKIAQRLAQQQIPSPRGTVWWRDTISKILRNPAYTGIAYVHRYDSGNHNRERHADEWIAIEVPALVTPTQWAQAREVIYHYQKIWKGRQEVPMLLRRLVYCGVCGHMMSTNIRTVKGTTYRYYFCPRRYPRKFQTVTPQGRDTLCTLPWIPADSLEEAVWHDIVKVIDDPQGWRAAQETTEHEPTGPSEDEQIAHELQRVQRSRHRLLELVRKDLITLEDAERDLKTLKGEEQRLRERQTALHTLQPSLATLIADVRTRMGPHLDSLPFATRQEIARRLINKITVSIGEDGVINAMIQFIGEPERPHQS

SEQ ID NO: 8104 - protein, 508 aa, synthetic construct
MKKAIAYMRFSSPSQMSGDSLNRQRRLIAEWLKVNSDYYLDTITYEDLGLSAFKGKHAQSGAFSEFLDAIEHGYILPGTTLLVESLDRLSREKVGEAIERLKLILNHGIDVITLCDNTVYNIDSLNDPYSLIKAILIAQRANEESEIKSSRVKLSWKKKRQDALESGTIMTASCPRWLSLDDKRTAFVPDPDRVKTIELIFKLRMERRSLNAIAKYLNDHAVKNFSGKESAWGPSVIEKLLANKALIGICVPSYRARGKGISEIAGYYPRVISDDLFYAVQEIRLAPFGISNSSKNPMLINLLRTVMKCEACGNTMIVHAVSGSLHGYYVCPMRRLHRCDRPSIKRDLVDYNIINELLFNCSKIQPVENKKDANETLELKIIELQMKINNLIAALSVAPEVTAIAEKIRVLDKELRRASVSLKTLKSKAVSSLGDFHAIDLTSKNGRELCRTLAYKTFEKIIINTDNKTCDIYFMNGIVFKHYPLMKTISAQQAISTLKYMVDGEVYF

SEQ ID NO: 8105 - protein, 507 aa, synthetic construct
MFFKETETQEIIKYEDYPYAVYARVSSEKDEQVTSIANQIDICHHWIEKNNYEWKDEAIQLDDGISGTVLLDRKAMQLILDKAQKRKLKMVVFKSISRLARDLKDALEIREVLLAHGVRVVTLEEGYDSLYEGKNSMKFEMFSMFAAQYPQTISVAASGALAAKARRGEHSGRVPFGFKKEGKFLAINEEEAKVVRFIFDLHNNHGYGHKRIVLKLNEELALGNIVKPQKTDFWQLSTVQTILKNPIYCGVFIANRHTQVKIGGRKKFIRNPKEKWTVYKDWCPKIISEEEYEKANNKERKMHKKRFNPRNELRGMMKCGVCGCNMVVLPSYKYNQKREKKEFNYLKCSAYRRGGTALCVNHAPMQYKDLRAFVIQTLKQKGKKLKLDVKSDFEEQKKNRIKRTKIEIENAENKKKRLIELYLEDQLITKAEFQVKRKELEEQIEKLNDKLFMLEREEEETIDISNIKNAFAQLERTDQDLFEAFSSLIDKLVVYEDGTIDFHYKFK

SEQ ID NO: 8106 - protein, 452 aa, synthetic construct
MKAAIYIRVSTQEQIENYSIQAQTEKLTALCRSKDWDVYDIFIDGGYSGSNMKRPALNEMLSKLHEIDAVVVYRLDRLSRSQRDTITLIEEYFLKNNVEFVSLSETLDTSSPFGRAMIGILSVFAQLERETIRDRMVMGKIKRIEAGLPLTTAKGRTFGYDVIDTKLYINEEEAKQLRLIYDIFEEEQSITFLQKRLKKLGFKVRTYNRYNNWLTNDLYCGYVSYKDKVHVKGIHEPIISEEQFYRVQEIFSRMGKNPNMNRDSASLLNNLVVCGKCGLGFVHRRKDTVSRGKKYHYRYYSCKTYKHTHELEKCGNKIWRADKLEELIIDRVNNYSFVSRNIDKEDELDSLNEKLKIEHAKKKRLFDLYINGSYEVSELDSMMNDIDAQINYYEAQIEANEELKKNKKIQENLADLATVDFNSLEFREKQLYLKSLINKIYIDDEQVTIEWL

SEQ ID NO: 8107 - protein, 452 aa, synthetic construct
MKAAIYIRVSTQEQVENYSIQAQTEKLTALCRSKDWDVYDIFVDGGYSGSNMNRPALNEMLSKLHEIDAVVVYRLDRLSRSQKDTITLIEEYFLKNNVEFVSLSETLDTSSPFGRAMIGILSVFAQLERETIRDRMVMGKIKRVESGLPLTTAKGRTFGYDVVDTKLYVNKEEAQHLQLIYDIFEEEKSITFLQKRLKELGFKVKSYSSYNKWLMNDLYIGYVSYSDKVHVKGVHEAIISEEQFYRVQEIFSRMGKNPNMNRDSSSLLNNLIACEKCGLSFVHRVKDTASRGKKYRYRYYSCKTYKHTHELEKCGNKIWRADKLEEIIIDRVKNYSFATRNLDKEDELDSINAKLQVEHSKKKRLFDLYMNGSYEVAELDKMMADIDAQINYYNSQIEANEELKRNKKVQESLAELATVDFDSLEFREKQIYLKSIINKIYISDEQVTIEWI

SEQ ID NO: 8108 - protein, 485 aa, synthetic construct
MAEKRKVAIYCRVSSMHQAIEGYSIEQQRDSLTKYCEAMEWNIYDIYIDAGFSGGKLERPAMDKLIREAEAGKFDTVAVYKLDRLSRSVQDTLHLIRDVFKEHDIDFVCLQENIDTKSAMGNLFLTLLSAIAEFEREQITERMAMGRHGRAKSGKSMMWARPAYGYRYDRESQTVSVVQSEAMIVKRIYKEYLEGKSVSQIKNDLNSEGHITKEKPWVYKRITYILQSRVYTGVNEYKGEIYDGKHEAIIDTETFELTQMEFAKRQQQTKDKKNNPRPFQAKYMLSGLARCGYCKAPLKLRLGAVRKDGTRAMVYDCHNRWNRKVTYLTIYNDNKQCTESGRYQKADLEAYVLDKIKELQLNPDTIREKMDLNEKPTANTEEIKKQIAKINQQIDKLNDLYLNDLITVEKLKERAGKLKKERELLEVELSKNSDHLFKAKKKQLNDLLMNKDIDSMTYEEQRNLVKMLIYKVDVTKEDINIIFDF

SEQ ID NO: 8109 - protein, 452 aa, synthetic construct
MKAAIYIRVSTQEQVENYSIQAQTEKLTALCRSKDWDVYDIFIDGGYSGSNMNRPALNEMLSKLHEIDAVVVYRLDRLSRSQRDTITLIEEYFLKNNVEFVSLSETLDTSSPFGRAMIGILSVFAQLERETIRDRMVMGKIKRIEAGLPLTTAKGRTFGYDVIDTKLYINEEEAKQLRLIYDIFEEEQSITFLQKRLKKLGFKVRTYNRYNNWLTNDLYCGYVSYKDKVHVKGIHEPIISEEQFYRVQEIFARMGKNPNMNRDSASLLNNLVVCGKCGLGFVHRRKDTVSRGKKYHYRYYSCKTYKHTHELEKCGNKIWRADKLEELIIDRVNNYSFASRNVDKEDELDYLNEKLKIEHAKKKRLFDLYINGSYEVSELDAMMADIDAQINYYEAQIEANEELKKNKKIQENLADLATVDFDSLEFREKQLYLKSLINKIYIDDEQVTIEWL

SEQ ID NO: 8110 - protein, 452 aa, synthetic construct
MKAAIYIRVSTQEQVENYSIQAQTEKLTALCRSKDWDVYDTFIDGGYSGSNMNRPALNEMLSKLHEIDAVVVYRLDRLSRSQKDTITLIEEYFLKNNVEFVSLSETLDTSSPFGRAMIGILSVFAQLERETIRDRMVMGKIKRVESGLPLTTAKGRTFGYNVVDTKLYVNKEEAQHLQLIYDIFEEEKSITFLQKRLKKLGFKVKSYSSYNKWLMNDLYIGYVSYGDKVHVKGVHEAIISEEQFYRVQEIFSRMGKNPNMNKESSSLLNNLIVCEKCGLGFVHRVKDTVSRGKKYHYRYYSCKTYKHTHELEKCGNKIWRADKLEEIIINRVKNYSFATRNLDKEDELDSINAKLKVEHSKKKRLFDLYINGSYEVAELDKMMADIDAQINYYNSQIEANEELKRDKKVQESLAELATVDFDSLEFREKQIYLKSIINKIYISDEQVTIEWI

SEQ ID NO: 8111 - protein, 465 aa, synthetic construct
MQNKMMVVGYARVSTDNQLENYSIEEQTERLKSYCAAKDWILVQTYVDGGYSGGNTDRPALQQMLAEIHKGKIDAVVVYKLDRLSRSQKDTLTLIEDELLSHGTDFVSINENFDTSTPFGRAMIGILSVFAQLEKDQITERFTMGRIGRSKAGYFHGGGNAPTGYDYIDGELVINEYEAQQVRKVFNMFLAGSSINAIHRGLEKAYTTKWSAAKVRNVLKNSVYIGKVKFMKEEHQGAHEPIIEETIFRAANALLSSSARNEKTTSYPKTPFRAEYLLSGLVYCSRCGAKYSANHGYYKCYSRAKSTPKFIVDPNCKNDNWEISILDNLIVGQIDLLSTSKDSLEELKHDSKKINKIEVDRSRVNKRISEIDKQIGKLIELYQVSSIPMASISEKVEALSHEKISLSQQLKNSNVIPQSDLFEDALSDYVDGFKESKIEQQRLMISRLIEKILIDGKSIKIQWRL

SEQ ID NO: 8112 - protein, 521 aa, synthetic construct
MQLKEAGPLRAVAYARFSSDLQREESIDAQIRAIREFAGANGMALVDTYVDKAYSATTDQRPAFQQMIADSRKRQFDVVLVHKLDRFARNRQDSAIYKHELNKSGVKLRSVLENFDDSPESAILESVVEGFNEYYSKNLAREVKKGLKENALKGHHTGGVPPLGYRLNKETMMLEEEPFEAQAVKQIFQMTAAGAGYGEIVNALNHAGYRTKRGSLFGRNSIYDILRNEKYTGTYVYNKSAAKDNNGKMNRHKYKSEEEIIRVPDALPQLVSREVFDEVQQRMAQRRHKAAKFTAKQNYLLSGKIRCGVCQSAYVGNARHPRPDHPLYVSYRCSRRNGSVPCKNPEVPQDAIEQIVCRALATRLFRPEVLPALQQRYEKFLSAQNTQGAQKREAITKRLQEVQRGIGNVVEVVVKTGSAALTERLNALEKEQQELQAELEDLQRVEIEQRVDFKQLTALFREAKRLLETGGLQCRKKLIEQYVEVVEVFPNRIHIVLRLNDMFHMDEWVSIENKKDARKNS

SEQ ID NO: 8113 - protein, 530 aa, synthetic construct
MLDPSGIYYMYLRKSREDREAEAHGEGETLARHEKRLNELADQLKITVSHIYREVVSGETIAARPEMMSMLSDIENEQPDGVLVVELERLARGDTRDQGLIMETFKYGNTKIITPMKTYDPNDEFDEEYAEFGLFMSRREYKIINRRLQNGRRASTKEGKWISNVAPYGYEREKLPHEKGYTLSPLPEEAKIVQFIFQLFTEGTPESDGLPLGTTQIAHLLDDMKVSPRRSDHWETGVIKGILKNYAYIGKLEVGKRKQLKVIENGTVKRSRPINNNPEIFDAIHPPIIDEHVFYAARKKLEANFRPTNFSTIKSTLAGLLYCSECQKAMYRRPAGKRNPNDTVLCKTHGCPTVGSFYYLVEERLIQFLEKTLKEYKIRIQGENTGDWTEVLERKKSVLTEYKNEADILNKQLESVYDYFEQQVYSLDLFRKRSGDLNKKLEDNENLIKTIERELEEIKERIIRKEQFIPYFENVLKSYSKTEDPLRKNALLKQIVDHVYYTKTKKGTRLGQGVDSFTLDVYLKLPFRDL

SEQ ID NO: 8114 - protein, 535 aa, synthetic construct
MEKKAVKKVIKIEPVSTAISVEKPTGKRVCAYCRVSTGSAEQNSSFEAQVEYYTRLIEEKVNWIYVGIYADQARSGTKTSGRDQFQRMLQDCRFGKIDLILTKSVTRFARNTVDSIKVIRELKKLGVEIYFEKERVSTLSEKSEQLLTILSSIAQAESENISTNIRWSIRYRFQNGTFIIGSPAYGYEKDEKGELMIEPQEARIIRKIFDEYLGGKGSYAIARQLRREGIPTIRDSKGWQDSVVKGILQNPLYEGDLLFQKTYTTEGVPFTKKHNHGEMPRYLVTDNHEPIITREEAQAVRQLYEYRRQKQCTENLEVYQSRYAFSGKIICGECGSTFKRQKLYIGEPYQKVQWCCRQHIEDISKCSQKSIREDCIKQAFITLWNRLAGNYEEILLPLLEVLKAVPGDTVQEQEQLELDLKIWELKQQSHMLQKILSDGSIGSVVFIEKRNQIDMELEVAYRRQQVLKEQKLFEQEIGQTEYLITVFRNRPSIIEDFDEELFQMVIHRVTAYSGSRLVFQFENGLELEEDYGKEH

SEQ ID NO: 8115 - protein, 546 aa, synthetic construct
MQAVKKNISVIPATLAYDRSVRQQTKALRVAAYCRVSTLQEQQETSYEAQVNYYTEKIKSNLNWKLAGIYADDGKSATSTKKRSNFQAMIDDCLAGKIDMVITKSISRFARNTVDSLMNIRKLKERNIAVFFEKEGINTLEGSGELLITILSSQAQEESRNISENCHWGIVRKFENGKVIVNHSKFLGYTKDKDGNLVIVPEEAELVRRIFRLFLEGNSSYGIKRMLEADGILTVTGNTEWHATVIDKMLSNEKYMGDALMQKTYTVDFLTKKKVLNKGIVPKYYIEDNHEAIIPKELFNRVQEEKARRTAIYRPAARKKDAPVKGKYSAKYILSDIMVCAECGQPYRRQVWTKYGIKKAVWRCDNRLKHGSKRCKYSPTLKEDSLHEAIMTAINSVVEDQGEFVQAFRENVIRIIGNYSAQIEPTQYDEQIEQLQQEMMRLIEDSAKTECADDAFDKEYRIIADKIKELKKLKTKELKERHLAEIYELRMQDIDGYMKKVNYLKREFDDDLVRRLLQSVRVLNGSKIEIQFQSGIAIKQEVLCED

SEQ ID NO: 8116 - protein, 542 aa, synthetic construct
MASLKNLIKEYEIKNVVNYLRKSRQDEDRERKTGEDTLHEQKKLMDRVLADYGIPYEQRPEIGSGDKIATRPVFQQVIEDIKMEKYDAIAVKEISRMGRGSYTDMGIIYDLIQDKRLFIITPWKVYDPTNNTDLRQIRFELFMSREEFETTRERLTGGRYNAALEGKWVAGRSPFGYDYDSNTKHLVINEKQAEVIRSVYDFYLNGIIQDNGKRKLVQFKALSTYLNRLGIKSPAGKDWSYIAVQRILLNDLYTGTLRFNTKMTTADGQRVPRPENEHVVVKDAHEAIIDQDMWDKVQDRMNKRESVPHNKLDFNVSELASLCRCVKCGKKMIRQYSTQHYQKADGSKSIYHKEFLWCTINGCTFVKYRNVEEDLLETLRILGELDNKSFKAQMDMLAVKKESKGTISQADIQKSIDMRKGELERRMKFIFEKYEAGIYTDEMFLERKAEIEKEKDGLKNLHVEVPGVETTEDIDIEAAKQNIKSILETYKVTDHKSDKNAILRSIFDHVDIEILEKGRGRRPAKLKLTPYLKLSFLAQKTV

SEQ ID NO: 8117 - protein, 540 aa, synthetic construct
MPQEKQKQAVIYCRISSTAQLKKGDGLASQESRCREYARYKNYDVLETFHDNKSGGDMDRPAMKALLEFLSKQDDTCVVVIDDINRFARDIVGHWQLRAMLAEAGGKLESPSIEFGEDSDSILVENLLASVSQHQRQKNGEQTKNRMRGRALNGYWPFRSTLGYKFERVSGHGNILVRDEPIASIIQEALEGFATGRFDTQSEVKRFLESQPAFPKDKPDGTLRFETIIRLMNRIIYTGHIEVPQWDVSLRKGHHEAIISLETYELIQQRIKEGSRAPARKDISTDFPLRGFVCCDDCGTALTACWSTSKSGKKHPYYLCHSKGCPSYRKSIRRDVLEGEFSTLLQDLKPSESMFIFVKRMFQDAWSQRLRQSEANLEHIRKEHRQIESKIEGLLDRIVETNNTSIIAAYEKRIAEMDRQKHILAEKMENQAKPKHTIEEMFEHAFAFLSNPWKLWESGNLIMQKIVLRLAFAERISYSRSEGLRTPKTTLPFKVLGLICDDGKEMAERKGFEPSRRFDTAYSLSRGAPSATRPPLRRPV

SEQ ID NO: 8118 - protein, 535 aa, synthetic construct
MMESKQILAIIYCRVSSLKQKTVGGGLASQETRCREFARMKGYDIVAVFSDDVSGGLTDRPGIKAALAFLRKNRNKQIRFLIDDVSRLARSLQAHLELRQAIMGAGGILESPSIEFGEDSDSLLVENLLASVSQHQRQKNAEQTKNRMKARIQNGYCVLARPPVGFKYERVAGHGKLLKRNEPVASIIQQALEGYASGHFGSKAEVTAFLQNNPLFPRGRSGNVPHERTNQILNQCLYAGYVEAPNWGVARRNGQHEGLISAHTFKKIQERLEGGCYAPRRKNLNQDFPLRGFVECADCGTPLTACWSKGSHSRHPYYLCPKKGCNSYGKSIRREKMEGEFESLLGAVKPHEGVFSVARKLFADLWQRRIDLAEEQSGALAAKLAKTEKQIGQLLDRIMESGVPSVISAYERRIQKLEEEKLILQDRIAETTHPKSSFEDTLRTALEFLSNPWILWRSERLEDKQIVLKLAFADRLRYSRETGLRTANLAFPFKVLGALAGGNLEMAHPRGFEPLASAFGGQRSIQLSYGCNLAS

SEQ ID NO: 8119 - protein, 511 aa, synthetic construct
MVDNDIFAIYLRKSRKDLENKDYDVLKRHRKILLDFAKSKNIVIHEEDIYEEVVSGETIQDRPVVQILLRKIETGYYKAVLVMEIERLARGNTIDQGIIAQAFQLTNTLIITPNKTYDTRNEYDNEFLEFGLFMSRREYKSISRRIQTGRIQSVKEGNYIGSVTPYGYDKEKLKGEKGFKLVSNDEATNVKLIFDLCLDGVGTSNIAFKLNDLNIKSRTGKPWTPNMVRNILINKVYIGILTWGKRATVKQLDNNLINKTRPVSNNYIESKGKHESIIDEITFYKAQEILKANSSKKVHKDKSLKNPLAGIVVCQKCGTNMIRRPLKNIPDTLLCKNHYCDNVSSYLYLIEDRLLNSLKVVLKEYYYYIENYEKENVKNKKNYDIQIKRIDKDIEKLKNQHNKTCELLETGVYSLQLFKERSLSINQQLEGLNKQKEELTRLNKEDKTEKIIQAIPKLENCLKTYHTLNIEDRNKLLKSIIKKAYYLKTEAGSRWNKDAQDKFTLELELLL

SEQ ID NO: 8120 - protein, 606 aa, synthetic construct
MTRVALYARYSSDNQREASIEDQFRLCEEYAARERWHVMGSYQDAAISGSSTILRSGIQQLVRDAQRGVFTVVLAEALDRISRDQADVATLYKYLKFAGVIIVTLAEGEISELHVGLKGTMNALFLKDLAMKTHRGLRGRVEKGKAGGGLCYGYKVVKKFDANGEPIRGDREIVPDEAVIVRRIFQEFASGKSPKAIAVDLNRDGIPGPLSRAWGDTSIRGHVSRGTGIINNELYAGVLVWNRQRYIIDPSTGRRVSRINPESQWIRTEVRHLRIVDDELWSATRARQKQIAEIFGPNPANTLEGRMKRVHLANRPVHLLSGLLTCGCCGGKIGIITPNRYACLNHHRRGTCDNGRSIIRDKIEDRVLTGLKERLVSSEAVSEAVKAYAEEMNRLNRDRRVQVRTDQKALAKIEKAIAGIIAAIEDGMYQPSMKARMDELERQKAEIAARMAQAPADIPDIHPNVANLYRLRVERLTEALSDPDGGRQAAEALRSLIGKIILTPGEKRGEVHAELRGELFGILDFVKAEETQREPGFMFEANAGPRNQYSKNPWHQPRRFRVMGISTMLTQTGRWFRTTTGLSQQPDIPLSETLDCAIAPSLHPVG

SEQ ID NO: 8121 - protein, 522 aa, synthetic construct
MRKVTRIDGNNALQAFKPKVRVAAYCRVSTDSDEQMASLEAQKDHYESYIKANPDWEFAGIYYDEGISGTKKENRTGLLRLLADCENKKIDFIITKSVSRFARNTTDCIEMVRKLTDLGVFIYFEKENINTQRMEGELVLTILSSLAENESLSIAENSKWSIRRRFQNGTYKISYPPYGYDYVDGKLFINKEQAEIIKRIFSEALDGKGTQKIADGLNSDKIPTKRGSHWTATTIRGILSNEKYTGDVLLQKTYTDENFKRHYNHGEKDQYMIKDHHEAIISHEEFEAAQEILKQRGKEKGVIKGSSKYQKRYPFSGKIKCAECGSSFKRRIHGSGNRKYIAWCCTKHIKDASSCSMKFVREDAIHQAFVVMINKLIFGHKFILRPLLQSLKKTNYSDNITKIQEMETKIKENTERVQVIMGLMAKGYLEPALFNTQKNELLKEAAILKEQKEAIKRAIDGSQTILVEVEKLLKFATKAEKQIDAFDSEIFEDFIEEIIVFSQEEISFKMKCGLNLRERLVK

SEQ ID NO: 8122 - protein, 522 aa, synthetic construct
MTTRNVTVIPARKRIGNSANAEELPKLRVAAYCRVSTDSEEQATSYEAQIEHYTNYIKSNPEWELAGIFADEGITGTNTKKREEFNRMIEECMQGKIDMIITKSISRFARNTLDCLKYIRQLKEKNIPVYFEKENINTLDSKGEILLTIMASLAQQESQSLSQNVKLGIQYRYQQGKIHINHNRFLGYTKDKDGNLVIVPEEAEIVKRIYKEYLEGSSMLQIARGLEADGILTGAGNPRWHTSTINKILRNEKYIGDALLQKTYTVDFLSKKRVPNNGIVPQYYVENSHEPIIPREIFMQVQEQLVKRRCVHISKNGKKRNYSNNHPLSQMVFCGNCHEIFRRVHWNNRGKKSIVWRCVSRLENTGLFCTASTILEDTLKEKIVEAINVAVSGKNSFLAILKKNIETVLSVDLDETTADIDKRLEELQTELIQKANSKEAYDNIVNEIYRLRDLRQETLSRNALRQDKRDRIAEMTDFLNTQTGDITEFDDKLVRKLVEKAIAYDDRIVVEFKSGLEIEVNL

SEQ ID NO: 8123 - protein, 584 aa, synthetic construct
MTKAYSYIRFSTPEQAQGDSLRRQVAKAEAWAQGRGLILDDSHRDLGMSAYHGANRTNGALRSFLQMVEEGRIERDSYLIVESLDRLSRETVIDAATQLFALIQAGVVVVTLSDGQEYSATRLRQDWTPLVISLAVMARAHDESRVKSERVGEAWRQKKAAARAGGKPITPRCPEWLEVRDGKFIERPDRVEIVHRIFRETIKGFGRREIVCRLNGEGKLPFKAGEKRKKPSTGWQTSSVAKIVQNRAVMGEYQPHTGTHKARNRKPEGDPIKDYYPRIVEDDVFWRAQSSVENRRQQTGGRRGNHGAHILQGLAKCAACGGPMHVMNKGKPPKGGIYLVCSANRRNTGCDNSRAWRVDRLEEAVLLCLTSFKTQSFESLNGTVVNQGQRVDALRAELDDLNRRNKVLMRLAESEDEQAEARFLENAKEIKAKKTELAAAEAELATHQSDPGDAVRLAEILQLSTDFFRTEGEEKLESRIRLSSLIRRIVDLIECDPVRGAYMVLPIDTKIWRVNAPTEGAFAYQLDLQPRAIDAPPPRFLFLLVKNPNDEARDAFYQGKGGQVMAADGIKGFPSPHAFKSREK

SEQ ID NO: 8124 - protein, 541 aa, synthetic construct
MGTEDSNTFPIRAYSYVRMSTRKQLRGDSLRRQLERSKAFADEHSLLLDDSLQDLGVSAWRGRNFKTGALGKFLAMVDSGEIPKGSYLLIESLDRLSREAVPDALTLFMAIINAGIVIATLGEDRQIYSRDRLNGDWTKLIIGLAVMSRGHEESQTKSERISAVAKRKREQAREGKGHITGLTPAWIDARRIDASRYAFTLNRHADTVRAIYEMATRGLGSTVIARKLNADGVPAFKSKDGWYQSIIKALLSRHDVIGTFQPHRMEDGKRVLDGDAIENYFPAAIEKDLFLRVQAMRSTPGRPGRKGDTFANLFTGLCHCAHCGGPMTMKLSRVKGNENGRYLVCANYVRRHRCTEGKRHFRYEPLEAVILDHVKEINLAETLQAARLDTVLDAIDETIAALTLQLEGLRKKEQRLALAIEDDSLPPDAIIDLLKARQSERLAVEAELRHQQAERQRQSIRHDNTANMSDRIAKLRVAWEKAEEATHYELRSEAHAAIRELITEISFDSTSFSAVVVIENGVSAYRVKDGRISGLFRAFAA

SEQ ID NO: 8125 - protein, 523 aa, synthetic construct
MEVTKNITVIPARRRVGNTVNKEEKPKLKVAAYCRVSTDSDEQATSYEAQVEHYTDFIKKNPEWEFAGIFADDGITGTNTKKREEFNRMIDEAMAGRIDMIITKSISRFARNTLDCLKYIRQLKEKNIPVYFEKENINTMDAKGEVLLTIMASLAQQESQSLSQNVKLGFQYRYQQGQMTVNHNRFLGFTKDEKGQLIVEPDEAVVVKRIYREYLEGASLQQIGRGLEADGILTGAGKKKWRPETLQKILKNEKYIGDALLQKTYTVDFLEKKRVPNNGLVPQYYVENSHEAIIPRDLYMQVQEEMIRRANLHSGQDRKKRVYSSKYALSSIVYCSKCGDIYRRIAWNNRGKHSIVWRCCTRVEHGPGACDADTIQESELQNLTVRAINLALGKKETMNETLQKNVEAVLTGADGIPLDEIDSRLEQLQKELLKVVNAKGNYDSIADEIYHLREIKQNALVDNAEREGMKQRISEMQQFLSEQTQEITEYDEQLVRRLIEKITVYEEKVTVEFKSGTSVDVRR

SEQ ID NO: 8126 - protein, 520 aa, synthetic construct
MKRITKIGANEPLIQKKKLKVAAYCRVSTASDEQLISLDAQKAHYESYIRSNDEWEYVGLYYDEGITGTKKDVRAGLLSMIAGCEDGKIEFIITKSISRFARNTTDCLEMVRKLTDLGISIFFEKENINTGSMESELMLSILSSLAESESVSISENSKWSVQRRFQNGTFIIAYPPYGYDNDNGTMVIVPEQAEVVREIFAACLAGKGTHAIAKELNARGLKTKKNGKWGAGAVNAILTNEKYTGDVIFQKTYSDSSFNRHINYGERDRFLCQNHHEPIISHEDFDRVRAVLDQRAMEKGNGTDTYRYQNRYCFSGKIKCGECGATFKRRQHYKPSGDYVAWTCGTHLESKENCSMLYISDEGIKLAFLTLINKLVYGHNAVLKPLLRTLRGMDDKDRLLRIQELENRMEENTDRKQTLTSLMAAGFLEAAVFNKENNALVVEEQQLRQEKEQLMNSVGGDKVKIKELQKLMAFTSKGEMLTEFSDETFLAFVDSITVETRERIVFHLKSGLNLTERLVM

SEQ ID NO: 8127 - protein, 518 aa, synthetic construct
MPNITVIPARKQLRHSADQPEKPRLKVAAYCRVSTDTDEQATSYEAQVEHYTEYIQKNPDWEFAGIYADDGISGTNTKKREEFNRMIEDCMAGRIEMVITKSISRFARNTLDCLKYIRQLKEKSIPVYFEKENINTMDAKGEVLLTIMASLAQQESQSLSQNVRLGIQYRYQQGKVQVCTNRFLGYDKDKDGNLVINPTEAEVVKRIFREYLEGSSLLDICNSLMADGILTGAHKKKWVPSTVKKMLTNEKYIGDALLQKTVTVDFLTKKRVSNNGIAPQYYVEGSQPAIISKEIFMMVQEEIARRVNMSSGKSRSKRVYSSKYALSSIVICPKCGDIYRRMSWSIHGRRSIVWRCVTRVEHGPVACDAPTVKEEVLKAAVVQAINQTLGQKSEVIPKLQECAKDTLSSAVADTTEVDAKLMELQQELLKRNTSNQIYDDLANEIIRLREQKNAMQLASAEVKGKEICMQDLISFLMTQEGLVHEYDDVMVRRLIKNVYVQTESSFIVEFKSGTKVTV

SEQ ID NO: 8128 - protein, 520 aa, synthetic construct
MKKITKIDENPSVKAVRKKRVAAYCRVSTAQEAQLVSLEMQKNHYKDFISKNPDWELVEVYYDEGISGLNKEKRPALMRMITDCENGKIDMVVTKSISRFSRNTADCLELVRKLQSMNIPIYFEKENIDTSSMESELLLSILSSLAEDESFSISQNSKWSVRNRFMNGKFKISSPPYGYDWKDEKMVMNSEQASVVKRIFRETLQGKSTSEIAQELQTEGIPTKRGGIWNSSTILAILRNEKYTGDVLFQKTYTDSTFTRRRNHGEKDQFFMENHHEAIVSHEEFKAANAVVDENASEKGLKGNTEKFLNHYVFSGKIICGYCGDTFKRRIHYSDSSCQYIAWCCSTHLKEKNKCSMLFIREDSLKAAFVIMMNKLIFAHEQILDPLLEAQMNTEYKQTLVRLDALEKRMDKNTQRRQSMVQLLSKGLLEPAVYARENNALIQEAKQIADEQDRLTHNVRDGMDRVTELRLLIQYTEQSEMIKEFSNEAFSEYVEKVIIPRRDEAQFVLKCGLTLTERLV

SEQ ID NO: 8129 - protein, 525 aa, synthetic construct
MGKVRIIPAHQQKGNSVQPQQSRQPFEQLRVAAYCRVSTDYDEQASSYETQVVHYKELIQKEPTWEFAGIYADDGISGTNTKKREQFNQMIAACKAGKIDLIVTKSISRFARNTIDCLKYIRDLKAINVAIFFEKENINTMDAKGEVLITIMASLAQQESESLSQNVKMGIQYRYQQGKVFVNHNHFLGYTKDAQGNLVIEPAEAKVIKRIFYSYLNGMSMKQIADSLKADGILTGGKTKNWQSSGVSRILKNEKYMGDALLQKTYTVDFLSKKRVKNNGIMPQYYVENDHPAIIPKPVFMQVQQLIKQRQNGITTKNGKHRRLNGKYCFSQRVFCGKCGDIFQRNMWYWPEKVAVWRCASRIKRSKSGRRCMIRNVKEPLLKEATVQAFNQLIEGHKLADKQIKANIMKVIKNSKGPTLDQLDKQLEEVQIQLIQAANQHQNCDALTQQIMDLRKQKEKVQSRETDKQTKLHSIDEINKLVEFHKYGLVDFDEQLVRRLVEKITIFKRYMEFTFKDGEVIKVNK

SEQ ID NO: 8130 - protein, 553 aa, synthetic construct
MSTITKIQGYQHDVKQLRVAAYCRVSTDNFEQLESLENQRAHYQKYINNHPNWELAKIYYDEGISGTKMTKRNALKELLTDCHNHRIDLVVTKSISRLSRNTTDCLQIVRELQQLNIPIIFEKEHINTGAMASELFLSILSSIAQDESHSTAGNLRWAIRKRFASGKFHVSSAPYGYSIEDGNLVINHTEAKTVRQIFQRFLSGTSASQIAKELNQKQVSTKRGGQWRSNTVINILRNSNYTGDMLCQKTYRDDQYHRHFNQGELAQYLIEDHHPSLINHENFNRVQVLLKEAVKKRHIKTGSHKYQQHYLFSGKIICGQCGTIFKRQTRPHKIYWACQQHLRSAQQCPTKAVSEASLKAAFCNMINKLVYSKKFLLQPLLEGLKEEANVNSDGQLISLTKQIKANDHKAETLTELMHAGLLDKAIYVNQTARLEQDTYQCQEKIKQLNGQNTDSANDFEDVRTLLRWCHQGKQLTEFDEGVFQEFVQQIVVNSSNKATFILKCGLKLPEKLNKNATIDGHFYRDIIKQRYNDPIKQTEYLYSIIESEGDLIG

SEQ ID NO: 8131 - protein, 547 aa, synthetic construct
MEKKMWKIEQKVTEISKRKRVAAYARVSVESERMQHSLSAQISYYSSLIQKNPTWEYAGVYADYGITGTKIIKRKEFQRMLADAEARKIDIILTKSIQRFARNTVDLLKTVRHLKEIGVEVWFEKENICSLSGDGELMLTILASFAQEESRSISDNIKWRFQKKYEKGIPHAKFFIYGYRWKDGELVIQNEEAAIVRRVFKGYLAGKTRRDIQRELANIGAHTMYGNLFQDSTIKQMLQNPVYKGNLVIQKTFVIDPITKHQVINHGEKDKYVVENHHEAIIDAATFNQVQEEMAWRKEAGKQRGGYARNFLNTSCFTGIIKCGICGKSYIHNIRKYKGKPSEYWSCLSNKGKAEERCGAYGAIPQPALERACMSALEMAIFDKTEFLQRVEKIVVPAYHSLLFYLKDGKVIKQPWKSTALKDMWTEKRKEQVQQRMVQYRKSGLSSRYSAFSERIFCPTCDVKFVRCLETRKNRRVAYWRSRNKHKCVHTSGIQEDWLKKTAAALLGESTFDEQKFREQVEWIEVQKNRTLLFRFYSGENKEVQLP

SEQ ID NO: 8132 - protein, 567 aa, synthetic construct
MSISNPVLADCPPTKGAETMLRQSGNKITALYCRLSRDDELQGDSNSIVNQKAILSKYAKENHFSNTTFFVDDGYSGTNFNRPSWSELLERIENGEVATLIVKDMSRLGRDYLKVGFYTEILFVEKGVRFIAINNGIDSANQQDSDFTPFLNIINEWYAKDTSKKIRAVMKSKGEAGEHLCTNPPYGYMKDPDNKKRWIVDEEAAGVVRHIFSLCLEGYGPTQIARILKADNIITPTIHFQQAGRATRNTPPDNPCNWTGDTIADILERPEYQGHTVNFKTYKQSYKSKKTCYNPEEKWLVFENTHEAIIDADTWARVQELRKNKRRPTRTGKTNMFSGIVRCADCGEKLYYCTSKDFEARQDHFVCSTSRLKGKEVCPTHFIRAVVLEQGVLAHMRLTIACVANHEEQFRKAMGAKQKAEVKRELAAKRRQLTQAERRIEELDRLFKRIYEDNANGKLSDNRFQMLSDDYEQEQEELREKLLRLSEEITKQEEQSENIDRFINKVQKYLDLEELTPAVLNDMVKAVYVHAPDKSKGYREQQIDISYDLMGILPASLLNDLQNGETA

SEQ ID NO: 8133 - protein, 452 aa, synthetic construct
MLRVALYIRVSTEEQVLNGDSIRTQIEALEQYSKENDFNIVGKYIDEGYSATNLKRPNLQRLLRDVEKDKVDLVLMTKIDRLSRGVKNYYKIMETFEKHKCDWKTILENYDSSTAAGRLHINIMLSVAENEAAQTSERIKFVFQDKLRRKEVISGTIPVGYKIENKHLVVDKEKIYIVKAIFDEYEKLGSIRSLIDIISNLHGELYSYNKIKNILRNELYIGIYNKRGFYVEDYCEPIISKKQFKQIQRILEKNKKTTPNKNIHYHIFSGLLKCKECGYTLKGNSSNVGEKLYLSYRCSTFYLNKNCIHNVTHNEKHIENYLLTNLKPQLHKHMVKLEAQNEKIRQNKKSNKKDEKKKIMKKLDKIKDLYLEDLIDKETYRKDYEKLQSQLDNITEEQESQIIDTSHIKKFLDIDINDMYSDLSRVERRRFWLSIIDYIEIDNNKNITINFI

SEQ ID NO: 8134 - protein, 537 aa, synthetic construct
MPRIAIYARFSTDKQDRTSVDDQINLCRRRAESFDDARVTGIFKDEAVSGSTPVEHRLGGAAMMQAARNGEFDILILEGLDRLARNLVDQEQVMKYFDWQRIRVLGVIDGSDSENKQAKMTRQMRGAFNEQYIDDVRDKTRRGLSGQVSRGYVVTGRAYGYDLQRDDHGTKYVINENEAKWVRWIFERFADGDSPRVIAAELNRLSVPSPRGGTWMQSGIYGSPAKGAGILNNSSYIGEYIWNRSSCEKNPMTQKKERRDRPESEWMRVARPEYRIVSDELWQRAHARYKKAKYLGGTKGNGPYARTLFGGLLRCPHCDGAVVAIDARSYGCLTRKERGNIVCPGILVSRKHVDENLLHALQTLLLDNGGEDEINGYINEILATHAEHKREGKDEIRQRLAKIEHDLPKLIDAITSTGNRVEYIVAKIDALSAEQKELKAALAHVESEAVKWENYAPLIRAKMAELRETLRNTSADNAMRAREKIAAMLGPITLYEGEGGVYGRCFDPLQQVALNVIGEAQIFLVAGAGLEPATFGL

SEQ ID NO: 8135 - protein, 465 aa, synthetic construct
MKTKLYSYIRFSSMRQNDGSSYERQIRMAREIAVKYDLELVNDYQDLGVSAFKGANSKTGALSRFLDAIGRSVPVGSWLFIENLDRLSRADIVSAQELFLSIIRRGITIVTGMDNKIYSLDTVTANPMDLMFSILLFIRGNEESQTKRNRTNSSALIKIKAHQENPQNPAVAIEEIGKNMWWTDTTSGYVLPHPVFFPIVQEVVELRRNGRSTSEILDHLNATYTPPPAASHKRHSNWSRAMIERLFHTRALIGIKEISVDGVKYELKDYYPRVLDDAEFYHLKKSIGVRACNFGDKEEAKPIPLLSGAGLLKCEHCGSAMVKVKGTNRRPNQYRYSCDAMRSSRIECVHTNWSFRGDQLEKAVLQLLADKIWIAEDKANPVPALKVQIDEISRKIDNLITLSAMTGATKELADQITTLNSERETHFWILVNQFHPFGTSNNTESTNAVIVGTIFSQCIDIENLL

SEQ ID NO: 8136 - protein, 538 aa, synthetic construct
MKKKVRAAAYGRVSTEKDDQVNSLISQREYFSDYIRQHEEWELTGIYYDEGISGTQTANRRGFNRMIQDAMAGKIDLILTKEVSRFARNTVDTLSYIRKLKKNGVRVIFTIDNIDTMDGDGELRLSIMATLAQDESRKTSERVKWGQKRRMEQGVVFGRDLLGYTVKAGNLFVNEEEAGIVKAIFHKYTNEQKGTHVIARELTEEGIPPKQGERWSNTMILKVLKNEKYAGDLCQKKTITPDFLSHRKKRNEGEEEMVYLKNHHTPVIDRELWDRTQKELKVRSSSQQKVAGQCSHYWCSGKVKCGECGGSFVIRTKKRSDGSIYKSWRCYNHANHGNSCCQNTAVSDLALRACVSYAVKQVKIEKDTIAAELLQSIKRLKRTELYTYDDSFIEKRIGEIQSKKKKCVDLALEGILNAQELAEQKDWYDGQIKRLERRLLKIEKEKEIEEKESKCPEKYIKTINDILRFQEKEDVLYREILDKAVVYPGQIVCVWLKDLPFGIKMRIQTSGKRENYTTEVLDVCLVKKNMNNDMLVEM

SEQ ID NO: 8137 - protein, 433 aa, synthetic construct
MSGRITAVSKPPKLERKKRVAAYARVSSGKDAMLHSLSAQVSHYSDLIQRNSDWLYAGVYADEAKTGTKDSRADFQRLIADCHAGKIDMVITKSISRFARNTVTLLQTVRDFKAWEVDIFFEEQNIHTMSADGELMLTILASYAQEESRSASENQKWRIKRNFEEGMPWNGAMLGYRLKDGRYEIVPKEAALVRRIYNEYLAGDGYQAVAKRLTEEGVPSRFGGKWNQSVASKILSNYTYTGNLLLQKTFRENHITKKTVINHGELPKYHAENTHEAIIDMKTFHAVQTEKARRAAQFNKKPAPRTTYPFTSLLVCDNCGKNYRRKTTKTGIVWVCGTFNTLGKSACASKQIPETTLQQVTAEVLGVKAFTREQLHSRIQSIRVCNGNILIFCFKDGSEVTRTWKDRSRSESWTDEMKEAARQKALERSKHNA

SEQ ID NO: 8138 - protein, 526 aa, synthetic construct
MPKVTMIPATINPLTHLPKVAAQKRRVAGYARVSTDSDEQFTSYEAQVDYYTKFIQSKPEWDFVKVYTDEGISGCNTKKRDGFNSMVSDALAGKIDLIVTKSVSRFARNTVDSLVTIRKLKENGVECYFEKEGIFTFDGKGELLITIMSSLAQEESRSISENITWGQRKSFADGKVHLAYKRFLGYEKGEDGRPTIVESEAKIVQLIYRLFLDGKSQASICRYLEDLGIPSPGGKDKWSKTTVTSILQNEKYKGDALLQKSFTVDFLEKRMKPNEGEVPQYYVEGSHPAIVDPDEWDHVQTEFARRKALGRAYSGKSVLSAKLVCEDCGGFFGSKVWHSTDRYRRTIWQCNGKFKGEERCHTPSVDTETVQRLFIQAYNRMMENRERIIKDCEAMRRALTDFVELDAEIERQLEETQVVAELVKAAVKENASTAQSQEAYLRKYEALTERYEKAAAELERLQNLRTTQSQQDKAMALYIRTLKKQPVVLREWSATIWTVMVEKAIVHRNGAITFVFKNGTEVKVGE

SEQ ID NO: 8139 - protein, 568 aa, synthetic construct
MTGKPLRAMLYARYSSDLQNPLSVDDQFRICRRLAEQNGWTVVGQHSDHGISGTVSDRPGIKALEAAIRAEECDVVVVELLDRIARDQEHTARFYKVAQHSRVDIHEVRRGKVTMMTLGFSSTMAAMYLEDLADRVRRGHEGRVLAGKSPGGRSYGYKLTSDPSGDPQTRVPAISPDEAAVVQRIFREYAAGTSPRKIASDLNADGIPSPRGRGPGSGSGHWKQNTINGNRERGTGILNNEIYIGRRIWNRLQYSKHPDTNKRVSRLNPQENWIVSEDPGLRIIDDALWGAVKAQQDSLARRKRPRTSSDRNGLSASQGLRRRKFLLSGLLQCRQCGGNLTVAGSGKTRRYYCANAKEKGPTVCTGMKGLKEADAAKPLLDVLKTGLMEDEAYAEFSRRFTAHLRDQSKDSAELLRLHDRKVRELEKTHGNLMNAVESGKFSDAVIDRLNAVDAELKALKARRAELEPSSIDLPPDLPVLYRAYVADLVETLSGEEVAGRASDELHELIETVIVDWDAEIGAHRLELRGNLVRMLNATKPAGEAGFAGLESSLKLVAGVRFEPMTLRL

SEQ ID NO: 8140 - protein, 462 aa, synthetic construct
MAVSTTVGYVRVSTTKQATKGVSLAAQEEAIEAYVAKSGDVLSSVYQDVVSGKSMDRQGIKQLIVAIKSGRITKVVIYRLNRLSRDVTDVLSFLDILSEHDVELVSITEPINNGSLAQQRFSVSIIAATGQLERAIIADNQYISYKTKHAKGLPLSPNVPFGYQLKDKEMIVVKGESDRVKRIYQLYLQGWGYQKIGKQLSEEDISRSYPPYFIRSILLNERYTGYIVNRYGRVKGKHEAMITPEVFNNVQMIRQNKRKKQVSNQRTKQRAFLLRQRLRCPYCQTTLTCRTQYKRNQSYYSYECPTRRNRGHSYCSGFSCPAYFIEQEVVKVLQKFVLSDEVQAAINQKAVSKKQAKRNHKCQKETLIHQFSNGAISAADLEEGLKKLQEVPIQEVRHPLANFVDWVNQPLIAEREPSPLMYHRIQTLLQSVEITKDKILATLCLSGGIKINRKEDGHYENI

SEQ ID NO: 8141 - protein, 567 aa, synthetic construct
MKTYKKQRIAIYARVSTTEQSEEGYSISAQQETIRDYCEQHGYEVVDTYVDAGISGKSIKKRLELQRLLADVDKDKFDRVMVWKISRMARNMTDLMKIVDVFQANNITFYSISERFELNTSTGKFMLQVMASVNEYERNSIAENVKLGMTRRARDGLWNGNQLLGYRNEVDDKGKGIIVIEPKEALIITRIFTMYQKKHGYRAIANRLNRLGLVTKRGNSFSTVAVKDILNNPTYVGIIRYNRYENWSDKGRKGKSNAVIETKGQHEAIIDQSLWDAVHARMAVQSSQPAWNRKGSNVLTGLLRCPQCGSPMAASNVTNRLKDGTKKRLRYYSCSQFRNKGASVCSANSIRADDAERRVKDTFIAYINQPELMRGLSDSLGQRQEEIVSEWEQEKRQLETTHTKKTKEFDELLAIISRTPDLKTDLASRIRELKIALGTLSQQREQIQRKLDKKEEPLEIQTLEQLMKFLNGLLHNQGKKELKGLYQLLIDHIDWRKETNELKIYFKLDDIARNYIKEHPEAASQVEAASLLWLRKTVLPLQITFISDRSYQLSKKRGSVVPFKEVK

SEQ ID NO: 8142 - protein, 509 aa, synthetic construct
MKTAVAYARFSSAMQREESIDAQLRAITEYCTKNDIALIGHYIDMAQSATTDDRPEFQRMIAESAERDYDYIIVHKLDRFARNRYDSAIYSKKIEDNGKRLLSVLEKFGDGPEAVIFRSIIEGFNEYYSKNLGRETRKGHRENAYKALFNGGTPPLGYDINDENQYVINDYEAEAVRLIFSMYIDGYSYLEIIDRLNGLGYRTKRGGLFKKTSLTEILRQEKYIGRYIFGKTDYRPGEPRNTHRYANEEDMIILDDAIPAILTKEVWAMAKQRREKNKQVPSARRNTTRSGGYPLTGHLYCKHCGSPMVGSSRTGGSGKRYYYYECTAKSRRECDARAIRADKLESLLFDALDDYLFGHNYIDNMVDALFAYLSSEKEDPREDEKRELKKKIADAGKKIENITNAIASGTSSQTLLDKLTALETEKTQLESTLRESDLKQAHIALLREDVEDFVRKYDSIKKYDRQERSKLMSIFVDRIEVDTPRVYVTFNVSANDINRECLHGAEKGT

SEQ ID NO: 8143 - protein, 541 aa, synthetic construct
MPKAISYIRFSTKIQSVGDSTKRQSKYINDWLKRNPDYYLDESLRFQDLGISGFSGANAKSGAFGEFLAAVESGYIESGSVLLVESLDRVSRQDIDTAGEQLRKILRAGVEVVTLVDNEWYTKESLKDSLSMIKAMLVMERAHEESAMKSTRLRSVWAAKRERAANGEIMSKRCAAWLKVSEDRSHFEFIPENVKAVQRVFQLRLEGLSHVKIAKQMNDEGFSTLNQFKSVTGGWSQSSVTELLSNRSVIGFKVPSKSMAVKGVSEIPNYYPSIISDEQFYAVQQLKQGSGRKPSSDLPLLTNLFKGVLRCSECGFIVVVAGVSAKRSGIYKCSMKSEGRCNSVGFSRLQTDRALVQGLLYNTNRLSLNRRDGSAIGALQSELEQLQKQRERLIKLAMLADDTESMAKDLKALNSQIRDAEKAVSEVHQREQSSQLETISHLDLTVKKDRIEAQIIIKRIVKEIRLNTAGKKCDVFLHNGLKLYNFPLDRVVDGAQWLEILPLIDGDEFDFEGLTTKPRHIALEEAPEWVKEMEEQPNQPL

SEQ ID NO: 8144 - protein, 547 aa, synthetic construct
MKLLVTYIRWSTKEQDSGDSLRRQTNLIDAFYAKHKDDYYLLPAHRYVDKGKSGFHQQHKNQGSDFRRMFENVMSGAIPEGSLIVVENFDRFSRADIDTAIDDVRQILRKGVSILTLGDGELYDKSALTDPVKLIKHIIIAERAHQESLVKQKRIAQVWNHKTQLARELKKPMGKQAPGWLELSEDGSHYIVDEDKASLVNIIYDKRLSGMSMFAICKWLNEQGYPTINQRKVRISKTKKPDGNWSALSVKHILTSRSVLGYLPAKISTEDRKTVLREEIEGFYPQIVTDSKFYAVQQLLEETGKGKTSSGDHWLYVNILKGLIRCKCGLVMTPTGIRKPVYQGTYRCNGNKESRCSYGTVSRKLLDTQLCSRLFSKLSQLHDEATDTAKLDELQRRLNTVDSELEKLTETLIQLPNITQIQEALRVKQEEKDELIVQLSREKARVKSVSSLDLSGLDMESVEGRTEAQIIIKRLVKEIVVSGNEKLVDIYLHNGNMIRGFPLDGKDDHTLTLEEATDEMQSLDDMLIFGEPVTRIYPAGDMEEVDA

SEQ ID NO: 8145 - protein, 515 aa, synthetic construct
MKTAIYLRKSRADLEAEARGEGETLAKHRSTLLKIAKEMNLNILAVREEIVSGESLVKRPEMLALLEEIEDNKYDAVLCMDMDRLGRGGMKEQGIILETFKRSNTKIMTPRKTYDLNDEWDEEYSEFEAFMARKELKIITRRMQRGRIASVEAGNYLGTHAPFGYDIHRLNKRERTLTMNSEEASVVRMIFDWYANEDMGANAIRSKLNDLGYKSKLGNEWNPYSILDILKNNVYIGKVTWQKRKEVKRPDAVKRSCARQDKSDWIIADGKHEPIISESLFEQVQDKLNSRYHVPYNTNGIKNPLAGIIKCGKCGYSMVQRYPKNRKEAMDCKHRGCENKSSYTELIEKRLLEALKEWYIDYKADFEKHKQDDKLKETQVIQMNEVALRKLEKELVDVQKQKNNLHDLLERGVYTVDMFLERSNVISDRINEITSTMENLKKEIKTEIKKEKVKKDTIPQVEHVLDLYFKTDDPKKKNSLLKSVLEKAVYKKEKWQRLDDFELVLYPKLPQDGDI

SEQ ID NO: 8146 - protein, 512 aa, synthetic construct
MKVVAIYSRKSKESDTGESIKNQIEMCKDYFLNQGKEFTFEIFQDEGFSGGNTKRPEFQRMMLLAKHGKFDIVACYKVDRIARNIIDFMNTFDILKKNKVSLVSVTEGFDPNTPIGMMLMTMIAGFAEMERMNIAQRVKDNMNALAKMGRWLGGTPPTGYRAIKENTHNGKYAMYLELIPEMKEKLTFIFESAAAGYTSRYIGKLVELHPKTIINIVYNPTYCPSDELSKSYLENLGYKVYGELNGRGYLPWNRRPIDVNGKKMYRSEDRFVTASKHEIPTDSATWIKANEEIRKRGDEGRPRISQYSFLAHMLTCKCGCGMSVDSGYKRKDGSRSYYFKCSSKKGGYNRNCDAKLIRVDYIENDILSLLQKICLNKELLNDEISKTETIVIDKNEIKNISQKIKSNDIEMENLVSQLGKLKGSAADAVTTKMNKLSEENDNLKQKLFLLEHDNILNSINHYDIDYLYNKIVNLMSSWENLSLEDKQFGIQSIIDKIKWDGEKFKISFIKKS

SEQ ID NO: 8147 - protein, 443 aa, synthetic construct
MAAYCRVSTDQLEQLSSYEAQVNYYTNYINGHPDYECAGIYADGGISGTNTKKREQFNKMIEDCKAGKIHMIITKSISRFARNTLDTLNYVRTLKELGIGVIFEKENINTLDSKGEVLLTILSSLAQDESRSISENSTWGIRRKFEQGKVVVNHKKFLGYDKDEEGNLIIDEKQAKIVRRIYKDYLDGKGSNRIARELEEDRVKGWNGKAKWYESTIRGILTNEKYKGDALLQKTYTVDFLTKKRVDNNGEVPQYYVEESHPAIIYKEMWEAVQLEMERRRVFAETYGVFKLDYATLDNPFAGRVICGCCRGVFGRKTWHSTNEDFRRKVWMCSNRYKVKGEKGCQNKHIDDKVLYQTFINTFNAIIENKDYFMEKWEKGISSENILVRYRSKQFIKIIKEAEQIKEFDVNLFLKIIEKMTVFEGEKIIVSLLDGTEIEVVIE

SEQ ID NO: 8148 - protein, 428 aa, synthetic construct
MRVTIIKPTVNNKRKKKVCAYARVSTDSLSQGESLENQIQYYENIISSNTEYEFIGIFADRGITGTTENRPEFQRMLGLCRNGSIDLIITKSISRFARNTAIMLQTVRELKDIGVEVRFEKENIDTLSGDGELMLTILSSFAQEESKNISDNINWRFKQKFQRGELVINEKRFLGYDKNQYGELVINQREAKVVRRIFEEYLSGKGSFTIAKELEKEGIPTAVGGKWSDTTILKILKNEKYRGDAILQKYYTPNHLTKTKVKNNGQIDSYYIEDNHSPIITREMWEQVQENIKRRAEEKGNIQGDTDKYKRRYPLTGMLYCSKCGSSLIRRTWNSKFNCKKIVWQCSNYIRNGKGACEGTRIDNETVSKLNIKEEIIVREEVKDGKKHYSYTCKSKQEQFSGASTAAEKENGGILQSINRPIRTVIKL

SEQ ID NO: 8149 - protein, 591 aa, synthetic construct
MTSAYADFIDELQQDVTIPIQPPTDDLAPGTRAVIYLRVSSTGQVRTDYNPEGISIPAQREACLRKARDLGVTVIDEYVEPGRSGTEMTKREAFQQMLARVRSQGDVDVIIIYQLSRMARNRYDDAIVMADLRKRGVTLVSATEAIDDTPVGQLMHGILATFNEYQSRQSGADIAYKMGQKARNGGTLGRAKLGYLNHIDHSDGRVIRTIIVDPERAPFVQLGFELFATGDYTQEELADELYDRGLRTRATRRHPAKKISENKISQMLRDRYYLGYVEYDGEEIQGRHEPLIDEDLFDTVQEILESRMTAQERRRVHHHYLKGSLFCGRCQRDGIKRRMIIQRTINSKGAEYLYFFCRGRQKGLCQAPHVNVTLVEDAVERHYSAIRFSQPFIADMRDQIDAVLGEQEKSARLLRKQITTQLKELDTKEENLIDLAADSTLPRTKVKEKLRDIARERRRLEERLDTANADLTDSAQLVNASLALLEQPDQPYRRCNDQQRRLLNQAIFHALYIEDDKITDGELREPFGELHAIQGQRTAAPNAEDTNKRTTRNAGGPCTPSSVTVLLRGLHSGTCSSKTPRVELRGRLTWV

SEQ ID NO: 8150 - protein, 457 aa, synthetic construct
MRVACYDRTSVYEEAKISNDAQYDAVKEYVLEKYEQIPQRFSDKGESGGKADRPAFRQLRAWVCASEEEGVIYVWRYDRLARQAKIALEFIELCQQHQVQVYSISEPLPASFSHASTNKLFVQLLFTFAEQQRNVIIENVRAGLAYKKQQRQYLSSAVPYGYRLVNGKIQQEAHEAKVVCRIFQLYLTKKYGYKKLCQRLTQQKIFFRKRPFQPYHIYSILKNPLYYGEVKGGSFGKYLGTFEPILSKTIFLQAQEIRQSRRTTKKDTYPYLLRQKIKCPFCGRHLSSKYQWNTKKTKTLHYYHCTDRSCQGIFLRAERVESEVLEKIQAFFQHEGVYQALIAQLTQQLAEKRKDEKHKVIQQKKQEAQWLKAFEEGNCSLEELKQQLQALQKPRSTSSFLSLQQCEAKVKEWLQLKDLSSRQLLCDHVCRIEVTKEKTVCGIYFRQLTQNILERNE

SEQ ID NO: 8151 - protein, 545 aa, synthetic construct
MEMIQTKRVALYIRVSTQEQALEGHSIQAQEQNGRQFAKRMGYEVVEVYADEGISGKSTKNRFAYQRMMTDARNHRFDLLVIWKLTRLGRNMLDVLQTVEELLRYDVGLHSISEQFDVTTSTGKLMLQLLGSFGEFERNQIAENVQMSMQSLVKDKKRYAGGRRLGYVSGIDTNGQKQLVIEPEEAKIVRLIYAKYLGGAGYRAIANFLNRQGYQTVKKNAFSTTAVKDILRNKIYAGYLEYARYINWETKRRKGKNPKPILVKGTHEPIISEEDYQKVQERLALEGKQPKWNHTGENVLTGLLRCPECGAPMAASNVTNTLKDGTKKRIRYYSCSVFRNKGASVCHANSIRAEQAETFVADRLKEIIQLPEVLPRLVAALNEEIARQSQPLEQELVVLLERKEELKTKIEKWEAALEDSPELFPMLKDRLDELTEKRRQLHIRENEILGIFQQQGEPIQVKDVQRILNSLDRFLAQSEKKQVKDLYRTFIEKITFDPNHKEILEITMKFTPAVVQQLNEQYQIAVSKTKDTAIFVLKTPFTLTI

SEQ ID NO: 8152 - protein, 521 aa, synthetic construct
MKKVTKIKETNNRLQKKLKLRVAAYARVSTDNTEQLISLEAQKVHYEAYIKANPDWEFVGIYFDEGISGTKKENRTELLRLISDCENKKIDFVITKSISRFARNTIDCLEIVRKLTDLGVFIYFEKENINTQSMESELMLTILSSLAENESISISENNKWSIQKRFRNGTYKLSYPPYGYDYIDGQIVVNKKQAEVVKRIFTDALAGKGTQKIAQELNDEGVRTKKGGQWRGSTIRGILRNEKYTGDVILQKTYTDDNFTRRTNKGEKDQFLIENNHEAIISHEEFKAVNLAIEQRGKEKGIKSGNSKYLNRYPLSGKIQCSECGSTFKRRIHGTKNNKYIAWCCSKHITNIEECSMIYIREDSIHQGFVTMINKLIFSHKVVLRPLLQKLKLMNYSDNLIRVQEIESKMEKNTEQLQVLINLMTKGYLEPALFNKQNNELRSEAEKLKDQKEALYRFINGGMAKITELERLIKYVSKSKNIESFNKEVFEQFVEKIVAFSPTEIGFSLKCGLLLKERMER

SEQ ID NO: 8153 - protein, 523 aa, synthetic construct
MTMSRNVTVIPARARVGNNQETESKTKLRVAAYCRVSTDSEEQASSYEVQIEHYTSYIKGNPEWELAGIYADDGISGTNTKKREEFNRMIEACMEGKIDMIITKSISRFARNTLDCLKYIRQLKDKNIPVFFEKENINTMDSKGEIMLTIMASLAQQESQSLSQNVKLGIQYRFQQGEIQVNHNRFLGYTKDENKRLVIVPEEAEVVKRIYREYLEGASLLQIARGLEADGILTAAKKPKWRPETLKKILQNEKYIGDALLQKTYTVDFLSKKRVVNNGIVPQYYVENSHEPIIPRGIFMQVQEELVRRANLYTGKNGKKRVYSSKYALSSIVYCSECGEIYRRVHWNNRGCRSIVWRCVSRLEEKGSDCTSPTVNEEVLQAAVVKAINELLASKDTFLSTLQANIETVLNEEHDKITNDIDVKLEELQNELLRLANSKTDYEEVAEEIYRLREQKQNALVENADREGKRQRIAEMSDFLNEQSCELEEYDEQLVRRLIEKVTVFHDKFAVEFKSGVEIDVEG

SEQ ID NO: 8154 - protein, 510 aa, synthetic construct
MLRKVVGYIRVSTQMQVEEGFSIEGQKQQILEYAKKHNMEVVGFYVDEGISGKSIEGRHALKKLLDDTKKGCFQEVITWKVSRVARDVNDLLYFIKELNNEDIVLRSISENISTESVNSTFLVQMMGAVAELERKVITENVKLGINQKLREGWYKGAPVLGYDIVPKKLCKENHIETNLQVNKEEAEVVKLIFNLYEQGKGYKAIVNVLNTNNIKTKTGKNFSIGSINKILNRRLYTGEIEHKINGKIEIVQGKHEPIITMEQWQETRKDTLREHKKRESRIFTLSKLLKCPQCKSTMVGGSSVGRRGKKYYYYLCEDHLNKGKAVCKANSVPADRIEEEVYRELGRLINQPQIVEEVYRKINTYNADYRQKMKMLNEFASKKEVLEKRKRLLMKQFELDKLSKETFIVSINEIKEQLVTMEQTEKELQQYLSDNAKAIIPLEDIKEVFQNLIELLKKQEPKQIKQLLVYIINEIVVDEKKYLKHIEFKIKGQKFYLDAKEEMEDVRQAR

SEQ ID NO: 8155 - protein, 546 aa, synthetic construct
MSDKLDKPQEVRVALYARVSTEEQALHGFSIEAQLNVLRNYCKLYNKKIVKEYVDRGISGKSIAGRYELQQLLKDAESGEFDEVLVWKISRLARKVIDLLQMVEIFEKNDVVFRSFSENFETETPMGKFALQMMGAVGELERNTIVDNVKLGMAQRSRQGRWNGGICLGYKSEAVDSSNKKDTRLVIVPEEATIIKKIFNMYASGKGLRAIANSLNKEGYKTKRGNTFDTASIKEIILNPLYVGKIRFNRYENWSERKRKGKSENVILADGVHEPIITQELWDRVQAIQKSKADKPMKNYEGNYILTGLMKCPFCGATMVGTRTNNKLKDGTKKVIRYYSCGAARSKGASVCGFHSIRADYAEQYVLDRINVAVTHPELLKKLVDKVNAHKKEMVKPLQEELQANKQAIEKVKASRDKYLNLFDEKLIDQELLTERLQELNQEFERLVKRQNELEVSLNGCDLEELTYEYVQEVMSHLNEILQDMPNDERKAFYHMIIEEIVVSQEKQIEVIKLKIDEEVQKEFIKQSPSETQSDGDIFIQIDIVI

SEQ ID NO: 8156 - protein, 482 aa, synthetic construct
MTEWLEANPDYLLDDLTYKDLGISAYHGTHATRGAFSDFMVAVEGGYIEYGTVLLVESLDRLSREKIGEATERLKSILKAGIDVVTLSDHTHYTKDSLDDPYSLIKAILIAQRANEESEIKSRRMKSAWKKKREEAEASGKIITRSCPRWLKVSQSGDSFELIPEHARTIKEIFRLRLKGQSLNGIVKILNDKKVITLTGEIGVWNPSTIEKLLVNKALIGINVPSYRTIANGIQEIPGYFPRVISDTTFYAVREFRKPPFGKDKHTDNPYLINLFRSVMKCKACGHSIILNSIDGKGMGYYVCPMRRLHRCNTPSIRRDIADVNLITTVVIHADKFQTNSTSRESTRSLQDRNIEVLKSIDKLIEALQIAPEVTALAEKVKVLHKEFKSNEATIRAVKNKQRLAVSEDVTTLDLTLKEDREKCRRFIFKTFKEIVLDTENKTCDICFSNGFKLINFPLLKSISSEQLISALTYTDDSTLIL

SEQ ID NO: 8157 - protein, 559 aa, synthetic construct
MAGKLRVATFYRVSTKGQLDGNDIPMQRRSCMEFIDSKGWTLVKEYVEKGVSGYKTSNDDRDEIQRAKYDAENGNYDILLCFMFDRLGRRTYETPMLIKWFTTQGVEVWSVKEGQQEFKDESHDITNFLRFWQSNNESKKTSMRVDEKHVQMAEDGAFRGGSAPFGYKLVKSGILNKKGKELMMLEINKDQAIVIREIFNLVKDEGYGSNRISQYLNERGIKTATGSNWNTGAINFILRNPIYKGYPAYGKRKSKEGVFVTKDKSEWTMPEKCQTHLVIIPEDDFDYIQTFRSSRSVENIKNHSYSRVNSTKSPLLLVGMIRCGYCGSPLTTTYNSKKYVLANGDIQKWKRAVYRCSGKALKKVECAGQTMYAQAKIEDTVLEEVDNYLSYLKKMDYQEYAKDYNQDEYNYIKQQVDNKNKELESCYEEINALKSEISKSIMGKSAFKPEMLNELIEQKQNELQLVDSQVRKLEIDLQTKKSELTDIKELAESISVWIDIFKETTDEKKKTMLRSIIDVVTVMRDGVDIKFRLDIVQFLSNAGNGSVSELRGRAHRWQR

SEQ ID NO: 8158 - protein, 485 aa, synthetic construct
MKVFAYPRVSTDEQADKGNSLIEQKERIAAYCRAMGWDDPIFFIEDGYSAKNLNRPHLTEMLQRIKNEPGPGIVITTKLDRLSRKLVDILNLNEYFNKYGYNYVSATEGFDTSTPAGRLVLQMLGMVAEFERERISERVRDNMTSIVTNSKRVVSRPCFGYNVIDKKMLVNLEESLIVKEMAEWAIEGKGPREIAKRLNARGIKTKEGNAWHDKIVRELLQRETLIGEFVYNKTYRKDSKTITRDPSEWITVKDHHDPIIDKKDFEKIQRIFIGRKTVGRHISNETYLLSGLLICSHCGSKMNGKMNRSFSKKLNRENLHYQYLCDGYLKKATCFHHFVRRDEIEELIMMRIEELASKGTGKLKLVVSKPTNPKDDIAQLKAKLEKIDKKMQKQLDAYNEDLISAHDLKLASEKAKSERAVLTQLLNESSDDKQKKDEAQLQVRAKKSLKDIISGDRLKAKQEIRKLIESITITDGEKLNIIWRG

SEQ ID NO: 8159 - protein, 595 aa, synthetic construct
MQQVAQNRMAYSYIRMSTEKQIKGDSMRRQLEWSQTYAARHGLDLQDTSAFADIGVSAWKGLNRSKGRLGAFIELAREGAIPSSSYLLIENLDRLSRTTPLEALDLFKEILQLGITVVARGEFGDEETYTWNSLNSNSNQLISTLTSMLRANRESERKSQLIRSAMKNRRADARLGKKTNQTPPSWITATKITKGEYEYHLNDRADVVRWIFERSAEGVGFDRIARELNAKGEPTLKPSKRGWWHANIQAIVTSRSAIGEYQPGEMIDGKYVSEGDPILDYYPAVIGHDLWLRAQKIVHRNRKGGRAGTQFSNLLDGLAECVHCRSRMYMIGNSRSDKQWKYLVCSANFRNIMRADEVTGESVPVCSASRSRFRYDILEKSILENVTEFGGDDLLKQGKVTAEIAEIDEELAKLSISLIDLRKREARLTEVIETEDGAQIAGLLKALRERTIEREDAEKRQETLRHDREVMAAKHAALDPASAIEAMRRAWESADDETRYALRVRTNASMKGMIDHVEFDSEGNHYTVIIEQGRRAYRFANPKFVRKDIKIIPQVADFVQHAIDVPLGGYADNQQSPEMIAATESIQRLKALPVK

SEQ ID NO: 8160 - protein, 525 aa, synthetic construct
MGKVRIIPAHQPKGNSVHHQRSPQPFEKLRVAAYCRVSTDYDEQASSYETQVAHYKELIQKEPTWEFAGIYADDGISGTNTKKREQFNKMIAACKAGKIDLIVTKSISRFARNTIDCLKYIRDLKAINVAIFFEKENINTMDAKGEVLITIMASLAQQESESLSQNVKMGIQYRYQQGKVFVNHNHFLGYTKDNQGNLIIEPEEAKVIKRIFYSYLNGMTMKQIADSLKADGILTGGKTKNWRSSSVAKILKNEKYMGDALLQKTYTVDFLNKKRVKNEGIMPQYYVENDHPAIIPKSVFMQVQQIIKQRRNGITTKNGKHRRLNGKYCFSQKVFCGKCGDILQRNMWYRPEKVAVWRCASRVRRSKTGRRCMIRNVKEPLLKEATVEAFNQLIEGHELASKQIKANIMKVIKNSKGPTLDQIDHRLEEVQMKLIQAANQHQDCDALTQQIMDLRKQKEKVQSRETNQQAKLHSLDEIKELVELHKYGLVDFDEQLVRRLVEKITIFQRYMEFTFKDGEVIRVNM

SEQ ID NO: 8161 - protein, 553 aa, synthetic construct
MSTITKIQSYQRDVEQLRVAAYCRVSTDNIEQLESLENQREHYQKYISNQPNWQLAKIYYDEGISGTQLTKRDALKELLADCHNHRIDLVVTKSISRLSRNTTDCLQIVRELQQLNIPIIFEKEHINTGAMASELFLSILSSIAQDESHSTAGNLRWAIRQRFASGKFRVSSAPYGYSIEDGNLVINRAEARIVREIFQQFLSGMSASQIAKKLNHNHVATKRGGQWRSNTVINILRNSNYTGDMLCQKTYRDDQYHRHFNQGELTQYLIEDHHPSLVNHETFNRIQVLLKEAAQKRHIETGSHKYQHHYLFSGKIICDNCGTTFKRQTRPNKIYWACQKHLKSAKQCPIKAVPEASLEVAFCNMMNKLVYSRKFLLQPLLENLHDQANSDTNGQLSSLTEQIKANDHKAETLTDLMHSGLLDKAIYVNQTAQLEQDTYQYREKIKQFNSNNTDYANNFENVRALLHWCQQGQKLTGFDESRFQDFVQQIVVNSPNEVVFKLKCGLRLTEKLTKTAGLDEHFYRGVIRQRFNEPIQQAEYLYSIIESEGDLIG

SEQ ID NO: 8162 - protein, 470 aa, synthetic construct
MKGESELDKKAAIYIRVSTQEQATEGYSIQAQTDRLTKYVEAKDFILYKKYIDAGYSASKLERPAMQELIQDVQSKKVDVIIVYKLDRLSRSQKDTMYLIEEIFRPNDVELISMQESFDTSTAFGSATVGMLSVFAQLERKSISERMITGRVERAKKGFYHTGGQDRPPAGYQFNSDNQLIINEYEAAAIKDLFRLYNDGLGKSSISEYLKKNYPGKNKWLPSSIDRMLKNSLYIGKVKFSGAEYDGIHEPIIDEVTFYKTQKEIARRKQSNTKRYNYVALLGGLCECGICGAKMANRRAVGRKGKVYRYYRCYSKKGSPKHMMKTDGCSSKAQQQFIIDEAVINNLKNIDVEAELKRRSAPQTNTSLISSQIESIDKQINKLIDLFQVDSMPLDVISEKIDKLNKEKQSMEKLLERKNKLDKTELQHRFDVLKSFDWDNSSIESKRVVIEMLVQKVIIHDNSIEIILVE

SEQ ID NO: 8163 - protein, 484 aa, synthetic construct
MKYAVYVRVSTDRDEQVSSVENQIDVCRYWLDQHGYDWDENSIYFDDGITGTVLLERHAMQLILEKAKKRELQMVLFKSIHRLARDLKDALEIKEILIANGIRLVTIEEGYDSHYEGKNDMKFEMFAMFASQYPKTLSVSISAALSAKVRRGEHTGGRLPFGYSDREKKYVINEEEAEIVREIYDMYSKGIGYIGIAKILNERGIPSKTGGKWQMSSVQRIIKNPIYKGDYILNQYTTVKISGRKKQIKNPEEKWTIFKNHHPAIVSENQWELVNKPRSAKKRRPALWNEFRGIMFCAHCGSAMQVVYSAKKKKDGTKEEWRYLKCSRYKRYGSDECVRHAPIQYHEFREFILDNLKEKEKQLETEFNLNEETSSAEKKNKLQREIQRIEEKRKKLIDLYMEELIEKEEFLSRRNELEKTIKEKEVQFVSMEDKSEVKRTQDEFRKAFALLDESKNLYEEFKRIIDRIEIFENGDIKIVYRIEM

SEQ ID NO: 8164 - protein, 508 aa, synthetic construct
MKKAIAYMRFSSPGQMSGDSLNRQRRLIAEWLKVNSDYYLDTITYEDLGLSAFKGKHAQSGAFSEFLDAIEHGYILPGTTLLVESLDRLSREKVGEAIERLKLILNHGIDVITLCDNTVYNIDSLNEPYSLIKAILIAQRANEESEIKSSRVKLSWKKKRQDALESGTIMTASCPRWLSLDDKRTAFVPDPDRVKTIELIFKLRMERRSLNAIAKYLNDHAVKNFSGKESAWGPSVIEKLLANKALIGICVPSYRARGKGISEIAGYYPRVISDDLFYAVQEIRLAPFGISNSSKNPMLINLLRTVMKCEACGNTMIVHAVSGSLHGYYVCPMRRLHRCDRPSIKRDLVDYNIINELLFNCGKIQPVENKKDANETLELKIIELQMKINNLIVALSVAPEVTAIAEKIRVLDKELRRASVSLKTLKSKAVSSLGDFHAIDLTSKNGRELCRTLAYKTFEKIIINTDNKTCDIYFMNGIVFKHYPLMKTISAQQAISTLKYMVDGEVYF

SEQ ID NO: 8165 - protein, 507 aa, synthetic construct
MKRVISYIRFSSEKQAKGDSLRRQSKMVTDWLKAHPEYCLDESLTFRDLGVSGFTGKHLQGGLGDFLTAIEKGLVKAGDTLLIESLDRLSRQDVDQASELLRNILRSGVDVVTLSDGEHYTKESLKDPLALIKSILIMQRAHEESLRKSERIQAAWDAKKESAKAGIKISKRCPAWLKLNDDRKSFSVIPEKVETVKRCFQLRLEGKSIWDIVRTLNAEGHQTLNQYKAGSFGQTSVQDLLKNRSVIGYFTPKGCEEISGYYPSIIPETDFYRVQQLSYSRYGRKPVSENPMAVNLFKGVIRCSECGHTLIINGFTEKRHGIYRCPCKQENRCNAKGLSRKQTDGTLLALLSRIDRFEPEQINVIDTLKLQREGILKNIEKLVELSLIIDDMTAITSKLKQLKSELSLIESDIEKENQRIKSIDTGSLSDCDLSTKAGRIEAQLIIRGVVKEAVLDTTNKRCKVVFHNGKVIDLPITENPSEAVTEAIQSLSEIASKGLLDIDEFSL

SEQ ID NO: 8166 - protein, 506 aa, synthetic construct
MRTVITYLRFSSAIQGAEGADSTRRQNDLFKQWLKKNSDAQVVASFSDEGLSGYKGKHLTGQFGDMLARIESGEFPEGTILLVEAIDRIGRLEHLETEALMNRIIAHGIEIHTLQDGLIYTRDALSDDLGISIIQRVKSYVAHQESKQKSFRVSQKWKQRAKLALAGEQRLTKMVPGWIDPDTFKCNEHAETVRLIFKLLLDGESLHNIARHLQANNISSFSRRKDANGFSVHSVRTILRSETTRGTLPASQRNDRPAIPNYYEAAIDAATFNKAQEILDKNRKGRTPASDNPLTINIFKGLFRCQCGASVHPTGTKNKYAGVYRCNNNPDGRCDVPPLKRKPFDKWMIDNFLGMIDVGNDGEAEGKIASLQHEVEIVTARIKKATALLLEMDDIDELKIQLKELNQKRTELQTMIDNMRRKASLTDKELPQLKDIDLMTKAGRVECQLILSKHLKGLTLGKDSVTVTLQNDTEIIVPTDPLPLNDGTSIFEIAEKELLEIDAYQL

SEQ ID NO: 8167 - protein, 482 aa, synthetic construct
MEEWLEANPDYLLDDLTYKDLGISAYHGTHATRGAFSDFMDAVEGGYIEYGTALLVESLDRLSREKIGEATERLKSILKAGIDVVTLSDHTHYTKDSLDDPYSLIKAILIAQRANEESEIKSRRMKSAWKKKREEAEKSGKIITRSCPRWLKVNKSENGFELIPEHAKTIIEIFRLRLKGYSLNGIVKILNDKNVITLTGEIGVWNPSTIEKLLVNKAVIGVNVPSYRTIANGIKEIPDYFPRVISDKIFYASREYRKPPFGKDKHTDNPYLINIFRSIMKCKACGHSIILNSIDAKGMGYYVCPMRRLHRCNTLSIRRDIVDVNLVTTVVILADKFQASSTSRESTRSLQDRNIEILKNIDRLIEALQVAPEVTALATKIKALHKEFKSNEVTMRAIKNKQRLAISDDITKLDLTLKEDREKCRRFIFKTFKEIVIDTESKTCDISFSNGFKLINFPLLKSLNPELLISALAYADDATLIL

SEQ ID NO: 8168 - protein, 506 aa, synthetic construct
MRTVITYLRFSSATQGAEGADSTRRQNELFKQWLRKNSDAQVVASFSDEGLSGYKGKHLTGQFGDMLARIEAGEFPAGAILLVESIDRIGRLEHLETEALMNRIIAHGIEIHTLQDGLIYTRDALSDDLGISIIQRVKSYLAHQESKQKSFRVSEKWKQRAKLALAGEQHLTRNVPGWIDPDTFKCNEHAETVRLIFKLLLDGESLHNIARHLQSNDIKSFSRRKDANGFSVHSVRTVLRSESVIGTLPASQRNDRPAIPNYYEAAIDASTFNKAQEILDKNRKGRTPASDNPLTINIFKGLFRCQCGASVHPTGTKNKYQGVYRCNSHLDGRCDVPPLKRKPFDRWMIDNFLGMIDVGNDGEAEKEIASLQHEVETVTARIKKATALLLEMDDITELKTQVKELNQKRTELQTTINTMKRKTSLSDKGLPQLKDIDLMTKAGRVECQLILSKHLKGLTLGKDSVTVTLQNDTEITIPTNPLPLNDGTSIFEIAEKNLLNIDTFQL

SEQ ID NO: 8169 - protein, 541 aa, synthetic construct
MSYTTEYPFTSIINYLRRSRKDEERERRTGEDTLAEQKVLMTNVLDNMGIPYVQKFEIGSGDKISTRPVFQEVLEELKLGKYDAVAVKEISRLGRGSYSDMGQIYDLITTKRIFIVTPYKIYDPTNDSDLRQIRFEMFLSREEFETIKTRLISAKYTYALQGKFMGGNAAFGYRTDEQKMKLIVDDEKAKIVRLIYEIYNHGLGNERPKGIRAIANYLSSIGIPSPTGKPAWGIAIVKNILTNPVYKGEIHYRTTQTVNGKKVPRPEDEHIIVLDAHEPIIEEELWELTQNKFASKERKPSIKPTDKISELTGLIRCSGCGYKMITNNYNRKWTNKDGSVTEKLTERVRCLKNLTPSCGSVQYRDIEQGLLEAIKQYTTFNEEDFRKAYNVIFSEKEENFDDVVLINIEKQLKTLNNRLEFIYEKYESGIYTDEEFKQRKNKIEDEKKKLTEMEVNPPLLVEKTKIERKEFTSLMLNVYEAYMKASKEGNLELCNQILKGILDEVNLMIISKGSRSQNIDFELRIKLNPRRIKEQSGELLL

SEQ ID NO: 8170 - protein, 537 aa, synthetic construct
MKQQIYNTALYLRLSRDDELQGESSSITTQRSMLRLYAKEHHLNVIDEYIDDGWSGTNFDRPSFQRMIEDIEAGKINCVVTKDLSRLGRNYIMTGQYTELYFPSHNVRYIAIDDGVDSEKGESEIAPFKNIINEWVARDTSRKVKSAFKTKFAEGAHYGAYAPLGYKKHPDIKGKLLVDDETKWIIEKIFSLAYQGYGSAKITKQLRAEKVPTASWLNFTRYGTFAHIFEGKPESKRYEWTIAHVKAILKSEVYIGNSVHNMQSTVSFKSKKKVRKPESEWFRVENTHEPIIDKEVFYRVQEQIKSRRRQTKEKATPIFAGLVKCADCGWSMRFGTNKTNKTPYSYYACSYYGQFGKGNCSMHYIRYDVLYQAVLERLQYWAKAVQQDEEKVLNKIQKAGNAERIREKKKKASTLKKAENRQNEIDRLFAKMYEDRACEKITERNFVMLSSKYQKEQIELEQQITSLREELSKMEQDMIGAEKWIELIKEYSVPKELTAPLLNAMIEKILIHEATTNEDNERIQEIEIYYRFIGKVE

SEQ ID NO: 8171 - protein, 481 aa, synthetic construct
MITTNKVAIYVRVSTTNQVEEGYSIDEQKDKLSSYCDIKDWNVYKVYTDGGFSGSNTDRPALESLIKDAKKRKFDTVLVYKLDRLSRSQKDTLHLIEDVFIKNGIEFLSLQENFDTSTPFGKAMIGLLSVFAQLEREQIKERMQLGKLGRAKSGKSMMWAKTSYGYDYHKETGTVTINPAQALTIKFIFESYLRGRSITKLRDDLNEKYPKHVPWSYRAVRTILDNPVYCGFNQYKGEIYPGNHEPIISKEEYDKTQSELKIRQRTAAENVNPRPFQAKYILSGIAQCGYCGAPLKIMLGVKRKDGSRLKKYECHQRHPRTLRGVTTYNDNKKCDSGFYYKDKLEAYVLKEISKLQDDADYLDKIFLGDNAETIDRESYKKQIEELSKKLSRLNDLYIDDRITLEELQSKSAEFISMRGTLETELENDPALRKNKRKADMRKLLNAEKVFSMDYESQKVLVRRLINKVKVTAEDIVINWKI

SEQ ID NO: 8172 - protein, 481 aa, synthetic construct
MKTTNKVAIYVRVSTTSQVEEGYSIEEQKDKLESYCKIKDWSVYKVYTDGGFSGSNTNRPAIEQLIKDAQKKKFDTVLVYKLDRLSRSQKDTLHLIEDVFIKNGIEFLSLQENFDTSTPFGKAMIGLLSVFAQLEREQIKERMQLGKIGRAKAGKSMMWAKTSYGYDYHRETGTITINPAQALTIKFIFESYLRGRSITKLRDDLNEKYPKHVPWSYRAVRTILDNPVYCGFNQYKGEIYPGNHESIISKEEYDKTQSELKIRQRTAAENVNPRPFQAKYILSGIAQCGYCGAPLKIMLGVKRKDGSRLKKYECHQRHPRTLRGVTTYNDNKKCDSGFYYKDKLEAYVLTEISKLQDNAVYLDKIFSGDNAETIDRESYKKQIEELSKKLSRLNDLYIDDRITLEELQSKSAEFISMRGTLETELENDPALRKNKRKADMRKLLNAEKIFSMDYEGQKVLVRGLINKVQVTAEDIVINWKI

SEQ ID NO: 8173 - protein, 475 aa, synthetic construct
MKTMNKVAIYVRVSTTNQVEEGYSIDEQKDKLEAYCKIKDWKIYDVYVDGGFSGANTQRPELERLISDVKRKKVDIVLVYKLDRLSRSQKDTLFLIEDVFAKNDVAFISLQENFDTSTPFGKASIGMLSVFAQLEREQIKERMMLGKEGRAKNGKSMSWTTIPFGYDYSKETGVLSVNPTQALIVNRIFTEYLNGKPVVKISRDLNAEGHVGRKRPWGETITKYLLKNETYLGKVKYKDKVYEGQHEPIITQELFDLVQLEVERRQISAYEKYNNPRPFRAKYMLSGLMKCGYCGASLGLRYTRKDKNGISHHKYQCRNRHSKDLEKRCESGWYSKEELERVVIKELERIKFDPKYKNETLAKKEETIKVEEIKKQLERINNQVSKLTELYLDEIITRKELDEKNDKIKTERQVLEEQLENQKSNVLSIRKRKLTRLLKDFDVEKLSYEDASKIVKNIIKEIIVTKDGMSITLDF

SEQ ID NO: 8174 - protein, 559 aa, synthetic construct
MSKEKIKVYLYTRVSTSIQIEGYSLEAQKSRMKAFAIYNDYEIVGEYEDAGKSGKSIEGRIQFNRMMEDIKSGKDGVSFVLVFKLSRFARNAADVLSTLQIMQDYGVNLICVEDGIDSSKDAGKLMISVLSAVAEIERENIRIQTMEGRIQKAREGKWNGGFAPYGYKLEDGKLFINEEEAVAIRTIFDQYVNTTIGANGISKYLENHGIRKIPRQNGKNPLFDAGLIRKILKNPVYNGKIAFGRRTLEKVHGTRNEYKQVEQDEYLISEGIHEAIVSDEVWQAAQVKLKSQAKKYEHVNKGKDTRTHLLSGIVKCPICGVGMFGNKCIKKKKDGTKYKDFYYYGYKHRQMIRGHKCTFSKQIREELLDDAVAEVIVKIVSNPKFASMMQEKINMKVDTSEIEKEIDNYQKELRKSHSTKFKLIEEIDNLDVEDKHYKRRKQDLDDRLYRMYDKIDELESSLIDAKAKKQTIEAEKLTGDNIYKVLIYFDKLYKVMNDVERRQLISALISEIQVYEEKQSNGQWLKSITFKLPIIEENLNIGLDNDEQVECVSLLEKRS

SEQ ID NO: 8175 - protein, 658 aa, synthetic construct
MIDISFDKTLFKGICIPYARFSSEQQAEIGRKSLERQIGEAKRYAIQNDLFLNDDLIFADKGVSGYALQGGVAKTFEKGQMFTMLSLLQKVPAEERQNVYITFHNFDRFSRMSPDEAQKHFQEILNQGFNIVTTIDDCVYTRKDTDMDKMVLSIIHMCSAHYESEVKSKYVLDAYQRKRDVIEYLYNSPSQKGKHKHIGIKAYCPTWIKSEEVIYKYEDADGNEKLEALYQFSIDEDKAKVINKIFDMKIAGLGHTKICKQLNDSGVDTFQKGNYRKAKKWHIFSIHNLFKNEHVIGHTFLNQRRSVDFFDEEKNQFKTEQVKQIATAKLHDYYPYVVSEDKFRLAMKTLEDNKSSETRSEGKDKTHLFSQLMKCSCGGRMVFKSTKKKNVKKVDDYFEYLRCERSILNDGCEAENINYKAFEQQFVKYARHIDIESIVSDLSEALNDEYSLLSGKLSNALKEQDKAKLKATGLSKTFNSAINQGLDGSFVLDQIGENDKRLAQLAIEIADLERELRSAKPTEAKVEIPTLNKSLKSPNFEKVLEARKEINSYLKTKIRWLEVCSTKYHKFVIVCMVDNKIRTFSYQDEFASDLMFNSIKINTDSLSKNLADGLMIQLIQAVRLSLQGQTEVISNNDLIKYIVEVKRRYILDCESEFS

SEQ ID NO: 8176 - protein, 661 aa, synthetic construct
MFSFDKNLYKGICIPYARFSTKSQSKVGKKSLERQLGEARRYAEQNNLFINEDLIFADKGVSGRSLSGNLAKAFKKGQMQVMLAMLDDVPAEERQFVFITFHNFDRFSRMSPDDAQAYFNLILQKGFNIITTIDNQLYTRNNKSLSSMIISIIKMTTAWQESEVKSIYVKDALARKKEIVDYLYNHPSQKGKHKHIGVVQPSIPRWIKQENITYEYVDQNGLKKVDTFKRFTLHEQKAKIVQYIFELRLSGLGHTRISQRLNEEGIPVFDQGKFKEAKHWHGYAIQNILVNEKVLGHLVLKSYKEEEFLCEESKTFKKRKVSVDSTGKLHNYYPAAVTEDMFIRANNVQLNKKSKPKPIGRIGERTNIFARIMVCSCGGSLQYHRTVKKFKNHERIKEYLRCLNAQFKNKCNCSGINYTELEESFFRFVNHLDFRSICAVGAGSVDNKIQSIEMQISESETVFNKLKLTKQGLEKTFNSAIEKGMDATFVLNSISQNDEQQKEVKSKIEDLGLHIKKLELSKQNTVDEIIDMQAYSKDLKKADMDTKIKMRKKINDFLSSHIEHMEVCSNDYQRFVIVCFGDNIIRTYAYSDNFASDLMFNSIKVNFEGLNATQSKFLFVNYLKIIRESLKGERGAVSRLDMLNDLKQAKELYYNNLGIEL

SEQ ID NO: 8177 - protein, 507 aa, synthetic construct
MKRVISYIRFSSERQAKGDSLRRQSKMVTDWLKAHPEYYLDQDLSFRDLGVSGFTGKHLKGGLGDFLTAIEKGLVKAGDTLLIESLDRLSRQDIDIASELLRRILRAGVDVVTLSDGEHYTKESLKDPLALIKSILIMQRAHEESLRKAERIQAAWDAKKEAAKAGIKVSKRCPAWLKLNDDRKSFSVIPEKVETVKRCFQLRLEGKSIWEIVRTLNDEGRQTLNQHKAGSFGQSSVQDLLKNRSVIGYFTPKGCEEIAGYYPAIIDETTFYKVQQLSYARYGRKPASDKPLSVNLFKGVIRCSECGHALIITGFSDTRSGIYRCPLRNENRCSAKGLSRKQTDGTLLALLSRLDRFDSDTTNIIDTLKLHREHISSNIEKLVQLSLEIEDLNAITNKLKQLKNELSQVDADIEKETQRLKSIDVGCLSDCDLTTKAGRIEAQLIIKSAVKEVVLNTAKRRCKVTFHNGKVIDLPITENPSEDVTEAIQSLSEVTERGLIDVDVVEI

SEQ ID NO: 8178 - protein, 537 aa, synthetic construct
MKAAIYSRKSKFTGKGESVENQIELCKSYAKNNGYDDIYIYEDEGFSGGNINRPEFKSMMKDAAAKKFDAIICYRLDRISRNVSDFSTLIDELKVLGIDFISIREQFDTSSPMGTAMMFISSVFAQLERETIAERIKDNMYELAKTGRWLGGTPPFGFSSEPIYYLDNNSKQKKMMKLSPINEEISLVKLFFEQYLTLGSLGKLQKYLIQNDIKTKRNSAWDIKALQLLLRNPVYVQSSELVISYLSIKGATVFGDPNGNGILSYNKKDSKDKYKDISEWILSVSKHEGVIDDNLWIKVQRQLDKNKDLAPRLVNGSEYGVFNSVLHCAKCGGKMIQKQGHVSRKTGEILRYYICINKINPSDNTCDSKNIRLDKLEKSVMKELFKATDNKGSLIKAIEEYKKSLESEAVDKSSIKSYEKQISQKELQVKNLIDKLSLNPNIYDLLSSRIEELNKEIKELKFKKFELENTNSNLKAAIKEINASTSMLLNFKKLWENADYSMRKLLINSFVDYISYNSDTQEVVIKPFCTNKKKGAL

SEQ ID NO: 8179 - protein, 526 aa, synthetic construct
MKKINNVALYIRVSTIDQANFGYSISAQTKLLKEYAEQNSWTIYDTFIDSGISGKATNNRPALQKLLNEVKQGKFEMVLVWKINRLARNIIDLLEIADFLKKHQVSLQSITEQFDLSTPLGEFTLQMMAAVGELERKTIAENMQLGRQQRNRQGIYCGSKILGYETVTTNVHSKRRGTTEIKIVPSEARIVKHIFKMYADGFGYKAITNDLNKNGFRSKYNKHFSTNTIRTILNNVVYLGKIRYFDPKVQQEQILDGQHEPVIESQLWDKVQNRLCSKQRVVKIEQRAFPLTALLRCPDCQSSMIPFHTKGYRKDKDSVTYHYYICNQYQNKGIKACKPNSVPADRIERLVIDRIQQFITYPKLLEDIVDKINMKAINEVSSLQKKISQIDKKLKGLDRNRKNYFQLFEEEFIDKSTFVERIDSIKSQVKSFSDIRDQLENEISKALSKQIDFHKVESTIKHFEKLWHLASPDKQKQLLSALINKIILQKVDNSKSVNIHFNRDVLPYIIEGVMDTNLSLEGGHSI

SEQ ID NO: 8180 - protein, 545 aa, synthetic construct
MNQPTRVAIYGRVSTEEQAEHGYSIDAQLDTLQTYCKMHQKIVYKEYVDRGISGKSMEGRYELQRLLLDAKNKEFDEVIVWKINRISRRTIDLLKIVDDLNRYGITFRSFSENFETETPMGRFALQMLGAVGELERNTIVDNVKMGMKERARTGQWNGGIVLGYHSTKSYGDRKRNNSKLETVPSEAAIVRKIFGLYASGKGLKAIANQLNHEELVTKRGNSFSTSAIKEILLNPIYIGKIRFNRYENWNEQRRKGKSDNPIIVDGEHEAIISPELWEKVQHLQRKKSKVHPRHFEGNYTLTGLLRCPQCGASMVSSRTINRSKDGEKIVRRYYSCGAFRSKGSSVCSANSVRADESEQYVYQRIKEVIIHPKILKDIVSQINNDKKLNVQPLRKELQQIDKKLEQYEAKRKKYFGLYEEDSIDKELLVERLDELKKEADLISTRKSEIEWQLQEDNSQTLDYSFVKNILSQIDKLLQSASADKIKALLHLAIKQITVKERKIDTIVLAFDENNVNHFLSCSPSDRNSEGAFALPKQKHRFTIVI

SEQ ID NO: 8181 - protein, 619 aa, synthetic construct
MIYAYCRVSSGKQLSGLSMSLQNDIKLLNELAEKYQTKVSDKVYSDEGLSAYKGDNLKGSLGLLLKDIRSNSVMAGDIIVMRHLDRLSRLGLTAALNIYGEIMAASVSIHTTMDNRLYQKDDQISQILATLSFHTANEESVKKSYLTNRHALERVNQFKAGVKGDDGASFDVGVGGVPFYIEMKNKCVYKSQYFQTAQNLLEFYLEGNGLTKCVDWLAARGLDYTRTGLSNLLKSPALFGQLDITLQGENHKLDGFYPAVCTPERFNLLQARLSQRKASNSGRQQYTLLAGNRFLYCDCGASMSASHTADRGIKYYICINNKCSKTVQRYALDNLVLKHLITHIFVHDDGKRDEILSKLTYEQDQLSRKTQLLFSLGDLADFATAEASLKIHKDKIDALKIQLSDISSGDLKLEDYSKWQMSISEILTGDSEIQHQYRDRISVAVKNVTCHRDGLVEIKTVDGQSSYYYFPKQMINTGRRLGMKLLVVSQKEKDEISIEMNLGGVVFTEVEVHEKKYADKIDCFNPLLTLYSEEHTRYTAQDRFTNKVIEVVRTEGAIIWSKKNLMPFVSEKQWQSYKTRAFEDIARQVMVREVNHKTSKGKTKLIKVLSYEGGDTTNF

SEQ ID NO: 8182 - protein, 487 aa, synthetic construct
MAYAVYVRVSSDKDEQVSSVENQIDICRYWLENNGFEWDENAVYFDDGISGTAWLERHAIQLVLEKARKKEIDTVVFKSIHRLARDLKDALEIKEILLGHGVRLITIEEGYDSHYEGKNDMKFEMYAMFASQLPKTLSVSITAALAAKVRRGGYTGGFVPYGYEIIDGKYAINEEEAALVREIFELYAQGFGYIKIANTINDKGARTRKGAPWTFSTLSKMIKNPAYKGTYIMQKYGTVKVNGRKKKVINPKEKWVIFEDHHPAIISHELWEKVNNKDPNKFKKKRRVSTTNELRGITVCAHCGTAMSKRNSINVSKNGKETEYSYMICNWSRITARRECVRHVPIHYKDLRALVLSKLKEKEKELDKEFCSDENQLQVKLRKLKKDINDLKFKRERLLDLYLEDERIDKDTFTIRNAKIEKEIGLKEMEIRKASNIEIQMKEKQEVRDAFALLEESKDLHSVFQKLIKRIEVAQDGAIDIYYRFEE

SEQ ID NO: 8183 - protein, 506 aa, synthetic construct
MRTVITYLRFSSATQGAEGADSTRRQNELFKQWLRKNSDAQVVASFNDEGLSGYKGKHLSGQFGDMLSRIESGEFPEGTILLVEAIDRIGRLEHLETEALMNRIIAHGIEIHTLQDGLIYTRDALSDDLGISIIQRVKSYVAHQESKQKSFRVSQKWKQRAKLALAGEQRLTRNVPGWIDPDTFKCNEHAETVRLIFKLLLDGESLHNIARHLQSNDIKSFSRRKDANGFSVHSVRTVLRSESVIGTLPASQRNDRPAIPNYYEAAIDASTFNKAQEILDKNRKGRTPASDNPLTINIFKGLFRCQCGASVHPTGTKNKYQGVYRCNNHLDGRCDVPPLKRKPFDRWMIDNFLGMIDVGNDGESERKIAALQHEVEIVTARIKKATALLLEMDDITELKAQVKGLNQKRTEIQTTIDTLKRKTSLSDKGLPQLKDIDLTTKAGRVECQLILSKHLKGLTLGKDSVTVTLQNDTEITIPTNPLPLNDGSPIFEIADKELLDIDAYQL

SEQ ID NO: 8184 - protein, 538 aa, synthetic construct
MKKNSARVYSYLRFSDPRQATGSSADRQLLYAQKWAAERGFVLDESLSLRDEGLSAYHQQHVKQGALGAFLKAVDEGRIPSGSVLIVEGLDRLSRAEPIQAQAQLAQIINAGITVVTASDGREYNRAGLKAQPMDLVYSLLVMIRAHEESDTKSKRVKASIRRLCEGWQAGTYRGLIRNGRDPQWLRWDGQAWQLIPERVEAVRYALELYKKGEGATRVVRKMEARGYVLSNWGLGGQQIYRLIKLPALRGAKRVSIDGEDYLLEGYYPPLLSDDEYYELQAVTDKRHGRRGASDIVGIVTGIGITWCGYCGTAVTAQNQISRAREDGTLNDGHRRLHCSSYSSSTGCKAASCSVVPVEKAVLAYCADQMNLTRLLEPTDDGQQVRQRLQACLRKQGEVERQLARVTEALLADDGGAAPLAFVRKARELEAELQQLHAEAERLELEQAVQGKVQTPAAAEQWAQLAADSQDIYSPAREQLRQLVLDTFSRIVVYMRGVVLDPKSKTIAVMLVSRAGQRVMLEVDRRSGAWQASRDRRG

SEQ ID NO: 8185 - protein, 570 aa, synthetic construct
MKTVAIYSRKSRFTGKGDSIENQIEMCKEHIKKFVSPKVEFLIYEDEGFSGGNTNRPAFQRLINDIKYGNIDLLICYRLDRISRNVADFSSVLDVLQEYKVDFISIKEQFDTSSPMGRAMIYIASVFAQLERETIAERIKDNMLEMAKKGKWTGGKLPLGFTSKKIAYIDEEGKKRFKVTLEHDSKDLEFVKFLYEKYLELGSLHKLETYTHENNIRSASGKIFEKSTLKIILQNPIYVKADENVFNYFENKGWSVYGEPDGLHSLLSYNKTETSKKDGKLTKRNKDESESLVAVSDIKGFIDSSLWLKVQYQFKKNKNTFPRLGKTHNALLVGKLFCGNCGTRMIIQHGRTSTKTGIKTFYYVCSLKKTSKKKLCSAHNVKTDFLENLVLDSLEKLYYKKDFINDSLKINLKENKDNIKEINTTKKLIELNKNKINSLIEKLSLDFDNVLSDILIPQIKKIKIENDVLESKLEELKLKKQESEMNRIEIDLITSLLNKCKNIKELTRTEQKQIIDCLVDSIYYYSNDNGNDKIKIKFINDIDSINTLLSDEEKRQFEKLSFYSHSMSSI

SEQ ID NO: 8186 - protein, 488 aa, synthetic construct
MKKIAIYIRKSIKGDENSISLDAQIEVIKNYFKEDCNFTIYKDDGFSGGNTNRPAFKKLMIDASVNKFDTVACYKLDRIARNTLDFLTTFNTLSDYGIDLICVEDKYDPTTPSGRLMMTLLASLAEIERENIKQRVKDSMLKLAKEGRWTGGTAPFGYKIVTIDCGKYLELVDEANIKYIFNEFVSGKGILKLSKEFNCNKQNISRILRSITYLKSTEEANKYLEKFLNYEVIGVPNGCGYLPYGNYKNVNGKKVKNNDSKLATVSKHKAVIDLDTFIKVQNRLKTFEGNPAPRISSKTFLAQMVKCKCGSNMNVILGKKKKDGSRKIYFACPKKCGNTFCDVSKIENDVLNTLKDVDLFNKIIKSSNPINKDYSKIKEPLLKEIDEKKKILDGLVCKLALANDSLTKILLDKIESLDLDINSIQEKINEIEKEEISKKVNENDIKIREMNRVNLIKNFDKMDMKERQSSIKKVINKIVWLGDAVLIK

SEQ ID NO: 8187 - protein, 502 aa, synthetic construct
MKKVAIYSRKSVLVEGSVSIETQINMCKDYINNKFHNAKFRVFEDEGFSGGNTNRPAFQKMLRMAQLNEIDIVVCYKVDRIARNTLDFLKILELFKENNVELISISEGFDPNTQMGKVMLTLLASFAEMERTNIQQRVKDNLLSIAKKGKWTGGSPPTGFKNGPNGGLEWNKQDMILDVFNMKYEKEKNSNIIKYIKEKYNHNFLGGTLATTLRKPIYVKSSPSVSLYLKTKGYIVQGDEDNIHSYLTYTDKETKYAIVSDIVGLIEPSVWISINKDMDKNISREGNRFSEKFWLTKTVRCKYCGQTFCGQTKTTKTRHYNKHGQEKIYISTYSYYSCRDAVRGKLKTCTNTKRVKQYILESKVSELIHLLKDKKTFNSSYFSNKIDNSSKIDTIKKQIKSIDKTINNLTDKIALLSNEASLIFISKLEELVKEKSILKDNLLQLELQELNSNTKKDSSLVYNNILAFNDDLSVDEKRKIAMSLFKEIIYDPETDSLDVTFM

SEQ ID NO: 8188 - protein, 502 aa, synthetic construct
MKKVAIYSRKSVLVEGSVSIETQINMCKDYINNKFPNAKFKVFEDEGFSGGNTNRPAFQKMLRLAQLNEIDIVVCYKVDRIARNTLDFLKILELFKENNVELISISEGFDPNTQMGKVMLTLLASFAEMERTNIQQRVKDNLLSVAKKGKWTGGSPPTGFKNGLNGGLEWNKQDMILDVFNMKYEKEKNSNIIKYIKEKYNHNFLGGTLATTLRKPIYVKSSPSVSLYLKTKGYIVQGDEDNIHSYLTYTDKETKYAIVSDIVGLIEPSVWISINKDMDKNISREGNRFSEKFWLTKTIRCKYCGQTFCGQTKTNKTKYYNKYGEEKIYISTYSYYSCRDAVRGKLKTCKNTKRVKQEILESKVSELIHLLKDKKTFNSSYFSNKIDNSSKIDTIKKQIKSIDKTINNLTDKIALLSNEASLIFISKLEELVKEKSILKDNLLQLELQELNSNTKKDSSLVYNNILAFNDELSVDDKRKIAMSLFKEIIYDPETDSLDVTFM

SEQ ID NO: 8189 - protein, 450 aa, synthetic construct
MKNIAIYIRKSVKGDDNSISLESQTEVIKHYFKNENKFTIYKDDGFSGGNTNRPAFQKLMHDATQNKFEAVACYKLDRIARNTLDFLTTFNTLKEYGIDLICVEDKYDPSTPAGRLMMTLLASLAEMERENIKQRVADSMLNLARSGRWTGGTPPFGYKVITIDGGKYLELEDKNNILYIFDEFINGKGILKLSSEFNCDKKKISRILHNITYLKSSTEANTYLKQTLKYEIVGTPNGCGYLPYGKNKVINGKKVKNTDGLKIAAISKHKAIIELETFIKAQEKLKTFEGRKAPRISNKSFLAQMVQCTCGSNMLIVLGHKKKDGTRKLYFSCPNKCGNTFGDVKEIEEDTLLTLKDVNFFEKINKNKPTINNKDSSRIKASLLKELENKKKLLDGLVQKLALVDSDLANILIDKMETLNENIKELQSKIDLLEKEEISLSYNKEDLNLK

SEQ ID NO: 8190 - protein, 517 aa, synthetic construct
MNNNIACYIRVSTDKEDQQKSLDRQRILLKEQFKDSNISLYSDTGTGTSFNRVGFKQLLFDCGLNARKLRDGRITFEADLTRDSIYNEIIVLSSSRFARNIAIIDILRVLWDYKKVNVKFLDVQKDSSNSSDMILLQMFFAMAENEVKETSVRTKRGNKTSIIQNRIRNNSIFGWDFDRETNSLIANLKEKVIVEFIFKTSLTNGLKKTAKIVNEKGYRTKKGNLWTDSTIKTLITNPKYKGYNVRNKFNNINLFTESKTKYVKKEDWIIQKNERIEPLVSEELWEEVQNALEERCRSGNRGQNARIYDTRGKIKCNCGANYTRCVTTRVADKPREQHYLICGNKKKYGKSYCSSENITVGMLDNFIEEQRMNYYKNIQLQIQIKIIQLENELEKINNNEIFNTKDKENKLEILKNKLEKLIDTFIASSETMQEVLQNKINEIEKEISKLELEIANSKSINFNREKHQRDINSKITKLRDNLKTLSNKELTRKEWLDKVESITINSKLDFKVKYNLE

SEQ ID NO: 8191 - protein, 590 aa, synthetic construct
MKVIQKIEPTKPKIAKRKRVAAYARVSVDKGRTMHSLSAQVSYYSKLIQKNPDWEYVGVYSDGGISGRTTESRNEFKRLIKDCKDGKVDIILTKSISRFARNTVDLLETVRDLRAINVEVRFEKENIHSLSGDGELMLSILASFAQEESRSISNNIKWSIQKRFKEGKHNGRFNIYGYRWVGQELIVEPSEAENIKLMYANYMNGLSAEFTAKQLTKMGVTAMKGGPFKATSVRQILKNITYTGNLLLQKEYTPDPITGKSRYNNGEMPQYFVENHHEAIIPMEEWQAVQDERLKRRKLGAHANKSINTTCFTSKINCGNCGKNFRRSGKRQGKNKELYHIWTCRNKSEKGVKVCNARNIPEPALKKYATEVLGLEVFDEQIFIDSIEEIVASEGNMLQFKFYGGREVEVKWTSTARKDYWTPEVRRAWSERNKRKESRTWNGRTTEFTGFVVCGRCGANYRRQAVTSKTDGTVRRKWHCSNSAVACNEGKSRNCIYEEDLKVMVAEILGIPTFNEPTMDEKLSRISIIDTEVTFHFKDGHDEVRTFEIPKKKARTFSEEERARRRLVMKKRWEEKKRDEESNNDTSDNH

SEQ ID NO: 8192 - protein, 525 aa, synthetic construct
MGKVRIIPAHQQKGNSVHHPRSPQSFGKLRVAAYCRVSTDYDEQASSYETQVDHYKELIQKEPPWEFAGIYADDGISGTNTKKREQFNKMIAACKVGKIDLIVTKSISRFARNTIDCLKYIRDLKAINVAIFFEKENINTMDAKGEVLITIMASLAQQESESLSQNVKMGIQYRYQQGKVFVNHNHFLGYTKDAQGNLVIEPEEAKVIKRIFYSYLNGMTMKQIADSLKADGILTGGKTKNWRSSSVAKILKNEKYMGDALLQKTYTVDFLNKKRVKNEGIMPQYYVENDHPAIIPKSVFMQVQQIIKQRRNGITTKNGKHRRINGKYCFSQKVFCGKCGDILQRNMWYRQEKVAVWRCASRVRRNKTGRRCMIRNVKEPLLKEATVEAFNQLIEGHELASKQIKANIMKVIKNSKGPTLDQIDQQLEEVQMKLIQAANQHQDCDALTQQIMDLRRQKEKVQSRETDQQAKLHSIDEINELVNLHKYGLVDFDEQLVRRLVEKITIFQRYMELTFKDGEVIRVNM

SEQ ID NO: 8193 - protein, 525 aa, synthetic construct
MSKVHIIPAHQQRGNSVHRLPDEPQSEKLRVAAYCRVSTELDEQANSYETQVSHYKELIQKDPSWEMAGIFADDGISGTNTKKREQFNKMIAACKAGKIDLIVTKSISRFARNTIDCLKYIRDLKAINVAIFFEKENINTMDAKGEVLITIMASLAQQESESLSQNVKLGLQYRYQQGKVLINHNHFLGYTKDKDGNLVIEPEEAKTVKRIFYSYLQGMTMKQIAESLKVDGVLTGGKGTNWGSSGVNRILKNEKYMGDALLQKTYTVDFLTKKRVKNKGIMPQYYVENDHPAIIPKSVFMQVQNLIRQRRNGITTKNGRHRRVNGKYCFSQRVFCGKCGDIFQRNMWYRPTKVAVWRCASRIRRSKKGRRCMIRNIKEPLLKAATLDAINQLIESHELADKQIKANIMKIVKNSKGPTIEELDKQLEDAQLKLIQAANHHQNCNELTQEVMDLRQQKEKVQSLETENQVKLHNIDQVSDFVDEHQHGIQEFDPHLVRRLIEKITIFQRYIEFTFKDGEVIKVKM

SEQ ID NO: 8194 - protein, 553 aa, synthetic construct
MSTITKIQEFQRNVQQLRVAAYCRVSTDNIAQLESLENQRQHYQEYIRRHPNWQLARIYYDEGLSGTKTQQRKALNELLADCNNHRIDLVITKSISRLSRNTTDCLQIVRQLQQLNIPIYFEKERINTGEMASELFLSILSSIAQDESHSTAGNLRWSIRKRFADGSFRVSSAPYGYFIQDGNLMINPHEVRIVKTIFNHFLQGQSTSQIAKQLNIRQIPTQHGHHWWSSTIINILRNINYTGDMLCQKTYRDDQYRRHINHGELAQYLIEDHHPAIVSHQDFDRAQDLLKHIAQKRHIEVGSHKYQRHYLFTRKLICGYCGTTFKRQTRSNRICWACQKHLHSATQCPVKAISEEGIRNAFCTMMNKLVFSKKFLIQPLLQKLREQINADTDGKLNQFTKLIEANDQKAATLTKLMQEGLIDKSLYINQTAKLEQSSYQYQEQIKQINSNQTDNANNLEDFRDLLRWCQQGQLLTRFDPKLFQTYVRSVKVLNQYEITFQLKCGLNLEEHLTKKAMVNEHFYRDVIHQRFNEPVKQAEYLYSTIKSEVDLIE

SEQ ID NO: 8195 - protein, 462 aa, synthetic construct
MEKNITVIPAKKVHQTVISQIQKKIRVAAYCRVSTDQDEQLSSYENQVNYYREYILKHEDYELVDIYADEGISATNTKKRDAFNRLIQDCRDGKVDRILVKSISRFARNTLDCIKYVRELKELGIGVTFEKENIDSLDSKGEVLLTILSSLAQDESRSISENSTWGIRKKFERGVVQLNTTNFMGYDKDEKGNLIINHEQANVVRYIFDRFLEGYSPEFISKELREQEIPGCTGKAKWCPSAIWKMLQNEKYKGDALLQKTYTVDFLTKKRIDNDGQVNQYYIENNHEPILDREKWEIVQLEIARRKKFREQHKLQFYIMQKENNPFTTKVFCAECGSAFGRKNWTTSRGKRKVWQCNNRYRIKGKIGCLNNHIDEEMLEKAVVMAVEQLSKNVDLLHGKWNKVLEENRPLEKHYSLKLAEMINKPLWEFDSHEMCQVLDNIIIAEDGQITVRFLEGTEVDL

SEQ ID NO: 8196 - protein, 521 aa, synthetic construct
MNRKVTTIQANKQLSHQSKLPSIKKKKVAGYARVSTDNEDQTSSYETQMKYYEEYISSRKDWEFVKMYSDEGISGTNTKKRLGFQEMVNDALAGKIDLILTKSVSRFARNTVDSLSTVRKLKDVGVEIYFEKENIWTFDSKGELLITIMSSLAQEESRSISENITWSKRKQAAEGKVTFPYNNVLGFKPKEDGGFEVDKEQAKIVRYIFGQFLSGKNPNQIAKHLTENKIPTPRGKTRWSYSSVRSILTNEKYKGDALLQKYYVADFLNKTQKRNNGELPQYYVENSHEAIIDKEVFDAVQVQLSENKKWYTEKNYFGKIRCGCCGSSYVRHLWHSNDKYRETIYRCKDKYKNEEKCDTPHIRDDEIQRWIVSALNKVIDNRKEIIGNIKLLIKMIKEDRGLDDEIIQLEEKLENIRTDVEKLIITNSKIAQDQEEYTRKYNKLIEEYKLLEKQLEQRNLDLLSKNKRVRELKIFIDSLEKQDELLTEYDTKLFNYLVDTIIIHEEKRIEIHLKNGEVISI

SEQ ID NO: 8197 - protein, 521 aa, synthetic construct
MNRKITTIQANKKLSHQSKLPSIKKKKVAGYARVSTDNEDQTSSYETQMKYYEEYISSRKDWQFVKMYSDEGISGTNTKKRLGFQEMVNDALAGKIDLILTKSVSRFARNTVDSLSTVRKLKDVGVEIYFEKENIWTFDSKGELLITIMSSLAQEESRSISENITWSKRKQAAEGKVTFPYNNVLGFKPKEDGGFEVDKEQARIVRYIFGQFLSGKNPNQIAKHLTENKIPTPRGKEKWSYSSVRSILTNEKYKGDALLQKYYIADFLNKTQKRNNGELPQYYVENSHEAIIDKEVFDAVQVQLSENKKWYTEKNYFGKIRCGCCGSSYVRHLWHSNDKYRETIYRCKDKYKNEEKCDTPHIRDDEIQRWIVSALNKVIDNRKEIIGNIKLLMKMIKEDRGSDDEIIQLEEKLENIRTDVEKLIITNSRIAQDQEEYTRKYNKLIEEYKLLEKQLEQKNLDLLSKNKRVRELKIFIDSLEKQDELLTEYDTKLFNYLVDTIIIHEEKRIEIHLKNGEVISI

SEQ ID NO: 8198 - protein, 531 aa, synthetic construct
MKEIIKIDSTIRKTGFKKKTRVAAYARVSSDSDEQLLSLEVQKEHYENYIKSNPCWEYAGLYFDEGISGTKIGKRESLKQLLKDCQSGQIDRIITKSISRLARNTVDCLEIVRKLTGLGIYLYFEKENIDTEHMSSELMLSILSSIAQSESRSISENSMWAIQKRFENGSFIISCPAYGYKNENKKMIIVPEQARVVKEIFNMALSGMGGEAIARVLTDKKIPAKRGAKWSSTTVNAILNNKTYTGDVIFQKTFTDDNFNRHKNCGEKKQYVIENHHEAIISHETFNLVKEIIAWRRNENNIVCGSGKYNKLYAFSGKIRCGECGSKCKRRIIYQHNKAYGIWVCITHLEDIHACSQKSVMESYLKISFLQMLNKLKAGYVQILTPFIKSLRNVNSKDGLNKVIELEEKIAKLQEQEQVLSKLFASGYIEMDSYYLESNQLKTEIDTCLKEKLKLSNSLNGNLTHLNEVQKLQRFVSVTEVFSEFKDEDFLDFVDGIVVKSRTRFLFILKCGLELEEEVKETWHASHMVTE

SEQ ID NO: 8199 - protein, 525 aa, synthetic construct
MSANVIIIPPRKIAGNTVDKHEDKPRLRVVAYCRVSTDSEEQATSYDTQVQHYTDYISRNPLWEFAGIYADDGISGTSTKKRVGFNDMIHDCMSGKVDMVITKSISRFARNTIDCLKFVRQLKDKNIPIIFEKENINTMEASGELLLTIMASLAQQESASLSQNVKLGLKFRYQEGKVQINHNWFLGYTKDDEGNLVILEQEAKVVRRIYREYLEGASLRDIAEGLEKDGVKNGAGHLKWNLSNIKGILQNEKYIGDALLQKTITTDFINHVRIKNDGTEPQYYVKDSHTPIIPRDIFFKVQEEMLRRANMFSGEENKKRRVYSSKYALSSLCVCSKCGDVYRRIAWNNRGVHSVVWRCCTRVENGPSACDAPTVQENELQSAIVKAINKVFSISDEVLDTLKNNIREIIAGNNLSEIETVDKRIADKQAILLTLLKAKKDYAKIADEIDELKGKKQQLLIEKAGQEDAKRRIREMEDFLKSERHDISEYDEKLVRKYIKKIKVYEDRFSVIFKSEISVDVERAS

SEQ ID NO: 8200 - protein, 416 aa, synthetic construct
MAHISVVTPVRPPTPKLVNVAAYARVSTNGTEQLASLSAQVSYYSRLIQSTPGWAYAGVFIDEGITGTSTKSRQGLADLMDAARGGGVDIVLCKSISRLARNTVDLLATVRELKDLGVAVRFERERIDTLSADGELLLTLLASFAQEESRSLSQNVKWAIRNRYKNGGTNSFVVYGYHWANGQFTIIDEEAKIVRLLFANYLDGISPEKTAGMLNAEGKRSRGGGRFYGSVFRRMLENERYKGCQMLQKMYRPTIQAPTRSFNDGELPRYWVEQALPAIIDQAMFDTVQAEIAHRREVGPAATPSKNTGVFTGRICCAACGKNYQRKTRTYKSGTSYKFWRCWSACTGNGNPCRGHNLRETLLEQACADMLGTQGFDPVQVGEQVVMIEAFEHQLTFHLADGTMTPVGLTSEGWLA

SEQ ID NO: 8201 - protein, 525 aa, synthetic construct
MSRTVTAIPATKKVRSAAASSGVPARRRVAAYARVSTEMEEQTSSYEAQIDYYTTYIRSRNDWQFAGMYCDEGISGTSMKRREGFQTMIDDALAGKIDLILTKSVSRFARNTVDSLTTVRKLKDAGVEVYFEKENIYTFDAKGELLITIMSSLAQEESRSISENVTWGHRKRFADGKIMVPYKSLLGYKKGADGNLVIAETQAPTVRLIYQLFLDGMAISEIKTELAQRKILTPRGKEVWSTSTVRSILSNEKYKGDALLQKTFTTDFLTKKMKVNEGEVPQYYVSGNHEPIIAPRIWDQVQYELATRHGNISSAKVGLFSTRLKCAQCGSWYGRKTWASNTKYKYTVWQCNHKYAGEHPCSSATVKDEQIKDSFVQALNQLIARQPRQSQLLQIFDSMFDTSRLEEQAAACQTKIVELTEQIEALIAENQQRALDQDAYQNKYTELDTACRKTLACKASLEADIAANTAKHAAVTTALGDLAGEPVSEFRPAQWSALIDHAIVDEDTIRFVFRVGEQVRIALKG

SEQ ID NO: 8202 - protein, 413 aa, synthetic construct
MAVRLIKTKSNRKKQRVCAYTRVSTTNSSQLDSLENQKAYFENLYTNRVDVDFLGVYYDKGISGSKAERPSFQAMLEACRQGQIDLIHTKSISRFARNTMTVLEVSRELKVLGVGIYFEEQNINTLSNEGEVMLSVLASLAEEELQSMSDNQRWTFQRKFQRGEMVINTKRFMGYDVDDKGELVINEAEAQIVRRIFQLYLDGMGMHRIAKLLNQENVPTVTDAKWHDTTVRNILKNEKYKGTVLLQKYFHVGINGPKRLNQGQVEQYLIEDNHEPIVSKEVWQAVQDKLASKTWKQGVNKHYRFTSMLKCEYCGSTLKRQVTYKKQIVWCCSKYIKEGKASCRGMRVPEKAIEEWKLKTPVTVIERNEYGQKHYSYSSQESAADGHPSASNQNKSGSLLSGVHRPRRTAIKL

SEQ ID NO: 8203 - protein, 559 aa, synthetic construct
MKTKLYSYIRFSSMRQNDGSSYERQIRMAREVATKYDLELVNDYQDLGVSAFKGANSKTGALSRFLDAIGRSVPVGSWLFIENLDRLSRADIVSAQELFLSIIRRGITIVTGMDNKIYSLDTVTANPMDLMFSILLFIRGNEESQTKRNRTNSSALIKIKAHQENPQNPAVAIEEVGKNMWWTDTTSGYVLPHPTYFPVVQEIVELRKNGRSTAEILDHLNETYTPPPAVSNKKHSKWSRAMVERLFHTRALIGIKEVSVDGVNYELKDYYPRVIDDATFYHLKKNIGARAWNFGDKEEVKPIPLLSGIGLLKCDHCGCAMVKVKGTNKRSDQYRYTCDATRSRRLDCEHPNWSFRGDQLEKAVLQLLADKIWIAEDKANPVPALKVQVDEISRKIDNLITLSAMTGATKELADQITTLNSERETLYNQIKMAEEEMYSVDSQGWEKLAEFDLEDVYNEERLKVRFKIKQALKRIGCSRIDRNKNLFVLEYIDGKTQRVVIENSRGTRKGQIFVDLKTINDRQILESNGLVLHPCLDMLTDKNWKPEEEIPGPLQEFGI

SEQ ID NO: 8204 - protein, 507 aa, synthetic construct
MKRAISYIRFSSEKQSRGDSLRRQAKMVTDWLKAHPEYYLDESLTFRDLGVSGFTGKHLKGGLGDFLTAIEKGLVKAGDTLLIESLDRLSRQDVDQASELLRNILRSGVDVVTLSDGEHYTRESLKDPLALIKSILIMQRAHEESLRKAERIQAAWDAKKEAAKAGIKISRRCPAWLKLNDDRKSFSVIPEKVETVKRCFQLRLEGKSIWEIVRTLNAEGHQTLNQYKAGKFGQTSVQDLLKNRSVIGYFTPKGCEEISGYYPAIIDETTFYKVQQLSYARYGRKPASDKPMAVNLFKGVIRCSECGHALIITGFSDTRNGIYRCPLRNENRCSAKGLSRKQTDGTLLALLSRLDRFDSDMTNTIDTLKLHREHISSNIEKLVQLSLEIEDLSAITSKLRQLKNELSQVDADIEKETQRLKSIDVGCLSDCDLTTKAGRIEAQLIIKSAVKEVVLNTAKRRCKVTFHNGKAITLPITENPSDNVTEAIQSLSEVTERGLIDVDEVII

SEQ ID NO: 8205 - protein, 538 aa, synthetic construct
MAKNGARVYSYLRFSDPRQATGSSADRQLQYAQRWAAEKGLVLDESLSLRDEGLSAYHQRHVKQGALGVFLQAVEDGRIADGSVLVVEGLDRLSRAEPIQAQAQLAQIINAGITVVTASDGREYNRAGLKAQPMDLVYSLLVMIRAHEESDTKSKRVKAAIRRQCEGWIAGTYRGVIRNGKDPQWLRWDGQEFRLIPERVEGVRFVIELFRRGYGSVRIIREMAQRGLALTDKGVTALQVHRLVRLPALMGVKVLELEGESYRLDGYYPPILTADEFAELSALVDGRVKRKGRGEIPGLVTGLGISYCGYCGTAVVGQNMMFKARSDGSLADGHRRLICVGYSHNEGCPVGGSCSVVPIEKALMSYCTDRMNLSGLLEGSDQTQAIQARLATAKAEAVLIEQQLERVSEALLAAEGGASPLIFVRKARELEEQYAGKRKEVAQAERELVAVSNRDQPGLAEAWAQLASGVEALDYDARMRVRQLVRETFERIVVYHHGMQAAGREGKVIDLLLVGKGGQPRLLRIDRKTGDWQLGFGV

SEQ ID NO: 8206 - protein, 411 aa, synthetic construct
MRTVRRIQPIKSPCKPKLKVAAYARVSDSRLHHSLSTQISYYNRLIQAHPDWELVGIYYDEGISGKEQSNRQGFQNLIKDCDDGKIDRIITKSIARFGRNTVELLTTVRQLRLKNIGVTFEKENIDSLSSEGELMLTLLASVAQEESQNLSENIRWRIQKKFEKGIPHTPQDMYGYRWDGEQYQIEPNEAKVIRKVFKWYLDGDSVQQIVDKLNQEQVLTRLGNPFTVASIREFFNQEAYFGRLVLQKTYRESFSRNPKRNKGQRNKYIIENAHEPIVTKAYFDLVLHEKERRYQLMSQESHLNKGIFRDKIFCSECGCLMIVKVDSKQVNKTVRYYCRTRNRFGASSCLCRTLGEKRLLASFKSKLGIVPDKEWVDINIKQIEYDFGHRIIWVTPVKGRKYPIEIREGRY

SEQ ID NO: 8207 - protein, 520 aa, synthetic construct
MKKVITIEATPSIIRSSSDDFSLKKRRVAGYARVSTDHEDQATSYESQMRYYSEYINGRDDWEFVKMYSDEGISGTNTKLRTGFKSMVEDALNGKIDLIITKSVSRFARNTVDSLTTVRQLKEVGVEIYFEKENIWTLDSKGELLITIMSSLAQEESRSISENVTWGLRKQFAEGKVHFPYTNVLGFKAGEDGAIVVDQDEAKTVRYIFQQALIGKSPYHIAKDLTEHGISSPSGKSHWNATTIKRMLRNEKYKGDALLQKTFTIDFLTKKKNINRGELPQYYVENNHEAIVDRETFDAVQLVLDNKGRKSSTTIFSSKLVCGDCGHFFGSKVWHSTSKYRRVIYRCNDKYNGSSKCSTPHVTEEEVKQWFVSAVNQVLDNRLEVIDNLSVLLSIGSLEAIDEQIKILETEAEVISQLVANLVSENAIISQDQDKYLNKYNQLSSKYEGIVQEIESLELDRLKKSKRNKELQDFMETLNKQEGLLTDFDELLWETMVESITINLEKKIIFKFKNGVVATI

SEQ ID NO: 8208 - protein, 430 aa, synthetic construct
MSTDQDEQLSSYENQVNYYRDYISKHEDYELVDIYADEGISATNTKKRDAFNRLIQDCRAGKVDRILVKSISRFARNTLDCIKYVRELKELGVGVTFEKENIDSLDSKGEVLLTILSSLAQDESRSISENATWGIRKKFERGEVRVNTTKFMGYDKDENGRLIINPQQAETVKFIYEKFLEGYSPESIAKYLNDNEIPGWTGKANWYPSAIQKMLQNEKYKGDALLQKTFTVDFLTKKRVQNDGQVNQYYVENSHEAIIDEETWETVQLEMARRKTYRDEHQLKSYIMQSEDNPFTTKVFCGACGSAFGRKNWATSRGKRKVWQCNNRYRIKGVEGCYSSHLDEATLEQIFLKALELLSENIDLLDGKWEKILAENRLLDKHYSMALSDLLRQEQIDFNPSDMCRVLDHIRIGLDGEITVCLLEGTEVDL

SEQ ID NO: 8209 - protein, 519 aa, synthetic construct
MKKIITIEPATVHSNKVEQPKFTKRRVAGYARVSTDHEEQATSYEAQMRYYTDYISSRLDWEFVKMYSDEGITGTNTKQRVGFNSMVDDALAGKIDLIITKSVSRFARNTVDSLSTVRKLKDAGVEIYFEKENIWTFDAKGELLITIMSSLAQEESRSISENVTWGKRKQYERGKVSIPFKNVLGFERGPNGELVVNEEEAKIVRYIFHEFLLGKNANCIAKDLTEKGIPSPTGKKKWYYGTVRRMLQNEKYKGDALLQKSFTTNFLTKKTKVNEGELPQYYVENNHEAIIDKETFDLVQFELKKRERRGSASLFSGMLVCGTCGSVYGSKVWHSNSKYRRVIYRCNQKYEGEAKCETPHVTDEEVKEWFISAINKLIENKDEVIENMKVLLEICSDTKSIQEEISASKSRMVELSDLVDSLVYENAKVAQDQTAYQKKYDKYSQEYKELEERVDTLITDLQKKKSQSKSIQEFIHHLSDKDLVTDFDEKLWYTMVDKVVISSKEEVNFHFKNGAVISK

SEQ ID NO: 8210 - protein, 412 aa, synthetic construct
MKTVTQIKTLSPSLTTKLKVAAYTRISHSSLKHSLSNQVSYYNQLIQSNPSWSFAGIYIDDSISGKTQENRSDFQALIKACREGKVDLILTKSISRFGRNTVELLTIVRELKELGVNVRFEKEGIETLTSDGELLLTLLASVAQEESKSISENIKWHVKKSFEQGLPYIPQDIFGYRWQGDTYVIEAHEAEIVKQVFQWYMDGLGVPTIAKLLNERGERTRLGNEFNKSILYEFFKQEAYFGRLVLQKTYRTDFSGNPKRNHGQKDKYIVDNAHEPIVSKEYFESVLDEKRRRSKGRYYRDESIPTLFRDKIYCAHCGVDMLLTVDKPHTDKATVRFNCRTRQHKGLDACPSKTLAEKRLIMTLSNYYRYSIDEEWVAKVKSVTFNSIDYSITVTFENGENHTLPLKKGQFK

SEQ ID NO: 8211 - protein, 413 aa, synthetic construct
MSVKKIRVNKQKNKQRICAYIRVSTTNGSQLESLENQKQYFINLYSNRDDIDFVGVYHDRGISGSKDNRPNFQAMIENCRKGMIDVIHTKSIARFARNTVTVLEISRELKAIGVDIFFEEQNIHTLSSEGEVMLSVLASIAEDELRSMSGNQRWAFQKKFQRGELVINTKRFLGYDLDENGELIINPEEALIVRQIFALYLEGYGTHRIAKLLNEKGVATVTGAKWHDTTIRQMLSNEKYNGSVLLQKYFHDGVNGPKKLNQGELEQYFIEDNHEAIISMEDWQTVQAKLNRRRWQQGRNKTYKFTGLLKCQHCGSTLKRQVSYKKKIVWCCSKYIKEGKAACQGMRVPEVDISNWTVTSPVKVIERDRDGEKYYSYSSQESADQYSSSGQEENQSSRILSSVHRPRRTAIKL

SEQ ID NO: 8212 - protein, 430 aa, synthetic construct
MSTDQEEQLSSYENQVNYYREFISKHEDYELVDIYADEGISATNTKKRDAFNRLIQDCRAGKVDRILVKSISRFARNTLDCIKYVRELKELGVGVSFEKENIDSLDSKGEVLLTILSSLAQDESRSISENATWGIRKKFERGEVRVNTTKFMGYDKDDNGRLIINPQQAETVKFIYEKFLDGYSPESIAKYLNDNEIPGWTGKANWYPSAIQKMLQNEKYKGDALLQKTITVDFLTKKRVQNDGQVNQYYVENSHEAIIDKDTWELVQLELERRKAYREEHQLKSYIMQNDDNPFTTKVFCAECGSAFGRKNWATSRGKRKVWQCNNRYRVKGQIGCQNNHIDEETLEKAVVIAVELLSENVDLLHGKWNKILEENRPLEKHYCTKLAEMINKTSWEFDSYEMCQVLDSITISEDGQISVKFLEGTEVDL

SEQ ID NO: 8213 - protein, 521 aa, synthetic construct
MKKVITIEPAKQVSHKVDLPSFTKRRVAGYARVSTDHEGQTTSYEAQMKYYTDYINSRSDWEFVKMYSDEGISGTNTKARIGFQRMVEDALDGKIDLILTKSVSRFARNTVDSLSTVRKLKEAGVEIYFEKENIWTFDSKGELLITIMSSLAQEESRSISENVTWGRRRQLAEGQVTFSYSQVLGFKKSDTGGFEIDHEEAKIVRYIFHQVLLGNNPNKIARELTAQGIPTPQGKRKWSYGTVKRMLRNEKYKGDALLQKSFTTNFLTKSTKPNEGELPQYYVENSHEAIIKREVFDLVQVELDKLEKKRQTSNIFTGRLFCGDCGGAFGSKVWHSTSKYKRTIYQCNAKYKGEHKCQTPHVTEEEIKAWFLSAINQLLSNRDEIIANTELLIDMAKNTSPLENKIDDLEKKLETIRQDIEDLVDRNAREAQNQELYQEQYDILVTVYQEKQKELQETRSSLEEQKSKRISLDGFIQQLKEQDDLITDFNQELWQTSVERLDIKVGKKISLTFKNGVRIDL

SEQ ID NO: 8214 - protein, 402 aa, synthetic construct
MKRIKTIQAQKLTAIKKLKVAAYTRVSHTSLLQSLSNQVSHYSQLIQANPEWSYVGVYSDSAISGRSQVHRRDFQNLLEDCRKGKIDLILTKSISRFGRNTVELLETVRELKRLGISVRFEKENIDTLTAEGELLLTLLASMAQEESQSISQNIRWRVKKCFEEGKPYIPQDIFGYRWSGEEYVIEPHEASIVRQVFEWYMEGLSVPKIAKKLDARGERTRLGNRFTKRVIYNMFDQEAYCGRLILQKTFRDNFGSRSIPNDGQMAKYIVENAHEAIVTPEFFQQVNREKKRRAKRRPSKHDALAKLQGKVYCEHCGLDMLLTVETKSNQEKRVRYYCRTRDAKGVEACLGRTITEEQLFQAFGETLKAEDIHHISFNSVTNEAKATYRNGKEKHIIIQKGR

SEQ ID NO: 8215 - protein, 479 aa, synthetic construct
MNKVAIYVRVSTTMQAEEGYSIDEQIDKLTSYCKIKDWTVYEIYKDGGFSGSNIERPAMEKLISDAKRKRFDTVLVYKLDRLSRSQKDTLFLIEEIFGKNDISFLSLNESFDTSTPFGKAMIGILSVFAQLEREQIKERMLLGKMGRAKSGKPMMTSTISFGYTYDKYTDTLNINPAEAIVVKKIFDEYLGGRSLTKLRDYLNENEILRQGKAWNYQGLRRILSNPVYIGMVRYKNEIFPGNHQPIIDVADYDKTQEEIKKRQIEALEFSNNPRPFRAKYMLSGMAKCGYCGTPLQITLGKKRKDGTRSMRYQCINRFPRSTKGITIYNDNKKCNSGMYEKADIEEYVIGKIRLLQLNSDMLDDMFDKYPVIDVEGLERQITAIENKMKKLNDLYLNDMIELDELKKQTHALRRQKNMLENEIANNPAITQEKNKKHFKEMLGAKDITKLNYETQKSIVNNLINKVFVKSGYIKVEWKV

SEQ ID NO: 8216 - protein, 430 aa, synthetic construct
MSTDQEEQLSSYENQVNYYREFISKHEDYELVDIYADEGISATNTKKRDAFNRLIQDCRAGKVDRILVKSISRFARNTLDCIKYVRELKELGVGVIFEKENIDSLDSKGEVLLTILSSLAQDESRSISENATWGIRKKFERGEVRVNTTKFMGYDKDENGKLIVNPQQAEIVKLIYGKYLEGYSPESIAKYLNDNEIPGWTGKANWYPSAIQKMLQNEKYKGDALLQKTFTVDFLTKKRVQNDGQVNQYYVEGSHEGIIDEETWETVQLEIARRKTYREEHQLKSYIMQSQDNPFTTKVFCGACGSAFGRKNWATSRGKRKVWQCNNRYRIKGVEGCYSSHLDEATLEQIFLKALELLSENIDLLDGKWEKILAENLLLDKHYSMALSDLLKQKQMDFNPSDICRVLDHIRIGLDGEITVRFLEGTEVGL

SEQ ID NO: 8217 - protein, 413 aa, synthetic construct
MSVKKIRVNRQKHRKRVCAYIRVSTTNGSQLDSLENQKQYFENLYSNRDDIDFMGVYHDRGISGSKDNRPNFQAMIEDCRRGKIDVIHTKSIARFARNTVTVLEISRELKAIGVDIFFEEQNIHTLSSEGEVMLSVLASIAEDELRSMSGNQRWAFQKKFQRGELVINTKRFLGYDIDENGELIINPEEALIVRQIFALYLEGYGTHRIAKLLNEKGVATVTGAKWHDTTIRQMLSNEKYNGSVLLQKYFHDGVNGPKKLNQGELEQYFIEDNHEAIISMKEWQAVQDKLNSRRWQQGRNKTYKFTGLLKCQHCGSTLKRQVSYKKKIVWCCSKYIKEGKAACKGMRVPEADISNWAITSPVTVIERHKNGEKYYSYSSQESADQRSSSGQEENQSSRILSSVHRPRRTAIKL

SEQ ID NO: 8218 - protein, 413 aa, synthetic construct
MSVKKIRVNKQKHKQRICAYIRVSTTNGSQLESLENQKQYFENLYSNRDDIDFVGVYHDRGISGSKDNRPNFQAMIENCRKGMIDIIHTKSIARFARNTVTVLETSRELKAIGVDIFFEEQNIHTLSSEGEVMLSVLASIAEDELRSMSGNQRWAFQKKFQRGELVINTKRFLGYDLDENGELIINPEEALIVRQIFALYLEGYGTHRIAKLLNEKGVATVTGAKWHDTTIRQMLSNEKYNGSVLLQKYFHDGVNGPKKLNQGELEQYFIEDNHEAIISMEDWQTVQEKLTSRRWQQGRNKTYKFTGLLKCQHCGSTLKRQVSYKKKIVWCCSKYIKEGKAACQGMRVPEADISNWTVTSPVKVIERDRDGEKYYSYSGQESADQCSSSGQEENQSSRILPSVHRPRRAAIKL

SEQ ID NO: 8219 - protein, 430 aa, synthetic construct
MSTDQEEQLSSYENQVNYYREFISKHEDYELVDIYADEGISATNTKKRDAFNRLIQDCRAGKVDRILVKSISRFARNTLDCIKYVRELKELGVGVTFEKENIDSLDSKGEVLLTILSSLAQDESRSISENATWGIRKKFERGEVRVNTTKFMGYDKDENGRLIINPQQAETVKSIYEKFLEGYSPESIAKYLNDNEIPGWTGKANWYPSAIQKMLQNEKYKGDALLQKTFTVDFLTKKRVQNDGQVNQYYVENSHEAIIDKDTWELVQLELARRKAYREEHQLKSYIMQNDDNPFTTKVFCKECGSAFGRKNWTTSRGKRKVWQCNNRYRVKGQIGCQNNHIDEETLEKAVVMAVELLSENVDLLHGKWNKILEENRPLEKHYSTKLAEVINKPSWEFDSYEMCQVLDSITISEDGQISVKFLEGTEVDL

SEQ ID NO: 8220 - protein, 411 aa, synthetic construct
MRTVRRIQPIKSPCKPKLKVAAYARVSDSRLHHSLSTQISYYNRLIQAHPDWELVGIYYDEGISGKEQSNRQGFQNLIKDCDDGKIDRIITKSIARFGRNTVELLTTVRQLRLKNIGVTFEKENIDSLSSEGELMLTLLASVAQEESQNMSENIRWRIQKKFEKGIPHTPQDMYGYRWDGEQYQIEPNEAKVIRNVFKWYLDGDSVQQIVDKLNQEHVLTRLGNPFTVASIREFFKQEAYFGRLVLQKTYREAFSRNPKRNKGQRNKYIIENAHEPIVTKEYFELVLHEKERRYQLMSQESHLNKGIFRDKIFCSECECLMIVKVDSKQVNKTVRYYCRTRNRFGASSCSCRTLGEKRLLASFKSKLGIVPDKEWVENNIKHIEYDFGQRIIWVIPVKGRKYTIEIREGRY

SEQ ID NO: 8221 - protein, 520 aa, synthetic construct
MKKVITIEATPRIIRSSSDDFSLKKRRVAGYARVSTDHEDQATSYESQMRYYSEYINGRDDWEFVKMYSDEGISGTNTKLRTGFKAMVEDALNGKIDLIITKSVSRFARNTVDSLTTVRQLKEVGVEIYFEKENIWTLDSKGELLITIMSSLAQEESRSISENVTWGLRKQFAEGKVHFPYTNVLGFKAGEDGAIVVDQDEAITVRYIFQQALIGKSPYHIAKDLTEQGIPSPSGKSQWNATTIKRMLRNEKYKGDALLQKTFTIDFLTKKKNINRGELPQYYVENNHEAIVDRETFDAVQQVLDNKGRKSSTTIFSSKLVCGDCGHFFGSKVWHSTSKYRRVIYQCNEKYSGDKRCNTPHVTEEEVKDWFVTAINKVIVNRDEIIGNLEILLEISGTDALEQQMKELENEVEVVSQIILKLVTDNAMKPQDQDVYQEKYRNWVCRYNSLLTNQESMEKQYLEKSKKNKDLQEFINILKRQVDLISGFDELLWYTTVQAITIDSEKRVSFSFKNDTVIVI

SEQ ID NO: 8222 - protein, 430 aa, synthetic construct
MSTDQEEQLSSYENQVNYYREYISKHEDYELVDIYADEGISATNTKKRDAFNRLIQDCRAGKVDRILVKSISRFARNTLDCIKYVRELKELGVGVTFEKENIDSLDSKGEVLLTILSSLAQDESRSISENATWGIRKKFERGEVRVNTTKFMGYDKDENGRLIINPQQAETVKFIYEKFLEGYSPESIAKYLNDNEIPGWTGKANWYPSAIQKMLQNEKYKGDALLQKTFTVDFLTKKRVQNDGQVNQYYVENSHEAIIDEETWETVQLEMARRKTYRDEHQLKSYIMQSEDNPFTTKVFCGACGSAFGRKNWATSRGKRKVWQCNNRYRIKGVEGCYSSHLDEATLEQIFLKALELLSENIDLLDGKWEKILAENRLLDKHYSMALSDLLRQEQIDFNPSDMCRVLDHIRIGLDGEITVCLLEGTEVDL

SEQ ID NO: 8223 - protein, 413 aa, synthetic construct
MSVKKIRVNRQKHRKRVCAYIRVSTTNGSQLDSLENQKQYFENLYSNRDDIDFMGVYHDRGISGSKDNRPNFQAMIEDCRRGKIDVIHTKSIARFARNTVTVLEISRELKAIGVDIFFEEQNIHTLSSEGEVMLSVLASIAEDELRSMSGNQRWAFQKKFQRGELVINTKRFLGYDVDENGELIINPEEALIIREIFALYLEGYGTHRIAKLLNEKGVATVTGAKWHDSTIRQMLSNEKYNGSVLLQKYFHDGVNGPKKLNQGQLEQYLIEDNHEAIISKEDWQRIQDKLNSRRWQKGRNKTYKFTGLLKCQHCGSTLKRQVSYKKKIVWCCSKYIKEGKVACQGMRVPEVDISNWEINSPVTVIEGDRDGEKYYSYSGQESADQRSSSVQEENQGSRILSSVHRPRRTAIKL

SEQ ID NO: 8224 - protein, 549 aa, synthetic construct
MYLRVSTLKQVKREFNPEGLSLPQQREAVKAKAESLDADVEYEFLEKGSAQTVDKRTEFQAMLAYIKEHDIDYVIVDSLSRANRNRFDDAMMILALRNAGVEVVSATEPIDETPAGQLLHGILAAVNEFRVKSDGIDIGRKMAFKASIGGTPGRAKIGYRNVREDFEGRQVATIAIDEERAPLVRLAFELYATGTYTLDTLTEVLQDAGLTTRPFGEFPARPISRAKVGAMLRDRYYIGYVEFAGNEYQGRHAKLITPELFHRVQEVMDSQSGSGTRNRKHNHYLKGMLWCHRCGRRLVVSVAKGSYEYYFCVGRRDKSCNLPYLSAADLEQHVAEHYATVSFPADFRAVVEKTFSEQLDNAIVASTDMRDKINTRLGELAVKEDNYLELVGNPAWPKEKLTAKMQEVRDERDKLLTQLDGLDADLKVARDVIAAALTLLDQPQRLYAKCNEARRKLLNATIFTKLRVDVDGVTGEELAEPFDMLVPLGRYYTHNGTLTAPDETADAQSAEPENDCDQPDRLTTVPAGHSSNKHGLVPPVRFELTLDGF

SEQ ID NO: 8225 - protein, 505 aa, synthetic construct
MTLAFSYVRFSTKHQASGTSLERQVNASKLFCSQNGLTLSNQSYHDLGISGFKNVRRPELEQMLEAIQTGDIPSGSYILIEAIDRLSRKGISHTQDILKKILQYDVKVAFVGEDAKTLQGHILNKDSLNDLSSVILVALAADLAHKESLRKSKLVKASKAIAREKAADGEILPGKSVFYLDYDKKNKKYVFNKRVDLARKIIQMRLEGKGPRKIARLLNEENIPGPTGKQWYQMSVKRLLKSPVLYGAYQTHQIIEEKYIPVSLIENYYPALIDYQTFSQIQFDDKRVSKGRPSRHKFSGVLYCECGAVLCRKVNTYETKQGPKEYQYFNCFGAFEGRCKNNKAIKDLHIPLEKAIDKLQIKTRSVKNIKNEQIIAKREKIDQLNKMLLELEMPPVSVLKTISTLEKELQELLEQPDVQPPKSADVKTLVAIKDAEQYNLYLKRLIKRITIFQLNGPKNIRIKIEKTDGHYQSFIVNNGKIMFNADTKALQEHLRKLKEGTSDED

SEQ ID NO: 8226 - protein, 559 aa, synthetic construct
MKTKLYSYIRFSSMKQADGSSYERQKRTAAEIAAKYDLELVTSYQDFGVSAFKGANSRTGALSRFLDEIGRSIPVGSWLVVENLDRISRQSIIEAQELFLSIIRRGITIVTGMDGKVYSKESVNANPIDLLLSVMLFARANEESQTKRNRTNSSALIKIKAHQENPQNPAVAIEEIGKNMWWTDTTSGYVLPHPVFFPIVQEVVELRRNGRSTAEILDHLNATYTPPPAASHKRHSNWSRAMIERLFHTRALIGIKEISVDGVKYELKDYYPRVLDDAEFYHLKKSIGVRACNYGDKEEVKPIPLLSGVNLLKCDHCGSAMVKVKGTNRRPNQYRYSCDAMRSSRIECVHTNWSFRGDQLEKAVLQLLADKIWIAEDKANPVPALKVQIDEISRKIDNLITLSAMTGATKELADQITTLNSERETLYNQIKMAEEEMYSVDSQGWEKLAEFDLEDVYNEDRIKVRFKIKQALKRIGCSRIDKYKNLFVLEYIDGKTQRVVIENSRGPRKGRIFVDLKTINDRQILESNGLVLHPCLDMLTDKNWKPEEEIPGPLQEFGI

SEQ ID NO: 8227 - protein, 584 aa, synthetic construct
MGRKLYSYLRWSSAVQASGTSKARQVAAAEKYAREHDLEMIEIIDPGVSAFRGANAKSGALGQFLDAVDQGLIPSNAFLFVEQLDRLTRGEVDVALELFMGVLRRGITIVTGMDNKVYTRAGIKENPIDLLTSILMFVRANEESRTKQNRTNGNALALIKRFQDGLPTTIKSIGSHPWWIDDSSGSNESVRKDPVLWPVAQYAIECFLEGMSVFKVTQLLNEKYYHLYKGKAWSYANVRKLRINPAVYGMRVLTVDEKKFNLPGYFPALISEGQYLRLQKIRETTKYIGKVGEQTNNINLLAGLRIFRCGHCGGTMMAMRHKNTIRYLCEKGRGNGNDCKTWSLPGILVEHTLMLVTTIAYLDLQLKGKSDKSDYTHQINNIESLIQDISTRISRGTTLILNGLGDVEEVVTQIKELEAQRNNLTLELEVLQRKQILANDDTFESLMMDFFTYAQYGVLHDPVHEYRNKLRDIVRSSIGDVRAWKVNRRLYLSFQIKGHEDYYNFSAGATPYEWGCHLGPLPFTDDAQTITEALKVLPDERLTTLVNRYTSLNRSAEAMLEQAKEMLRVVGYPELDSKLFWPKK

SEQ ID NO: 8228 - protein, 491 aa, synthetic construct
MSVTFRVALYIRVSTDEQVKEGHSISAQQQRMLDYVRSQSWEVADIYIDDGYSAKTLERPAIQRLLEDATKKKFEVLLIYRLDRLVRTVTDLYKVMQHLEKHGVMFKSATEVYDTTSAMGRFFITLVAAIAQWERENLAERVKMGMEENFRKGGLNAAAPFGYKMLDNKLIINKLEASIVRRIFDMYETHGSSYIAKQLNNEGIFTRSGSYWTEYTIRYILENPIYSGKMRWNRRYQGGELTGKEIIIDGNHEAYVTPERQKELLRIRAVRYINREKTTSCYPFSGILYCSRCGNRLFGGEQSRKKTGPYRHYKCRGRFQKGICDLPLISEDVLEEQLLNNLNVIIDGNWKNEITVTSDSIEENIDDIDLIEKELSAIQRRKKKWQLAFGNEVISLEDLKARMEEETEKEIALKTKLSVTPEERIKNTKLSPDQIIDFARNAKKNWQYLDKEHKKMFIHTLFNRIEVEAIGEALGGPGRRTPIEITSFKVN

SEQ ID NO: 8229 - protein, 535 aa, synthetic construct
MLRQATQKITALYPRLSHEDELQGESNSISNQKRILETYAKQNGFSNLRWYTDDGYSGANFQRPGFQSMLADIEAGKVATVIVKDMSRLGRNYLQVGMYTEMIFPQKGVRFIAINDGVDSAQGDNDFAPLRNIFNEWLVRDTSKKIKAVKRSKGMSGKPVTSKPVYGYLMDEDENFIIDEEAAPVVKQIYRLCLAGNGPTKIARMLTEQEIPTPGTLEYRRTGSTRRYHPGYECKWATNTVVHILENREYMGCLVNFKTEKPSYKTKHSIENPIAKQAIFENHHEPIIDTQTWERVQELRKQRKRPNRYDEVGLFSGMLFCADCGSVMYQQRYQTDKRKQDCYICGNYKKRTHDCTAHFIRTDLLTAGVLSNLRKVTSYAAKHEARFMKLLIEQNEDGGKRRNAAKKKELEAAEKRIGELSAIFKRLYEDSVSGRISDERFTELSADYEAEQQELKERVARIQAELSKAQEATVNAEKFMNIVRKHMNFEELTHTLLREFVEKIVVHECSYDENGTRRQDIEIYYSFVGKVDLPE

SEQ ID NO: 8230 - protein, 510 aa, synthetic construct
MTKTAVIYARYSSNRQREESIEGQIRECKAFAAQNNLSIIHEYIDRAFSAKTVNRPDFLKMIEDSSKHAFDYVIVYTLDRFSRNRYDSAVYKYKLKKNGVRVLSAKEKIADDPSGIILESVIEGCSEYFLADLAQKVKRGMLENVINGKWPGGNIPYGFYLGPDKHLHFNHEQVSGVRLIFSLLASGQKYSSIVKTLNEKGYRTSFNKPWTRNSLSHIARNPIYIGTFNYQGQVFKNYVPPMVSLADFDAVQRMFNKRKRTGLVSPKSANYALVGKIYCGLCGCAYTGVSGTSRNGNKYYYYTCSSKNNGSEKSKRLDKKCSSKNLRRDELEKAILDTTIQILSAPNSIKSIAKQVAAFQEKNKDSGIVERLEKEMEEVQKKLTNSIKAIEQGIFSETIKNNIERYEHEVLELQEAISKEKLIAKAFTITEEFVEYYLTSFLKKIKKYDECKLDMFETFIRRIIVFDDHIEIQYNYNKDIPILDNHAVLPCSSMHNLVGPPGFEPGTNRL

SEQ ID NO: 8231 - protein, 464 aa, synthetic construct
MRRAISYIRFSSERQLKGDSVRRQSKLVTDWLDKNPEFYLDSSLSFKDLGKSAFSGKHLKGGLGDFLTAIEKGLVKAGDTLLIESLDRLSRQDIDIASELLRRILRAGVDVVTLSDGEHYTRESLKDPLALIKSILIMQRAHEESLRKSERVQAAWNRKKELISEGIKVSRRCPAWLKLNDDRRTFTIIPDKVEVVKRAFDLRLQGLSFWAITRTLNDEGHLSLNQYTPKQKGWSDTAVKKLLRNRAVIGCFTPAGREEVQGYYPAIISESLFYRVQQLNTGQYGRASVSSNPLSVNLFRGIIKCSECGATIVLGGYALKRFGMYRCPNRSANRCSAKAISRKQTDATILYMLALCDRFETENTDTIDSLKLQREDLQRKISKMAELAIELDDMTIITEKLRDMKNALSKLNHDIEEETKRIKAITTGSLKDIDRTTKEGMVETQLLIKGVLKEIVIDAAKRRC

SEQ ID NO: 8232 - protein, 452 aa, synthetic construct
MKLLVTYIRWSTKEQDSGDSLRRQTILIDAFYSKHKNDYYFLPAHRYVDKGKSGFHQQHKAQGSDFRRMFENVMSGAIPEGSLIVVENFDRFSRADIDTAIDDVRQILRKGVSILTLGDGELYDKSALTDPVKLIKHIIIAERAHQESLVKQKRIAQVWNHKTQLARELKKPMGKQAPGWLELSEDGSHYIVDEDKASLVNIIYDKRLSGMSMFAICKWLNEQGYPTINQRKVRISKTKKPDGNWSALSVKHILTSRSVLGYLPAKISTEDRKTVLREEIEGFYPQIVTDSKFYAVQRLLEETGKGKTSSGEHWLYVNILKGLIRCRCGLVMTPTGIRKPVYQGTYRCNGNKESRCSYGTVSRKLLDTQLCSRLFSKLSQLHDEATDTAKLDELQRRLNTVDSELEKLTEALIQLPNITQIQEALRVKQEEKDELIVQLSREKGKRPISDVL

SEQ ID NO: 8233 - protein, 603 aa, synthetic construct
MRSAHFALDSSGEESVNGSMPTSPYTAHQAPSAAVDPFAALTQSFTPKRAVSYLRVSTREQAERGGREEGFSIPAQREANKKKAQSMGAMVVKEFVERGVSGTSTNRPALQEMLRYLEAEQGSIDYLIVHKVDRLARNRADDVALNARFDNYGIRLVSTSENIDQTPGGLLLHGIMSSIAEFYSKNLSNEVKKGMDEKVRSGGSVGRAPIGYLNVREVHEGREVRTVEVDPIRAPLVTWAFEQYATGIYSVRSLTTELIARGLTMLPTAKLPEKAVETRQVHQILTNPYYLGLVVYKGAQHPGNHNALVDPGTFEKVQRILKSKINGERNRQHPHYLKSTLYCGQCDMRMIVQVAKARTGDEYPYYSCLGRHSKRTTCDLRSISIVTVEDLIQEQYDRLALRPSHADSLRRVLLAELRTFTKDTNRQRETLQTQKLEIERKQRKLLEAHYNDAIPIDMLRTEQHSLDSALNNVTRQLEALNTDLDDQARLIDQAIDLAQHSADAYRRAPDQIRRLLNQALFERIEVTMTDEDDHRVQAIVAVPFAELLGAGSQSRTDVKAFSRNEELPASDGGEFPWLQSVFLARVSNTSTMVGLTGFEPATP

SEQ ID NO: 8234 - protein, 498 aa, synthetic construct
MFSNTNMKDLIRPTIEQPRRTAAIYVRISKDRVGAGLGVERQETDCRKLAEREGYEVVTVFSDNDISAYSGKKRPGYEALLSAMKSGAIQAVFAWHTDRVHRRPTELEPYIEASDQFNIPTFTVQAGPLRLDSPSGRMGARIHGAVASYEVEIGIERQKAAKLQAAQNGEWSGGQRPFGWLPGSMELDEREATVVREMIDRCISGQSWRTIALDLNARGIRTQHDKGWNALKVRNVAIRPRNVGLRDHNGSAQYAAKWEPLVDQDTWQRMQTAIAMSQNHHKQRGPFRKHLLHGFAYCGGCGNRMNSFSKQQRDGSHTPTYRCRANDDEKGKIGCGKVSRIGAAVEDLVKEAVLFRLDSDHLGRLVASTQTEAPRLRRLLDDRQTQEVRLQEILSLYSEGDLTFDEYRTAKTTARARLNGLSRKIDAMTATSAFANAPVGTSLRDAWNGADLLWRRQLMDLVVDRVWIDPLPHPAGRKQIRYKQWVFDPAYVRIDWKA

SEQ ID NO: 8235 - protein, 645 aa, synthetic construct
MTEPSARDERFRLKKAVALLRVSSKGQLGAAMDADPDGLSIGTQRASTQTKAVSLSAEVVEFFIEPGYSASKLTIEQRPVFKDLWTYVTTHRDVEYVIVYMRSRIFRNRYEAAIVEHQLKQLGIRLVSVHEDFGEGPYADAIAGVVDVMNQLTTTVQGLDIQEKMRRKAVDLGGTLGRAKLGYLNVTIKVDGHDVNTIRLDEQRAPLVLRAFELYATNEYSIERLEATMADLGLTTKATKRYPEQPVSGSKLHTMLSDPYYIGFVRYKGQVYPGRHEPLVSHELFERVQEVLGLRSGRGQRDRVHQHHLKGFLFCQRCRKAGRTSRLIYTEPQGRGGIRYRYFVCRGRQDGVCNLPHLPVELVEQAVIDHYDTLTLPADFITEIRARMAKVVADETTTTREMHAALTRRLKELDDQEDRLIRLMRFGSMPEAKIRTELLDVQIERERAEAGLTQTSAELAAGAQVLNDALHLASDPQQLYQGADDATRRLLNETFYERFYLDDLEVVEDDKTPIMHELHDAHCAYRQHHAAVPDGLALVEERAGHPAKRAALNGEPPQKDQSGPSLASVFSVAGSTKAAHVGMTGFEPATLRSQSGCATKLRYIPFPSSGSAGASRWTGSGGGDCRQSLIGAGDGNRTRTISLEG

SEQ ID NO: 8236 - protein, 559 aa, synthetic construct
MKTKLYSYIRFSSMRQSDGSSYERQIRMAREIAAKYDLELVNDYQDLGVSAFKGANSKTGALSRFLDAIGRSVPVGSWLFIENLDRLSRADIVSAQELFLSIIRRGITIVTGMDNKIYSLDTVTANPMDLMFSILLFIRGNEESQTKRNRTNSSALIKIKAHQENPQNPAVAIEEVGKNMWWTDTTSGYVLPHPVYFPVVQEIVELRKNGRSTAEILDHLNETYAPPPAVSNKKHSKWSRAMVERLFHTRALIGIKEISVDGVNYELKDYYPRVIDDPTFYHLKKNIGARAWNFGDKEEVKPIPLLSGIGLLKCDHCGCAMVKVKGTNKRSDQYRYTCDATRSRRLDCEHPNWSFRGDQLEKAVLQLLADKIWIAEDKANPVPALKVQVDEISRKIDNLIALSAMTGATKELADQITTLNSERETLYNQIKMAEEEMYSVDSQGWEKLAEFDLEDVYNEERLKVRFKIKQALKRIGCSRIDRNKNLFVLEYIDGKTQRVVIENSRGTRKGQIFVDLKTINDRQILESNGLVLHPCLDMLTDKDWKPEEEIPGPLQEFGI

SEQ ID NO: 8237 - protein, 507 aa, synthetic construct
MKRVISYIRFSSEKQAKGDSLRRQSKMVTDWLKAHPEYYLDQDLSFRDLGVSGFTGKHLKGGLGDFLTAIEKGLVKAGDTLLIESLDRLSRQAVDRASELLRNILRSGVDVVTLSDGEHYTKESLRDPLSLIKSILIMQRSHEESLRKSERIQAAWDAKKEAAKAGIKVSKRCPAWLKLNDDRKSFSVIPDKVETVKRCFQLRLEGKSIWEIVRTLNAEGHRSMNQYKPGKFGQTSVQDLLKNRSVIGYFTPKGCEEIAGYYPSVIDETTFYKVQQLSHSRHGRKPVSDKPLSVNLFKGVIRCSECGHALIITGFSDTRNGIYRCPLRNENRCSAKGLSRKQTDGTLLTLLSRLDRFDSDMTNVIDTLKLRREHISSNIEKLVQLSLEIEDLNAITNKLKQLKNELSQVDADIEKETQRLKSIDVGCLSDCDLTTKAGRIEAQLIIKSAVKEVVLNTAKRRCKVTFHNGRIIDLPITETPSEDVTEAIQSLSEVTERGLIDVDEVII

SEQ ID NO: 8238 - protein, 508 aa, synthetic construct
MKKAIAYMRFSSPSQMSGDSLNRQRRLIAEWLKVNSDYYLDTITYEDLGLSAFKGKHAQSGAFSEFLDAIEHGYILPGTTLLVESLDRLSREKVGEAIERLKLILNHGIDVITLCDNTVYNIDSLNDPYSLIKAILIAQRANEESEIKSSRVKLSWKKKRQDALESGTIMTASCPRWLSLDDKRTAFIPDPDRVKTIELIFKLRMERRSLNAIAKYLNDHAVKNFSGKESAWGPSVIEKLLANKALIGICVPSYRARGKGISEIAGYYPRVISDDLFYAVQEIRLAPFGISNSSKNPMLINLLRTVMKCEACGNTMIVHAVSGSLHGYYVCPMRRLHRCGRPSIKRDLVDYNIINELLFNCSKIQPVENKKDANETLELKIIELHMKINNLIAALSVAPEVTAIAEKIRVLDKELRRASVSLKTLKSKAVSSLGDFHAIDLTSKNGRELCRTLAYKTFEKIIINTDNKTCDIYFMNGIVFKHYPLMKTISAQQAISTLKYMVDGEVYF

SEQ ID NO: 8239 - protein, 530 aa, synthetic construct
MKTCIYARRSTLKQGQAETIENQIKICERKAKELGLTIVDIKTDSASGTDDNNRPEVKELLKGAINKEYDCVIMKGISRIYRKTSKGLELIEKLDRHGVRVITVEEHFDSHARENRNGIGNLDTSRITMYLMFAEKESQKLAERIKFTQIEKAYAGEWNQASNAPIGYTYDSTTKKLSIDNSKSYVVRKIFKLYEQGMGMKAIAHYLNGDNPDKKTYPSSKGGRWSEYTVGYILKNRAYVGDVVYNKRSKKERPYKAPEALGKTSDDICIINDYNKEEDWIIAENAHEPLIERELFDKIQTMISTKSRRKGIRSNTSLFAGIAKCAKCGTGMTFKRGRKNSLGQVVTKDNYYCMNYIRYGKQYCDSHHVGARELQEAIFNDLEYILNSKDELQRVLDKNKSVMSLDEKKAKERIVGIQKEMDSLIKKMDKLLEKNLAGDISDTQYKTFNEKYSAELDNLTDELKKARLTIANMSEQADNEMRFRQKLSNAIGIRNKTIEEQRHILLGLIDSIVINGNDIEDISYKFERVD

SEQ ID NO: 8240 - protein, 464 aa, synthetic construct
MKRAALYIRVSTMEQAKEGYSIPAQTDKLKAFAKAKDMAVAKVYTDPGFSGAKMERPALQEMISDIQNKKIDVVLVYKLDRLSRSQKNTLYLIEDVFLKNNVDFISMQESFDTSTPFGRATIGMLSVFAQLERDTITERMHMGRTERAKQGYYHGSGIVPLGYDYVDGELIINDYEAQIIQEIYDLYVNQGKGQQYITKRMVAKYPDKVKTLTIVKYALTNPLYIGKISWDGKVYDGHHTPIIDKSMYDKAQEIIARKAQKGGEQHGNQLGLLLGITYCGKCGAKVFRYVSGGKKYRYNYYMCRSVKKMLPSLVKDWNCKQPSLRQEVVEKKVIDSLKSLDFKKIERELKQVENKTKSKITTINNQISKKHNEKHKILDLYQYGTFDVTMLNERMKKIDNEINALTANISNLEGTKSESLINKLETLKTFNWETETTENKILIIKEFVERIELYDDEVIIKYKF

SEQ ID NO: 8241 - protein, 470 aa, synthetic construct
MKGESELDKKAAIYIRVSTQEQATEGYSIQAQTDRLIKYVEAKDFILYKKYIDAGYSASKLERPAMQDLIQDVQSKKVDVVIVYKLDRLSRSQKDTMYLIEDIFRPNDVELISMQESFDTSTAFGSATVGMLSVFAQLERKSISERMITGRVERAKKGFYHTGGQDRPPAGYQFNSDNQLIINEYEAAAIKDLFRLYNDGLGKSSISEYLKKNYPGKNKWLPSSIDRMLKNSLYIGKVKFSGAEYDGIHEPIIDEVTFYKTQKEIARRKQTNTKRYNYVALLGGLCECGICGAKMANRRAVGRKGKVYRYYRCYSKKGSPKHMMKTDGCSSKAQQQFIIDEAVINNLKNIDVEAELKRRSAPQTNTSLISSQIESIDKQINKLIDLFQVDSMPLDVISEKIDKLNKEKQSMEKLLERKNKLDKTELQHRFDVLKSFDWDNSSIESKRVVIEMLVQKVIIHDNSIEIILVE

SEQ ID NO: 8242 - protein, 525 aa, synthetic construct
MAEVLYIPKTIPERTGYQIRSIRVCAYCRVSTDDDGQYHSYDAQMEYYKGLIQKNPAWEFCGIYADEGISGTSRWGREDFQRMLEECEKGWIDLILTKSITRFARNTVDTLSTVRHLKEIGVSVYFEKERLNTMTEESEGILTIYGAVAQQESENISQNVHWSAVNRFKHGTFVISRRPYGYDKDEEKELAVKKDEAAWVRRMASMYMNGMSGVRIAECLNQNQVAAPYGGLWSSEAVLRILFNEKTVGDCLHQKTYSTGTVPYRTEKNRGKKPQYFIRDDHEGILSRDEQMRLQQIKEHRLGRQARMNPRGSGETYILSGKVVCGECGRTFIRKKEQRRKGVSIKWRCPGHRSEECQCYTNEIWEVDIKNTFVNAFNTLVGHADELFGPIIQGVKRIQEANGLHEALGTLNQKKLELKEQRHILRQLKANECIDSALYFEESRKIERELSRCRSEEKQLHSRGIHQDTITGLQATLHQLQGYDGKMQAFDGDQFILLVREVSVGKERELGFHLRCGLNLYEPVL

SEQ ID NO: 8243 - protein, 542 aa, synthetic construct
MPRAERIVEVIPATWNPADESVREIRKLRVAAYCRVSTELEQQQSSYDIQIEYYTRHIMQNPNWIFAGVFADDGRSATNTFRRDDFNQLMNQCMKGKVDMVITKSISRFARNTVDCISWVRKLREKNVAVYFEKENLNTLDDSTEMILTILSSQAQEESRAISTNVKWGYARKFEKGESTGQRSYGFRKAPTGEMCIVEEEAAVIRNMARWFLDGDSLERIKHRLEDAGIETTTGKKTWSTGTIYNILTNEKIMGDVLLQKTFTADYLTKRRVKNSGQQKQYYVKNHHEAIIPKTVYYKIQEEIARRSSLKKAGTRKGKTAQGVYSSKYALTGIMVCNECGAHYRRTTWAKNGKKVIVWRCINRLEHGTKRCHESPTLKEEVIQEAIMGKLHSLSIDQEEENFLNGVKEDILRAAKVVGGACTEEEIDKTIEELRDQLMDYVGMAAREHGGENWYSDRMRKLGLQISELKRRRESIREQEKIRDEYEYLDQEISRIIGETGGATGAEFDNIFIRQIVREIRVISKNKLQIQLRTGMVLDVNL

SEQ ID NO: 8244 - protein, 541 aa, synthetic construct
MRIYIYSRKSVYTGKGESVENQIEMCREYISAKIPESDKAEIVVYEDEGFSAKNTNRPQFQKMLRDIKLNKPEYVVCYRLDRISRNVSDFSSLIEDLNSYNISFVCIKEEFDTSKPMGKAMMYIASVFAQLERETIAERVRDNMLMLARTGRWLGGTTPTGFTSEKIQEIIIDGKIKTSCKLKDNPEELKTIDCILEKFLELRSISGVSKYLIKQGIKSRTGKIFSLLGIKEILQNPVYCIADEDAWEYFTEHHSDVCFEKAECSNKYGLLTYNKRDYRKKNAPRQGMDKWIVAIGKHKGRISGKKWVAIQNILKDNIPTGTKPAIMHNDYSLLSGLIFCDKCQSRMFAKQRSGKGGNRELYDYICNNKLRGGLKLCDCQNLNGQQADDIVCEYLMQYTDENSGIYKLLEKLKQDLQGQTQKSPLSIIDDKITKCNSEMDNLINTLSHGNLGTAFIERVNARIMELDKELASMKEEKKRLQKDVSVITDREIQVDMLSTALSSFKDNFHTLAIEEKRTLIKLMVKKIVWDGKDLHIFIDGE

SEQ ID NO: 8245 - protein, 514 aa, synthetic construct
MSSKKNNTDSIRCAIYTRKSSEEGLDSEFNSLDAQRESAESFIASQISAGWVCLPEQYNDGGFSGGNVERPGLKKLLADIEAGKIDCVIVYKVDRLSRSLMDFARMMETFEQHDISFVSVTQQFNTTHSMGRLTLNILLSFAQFEREIIGERIRDKIAAQRRKGKWAGGTPVLGYDVDRSGSSPKLIVNQSEAIQVRKIYELYLELGSLLPVVDELKALGLPNKTWHTRRGKPKGGKPFDKCSLHALLTNPIYVGKVKHKNDVFEGEHEPIVDADIFDDVQTQLKANGRTPTGQVRNKHNALIRGLLFCKHCNSAMVHTFTNKRNRRYRYYRCAQLIKQGRTSCPTPSLPATEIERAVIDEIRLIAQDQDLQKEVFNQAKSLLEEDREGITRSIANLSRQLSKDQNELQRLSEAPDPSNSIATCIAGLHERIQQNETELSRLKRKVSEQMERSIEMNEVIAAFNDFDQLWDTLRPREQQRVLALLVSRIEFDASDNSISIDFHDLATSKELATC

SEQ ID NO: 8246 - protein, 559 aa, synthetic construct
MKTKLYSYIRFSSMRQSDGSSYERQIRMAREIAAKYDLELVNDYQDLGVSAFKGANSKTGALSRFLDAIGRSVPVGSWLFIENLDRLSRADIVSAQELFLSIIRRGITIVTGMDNKIYSLDTVTANPMDLMFSILLFIRGNEESQTKRNRTNSSALIKIKSHQENPQNPAVAIEEVGKNMWWTDTTSGYVLPHPTYFPVVQEIVELRKNGRSTAEILDHLNETYAPPPAVSNKKHSKWSRAMVERLFHTRALIGIKEVSVDGVNYELKDYYPRVIDDPTFYHLKKNIGARAWNFGDKEEVKPIPLLSGIGLLKCDHCGCAMVKVKGTNKRSDQYRYTCDATRSRRLDCEHPNWSFRGDQLEKAVLQLLADKIWIAEDKANPVPALKVQVDEISRKIDNLIALSAMTGATKELADQITTLNSERETLYNQIKMAEEEMYSVDSQGWEKLAEFDLEDVYNEERLKVRFKIKQALKRIGCSRIDRNKNLFVLEYIDGKTQRVVIENSRGTRKGQIFVDLKTINDRQILESNGLVLHPCLDMLTDKNWKPEEEIPGPLQEFGI

SEQ ID NO: 8247 - protein, 632 aa, synthetic construct
MPQLYSYIRWSSDRQEKGTTKNRQVAAAKAYAEEAGLEMVEILEPGTSAYRGKNRAGKLGDFIDAVKNNAIPSDSWLYCENLDRLSRDQVDEALRLFLELIGLGLTIVTGMDRKVYNRESIRQNPTDLMISILMFIRGNEESETKSNRTIGNVVALVERHKAGLPVNIKSVGRHPFWIDDSGSQYEAVKEHPVYWSIAREAIDMFLDENGIYTVKRHLDKNYPNGLKGKEWDYQVLKKMRDNRALIGERTINAGGATYKLDNYYPWLCKDEAEYLTLAERKQQNNFKAKKDKVEEIKLLSGLQVLRCSKCGGTMHSFMNHGSARYICTNGVHLQKNCSGWSISAQLVEHCTIISLLIGYMNKRLKDGIDTTVIEEDLSRKETLITDLESRITNMAQAIAIAPNVSALAVQLNAFDMERKKTVLEVDKLKERLYSLKGKGSLEVDINEFMILIQWAVFTNMQDTDRNKIRKVISSIIESVIVDKTDGCITIKIKYHFKDEWLVFGGTDRKPHWAFKVEFSSVDNVSNRDEGFLTTSNLPLFNKAVEQLDKIEQSYLDLFNTANEMLEVVGYSEISGASFWPNTGKYDRVDIVYEGNTYSIALNGRVPKDIATALESTGLTRKEFIERYRIDQI

SEQ ID NO: 8248 - protein, 506 aa, synthetic construct
MRTVITYLRFSSATQGAEGADSTRRQNELFKQWLRKNSDAQVVASFNDEGLSGYKGKHLSGQFGDMLSRIESGEFPEGTILLVEAIDRIGRLEHLETEALMNRIIAHGIEIHTLQDGLIYTRDALSDDLGISIIQRVKSYLAHQESKQKSFRVSEKWKQRAKLALAGKQRLTKMVPGWIDPETFKINEHAETVRLIFKLLLSGESLHNIARHLQSNGIKSFSRRKDANGFSVHSVRTILRSETTIGTLPASQRNDRPAIPNYYEAAIDAATFNKAQEILDKNRTGRTPASDNPLTINIFKGLFRCQCGASVHPTGTKNKYAGVYRCNNNPDGRCDVPPLKRKPFDKWMIDNFLGMIDVGNDGEAEGKIASLQHEVEIVTARIKKATALLLEMDDITELKTQVRELNQKRTDIQTTIDTLKRKTSLSDKGLPQLKDIDLMTKAGRVECQLILSKHLKGLTLGKDSVTVTLQNDTEITIPTNPLPLNDGSPIFEIADKELLDIDAYQL

SEQ ID NO: 8249 - protein, 585 aa, synthetic construct
MRKLYSYVRWSTDKQSGNTSLERQTLKAQEFATIHNLEYVQILDAGISAFRGKNTTEGALGGFIEAVKAGVIPSDSYLYVENLDRLTRQDVATALNLFTGLLRLGLTIVTGMDGKIYTNEGLKNVTDLMMSLFLFSRAYEESLTKQKRAHETALRLIERHRAGLPVNIKSAGSAPWWIDASMSTYEAVKPHPVHWPAAKKAVELMLEGWGCFKVASYLNDHPEEFPPPRGNKGKGKKRGECWAVANLKKMRDNRALFGEKVITIGGATHTLTDYYPAICTRAEFAQLHDIACNNRHKVGEERRIITLLSGLRLLRCGHCNGSMSFFSKEGRIRYVCETGKNKTSDCKVWSVSGLLVERCLMLPLIRGYMDFMSGKASASEDLTQKIEDKKAEVLNVDTQIANLTSAIQLGGNIPALVSSIQALEQSKSAALVELERLTQRQALQDAKDQQVETLVDFYELLTPTMLEDTSDERRLKVREVVRAVIESVTLSKASDKALTLTYELPDKTVYTFTGELIESKKGKPTKSYRVEVENRGIRIDGIEDTPAGREAINRANEAEQEYHRIISQILVDFPPLKGSHFFGKR

SEQ ID NO: 8250 - protein, 555 aa, synthetic construct
MAAKARVYSYLRFSDPKQAAGGSVDRQLEYAARWAADNEMELDASLSLRDEGLSAYHQRHVRQGALGVFLRAVEDGQVPAGSVLIVEGLDRLSRAEPLQAQAQLAQIVNAGITVVTASDGREYNRERLKAQPMDLVYSLLVMIRAHEESDTKSKRVKAAIRRQCQGWMAGTWRAPIRVGKDPHWVRETEAGGFELADDRAAAVRLVIEMFKQGHGAVRIVRELADRGLKITDSGRSASSHIYRLLANRMLIGEKSVEVDGETFRLEGYYPALLTPAEFADLRYLAEQRGRRKGKGEIPGVVTGLGITYCGYCGAAIVAQNIMGRRRAADGRPYPGHRRLHCVTYSQSAGCKVSGSCSVVPVERALMLYCSDQINLTRLLEGDSGTVSLAAQLASARQRVAELEAQVQRVTDALLLDNGEAPVAVLRRVRELESQLVSERRDVDSFEHQLAASAANVAPAAADAWRELVNGVEQLDYDARMLARQLVADTFSKIVVFQSGFRPDDDDGTIGLLLIAKRGTIRMLHVDRKTGEWRAAQEHDLAEDTLPFGLGNAEPA

SEQ ID NO: 8251 - protein, 569 aa, synthetic construct
MTDIKDVFKHHKSRVDKIDTIEEKTKKDTYGVLIRVSDVKQVTKDSIPMQRERAYKFIKERDGILYKEYIEEAVSASKNSIKQRPVLQELLKDIEDGKINKVIAYKRDRLSRIQKDWLTILDTIFKNNCDIEFTSAEEQPISSNPMVRGIMEPVLGFLANMESNNTSMRVKETRASIAAKGRWTGGTLPYGYDLNKNKEIVVIKEVIPSLIEIEDLYLNGIGVGSITRYMNGHEVKHLGKRKKGADIKRVVYKGRKTYWTESAVEGVLFNPFYAGIIEYSKEGNKHLQYDQDKFVREKGFHEAIRTLDKQEKIYEMKSKKSISAPRKFSTTFLLTGLVYCSECGSPIQSRTVLKKERNNEKYCYYVCASKQNKDKTSRNEICPSKNFKQNILEDFVVSKLLEMFDGFNKDNLKEEILKGIDQGKSTIETDIVSAQAELKELQSELVSIMNLMKRVSPESPLYEEIITDYEKSYTETLLKKKEIEEKLESLQQSIKENNDKEIEQNIVLDALKNFSIVFKEASQVQRKTLLDSIIKRIDISQDGKLNILCNFEIPKDEKSYVHSINRRPV

SEQ ID NO: 8252 - protein, 548 aa, synthetic construct
MELKNIVNSYNITNILGYLRRSRQDMEREKRTGEDTLTEQKELMNKILTAIEIPYELKMEIGSGESIEGRPVFKECLKDLEEGKYQAIAVKEITRLSRGSYSDAGQIVNLLQSKRLIIITPYKVYDPRNPVDMRQIRFELFMAREEFEMTRERMTGAKYTYAAQGKWISGLAPYGYQLNKKTSKLDPVEEEAKVVELIFDLFLNGLNGKDYSYNAIATHLTNLQIPSPAGKKKWNRFTVKAILENEAYIGTVKYKVREKEKDGKRTIRPENEQIIVPDAHTPIIDKDQFEEANKKIENKIPLLPNRSDYKLNELAGVCICADCGGPLSKYEAKRKRQNKNGTESLYHVKVLRCLNNKCMNVRYNDVEEAILDYFRLFQSLNDKELTNLIEDMVHSHENKNNIKSQKQINEQFEQREKELQNKLNFIFDKYESGIYSDEIFLQRKATLDKEMKELKKAKDELNGLTDIKSGIDISKVRSQMKNLIQIYETSNDKEERNNLLRIALEKVIVKMTAKRKGPVPAQFEITPILRFGLLTGDKLTDTKESSFS

SEQ ID NO: 8253 - protein, 595 aa, synthetic construct
MITLKSDETLSIDRIMSLIGKINGIIYARVSTADQANKGYSIESQIDRCVERAKKKFGYKESELITLIEPGGMGDDPNRPALNNVLYLLEKGLGKKLFILHPDRLTRDNTLQGVISRKIWGMGVDIEFIEFEVNPNDPESMLMYNIQGSIAQYTKAKIHANSKRGRIAKAKKGQFPGFKRLYGYKFNTETDLPEYNDEEKEVLLEIVDLFLNKDMSTNEIAKYLSKKGVPAPNGKTWYQSTISRMIQNEDYTGDFYYGKSKVVQLNGKKKQIPTPKEEWILIKIPPLWDHVTREKIIEKLKENFKGRSRKSRDYLLKNKARCGRCGGSCGSGITSKTKAGVYKYYSCRNKNMKGYINGEAVHKCVGKNWRVDIVDEVFWKWFKKQLAEPEEFIKNFVSESLEESNLNDHIKKINKYKKQLEDVDKEISNYVILFGKGKINEDMFDNLTNPLEEQKNFINNELEILEALVQSKNDQIDEQKKFAEYLKSFSEMLTEDCSMEEKRKFLDFFIERVTLYDDDHLEIIWRGKGVESVNIFDKAENNSGNRHKKEIHRQTYGGQTARIHSHSCWLLQGNGSFSIIKPGAAIQISNQYQLS

SEQ ID NO: 8254 - protein, 515 aa, synthetic construct
MKTAIYLRKSRADLEAEARGEGETLAKHRTTLLKIAKEMNLNVLAVREEIVSGESLVKRPEMLALLEDIEDNKYDVVLCMDMDRLGRGGMKEQGIILETFKRSNTKIMTPRKTYDLNDEWDEEYSEFEAFMARKELKIITRRMQRGRVASVEAGNYLGTHAPFGYDIHRLNKRERTLTINPEEASVVRMIFDWYANEDMGANAIRSKLNDLGYKSKLGNEWNPYSILDILKNNVYIGKVTWQKRKEVKRPDAVKRSCARQEKSDWIIADGKHEPIIPESLFEQVQEKLNSRYHVPYNTNGIKNPLAGIIKCSKCGYSMVQRYPKNRKETMDCKHRGCENKSSYTELIEKRLLEALKEWYINYKADFEKHKQDDKLKETQVIQMNEAALGKLEKELVDVQKQKNNLHDLLERGVYTVDMFLERSNVVSDRITEITSTMENLKKEIKIEIKKEKVKKDTIPQVEHVLDLYFKTDDPKKKNSLLKSVLEKAVYKKEKWQRLDDFELVLYPKLPQDGDI

SEQ ID NO: 8255 - protein, 521 aa, synthetic construct
MAVSRNVTVIPAIKRIGNNKNSESKPKIRVAAYCRVSTDSEEQASSYEIQIEHYTNYIKRNKEWELAGIFADDGITGTNTKKRDEFNRMIEECMAGNIDMIITKSISRFARNTLDCLKYIRQLKDKNIAVFFEKENINTMDSKGEVLLTIMASLAQQESQSLSQNVKLGIQYRYQQGEVQVNHKRFLGYTKDENKQLVIDPEGAKVVKRIYREYLEGASLLQIARGLEADGILTAAGKAKWRPETLKKILQNEKYIGDALLQKTYTVDFLSKKRVKNNGIVPQYYVENSHEPIIPRELFMQVQEEMVRRANIRGGKGGKKRVYSSKYALSSIVYCGQCGDIYRRVHWNNRGYKSIVWRCVSRLEEKGSECTAPTINEETLQAAVVKAINELLTNKEPFLSTLQKNIATVLNEENDNTTDDIDRKLEELQQQLLIQAKSKNDYEDVADEIYRLRELKQNAIVENADREGKRQRIAEMSDFLNEQSCELEEYDEQLVRRLIEKVTVFDEKLTIEFKSGIEVDS

SEQ ID NO: 8256 - protein, 529 aa, synthetic construct
MTYQEGGEAMKKITKIEVNQDYIFKPKTRVVAYCRVSTDSDEQLVSLQAQKAHYETYIKANPEWEYAGLYYDEGISGTKKENRSGLLRMLSDCETRSIDLIITKSISRFARNTTDCLEMVRKLIDLGVHIYFEKENINTGSMESELMLSILSGLAESESISISENTKWAIQRRFQNGTFKISYPPYGYQNIDGRMIVNAKQAEIVKYIFAEVLSGKGTQKIADDLNRKGIPSKRGGRWTATTIRGILTNEKYTGDVILQKTYTDSHFNRHTNYGEKNMYLVENHHDAIISHEDFEAVEAILNQRAKEKGIEKRNSKYLNRYSFSGKIICLECGSTFKRRIHSSGRREYIAWCCSKHISHITECSMQFIRDEDIKTAFLTMMNKLIFGHKFILRPLLNGLRSQNNAESFRRIEELETKIENNMEQSQMLTGLMAKGYLEPTLFNKEKNSLEAERESLFAEKEQLTHSVNGNFTKVEEVDRLLKFTTKSKMLTAYEDELFENYVEKIIVFSREVVGFVLKCGITLKERLVN

SEQ ID NO: 8257 - protein, 519 aa, synthetic construct
MKKITKIEGNKVASIIKPKLRVAAYCRVSTGSDEQLVSLQAQKSHYETYIKANPEWEYVGLYYDEGISGTKKENRTELLRMLSDCENKKIDLIITKSISRFARNTTDCLEMVRKLLDIGIYIYFEKENINTQSMESELMLSILSGLAESESISISENNKWAIQRRFQNGTFKISYPPYGYDNIDGQMVVNPEQAEIVKYIFAEVLSGKGTQKIADDLNQKGIPSKRGVRWTATTIRGILKNEKYTGDVILQKTYTDSRFNKRTNYGEKNRYLIENHHEAIISHEVFEAVEAALNQRAKEKGIEKRNDKYQNRYSFSGKIICSECGSTFKRRIHSSGTRKYVAWCCSKHLKQITECSMQFIRDEDIKTAFVTMINKLIFGRKLILQPLLDALRGMSNSDNLSRIQELEKQIEKNAEQRELLVKLMAKGYLEPALFNRENNELQMEADNYMGQKEALIHALNGELSKVQEVSSLIKFTNKAEMINIFNEQIFNDHIEKIIVYSRVEIGFVMKCGITLRERM

SEQ ID NO: 8258 - protein, 492 aa, synthetic construct
MAVNKNVMIIPAIKRMGNNRKEDETPKLRVAAYCRVSTDSDEQASSYEVQIEHYTEFIKKNSEWEFAGIFADDGISGTNTKNRDEFNRMIDECMAGKIDMVITKSISRFARNTLDCLQYIRKLKDKNVAVYFEKENINTLDAKGEIMLTIMASLAQQESQSLSQNVKLGYQYRYQQGEVMVNCSRFLGYTKDENKRLVIVPEEAEIVKRIYREYLEGSSMDKIKKGLEADGILTGAGKKRWHTSTIRKILSNEKYIGDALLQKTYTVDFLTKKRVVNNGIVPQYYVENSHEAIIPREIFMQVQEELVRRSRGHISTSGKKRNFSSNHVFSQIIFCGECGEIYRRVHWNNRGKKSIVWRCVSRLENTGLTCHSRTVLEDMIGLATAEAINKLIGQKDGFLTILKENIETVISETDNNIVSEIDKKLEELQKDLLRLANSKEDYNDIADEIYRLREERHKALAEEAGKKGSKQRLEDMEKFLNEQSTLLDEYDE

SEQ ID NO: 8259 - protein, 689 aa, synthetic construct
MNVHLKVQSHHLERGAYLYIRQSSMRQVVENVESARRQYALRGRAVALGWRDEQIIVIDNDQGESGASAAWREGFQRLVSDVGMGHAGIVMGLEVSRLARNNADWQRLLEICALADTLILDEDGVYDPASFNDRLLLGLKGTMSEAELHVIKARLRGGILNKARRGEFRCPLPTGLVYDHSGNVALEPDMQIRSTIVHFFETFSRVGSASQTVKAFRQEGILFPSRLHNSQTVFRPLTTSTAMRVLHNPRYAGAYAYGRRRYRRTIDGKRIVREQDNDDWTACIPDAHPGYISWEQHQENLRILKSNICHKWNAAVASPPREGPALLQGRAVCGQCGRHFRMRYAARRGRQEAWYVCDRARSDRGEPLCQAIAAPPVDEAIGMLIAEQMTPAAIELAIEVRKEIEARHEEADRLRCRAIERAQTEADLAQRRFMLVDPNNRLVADTLEGEWNEKLRILANAREERERAREHDQFILDKAVHERLVAMTADFKKLWTNPETPNRERKRLLAHIIEDVTLLKLPKRGTTKAHIRFKGGKTQTLVTMSPKSPSQQIKTNPDIIELIDNLLDNHIFSEIAEMLNDQGYRPGSVTRRDQRNARFTTKRVTYLVREYKLRSRYDRLRDRGMLTKKEAAAHLNIHEHTLARWAEHGLVTSHAYNGHYYLYELPKTDLPQKQCSRWNQLVDRVAARK

SEQ ID NO: 8260 - protein, 530 aa, synthetic construct
MNKPTKAVIYARVSGAKQVRDGDGLASQESRCREYATYKDYDVIEVFTDDMTGKALRRPAMDRMLAFLRLHKKDSIAVIIDDISRLARNIEAHIELRRTLSDAGGILESPSIEFGEDSDSRLVEHMLATVAQHQREKNAEQTQNRMRGRKMNGYWTFQAPIGFRYEKINGHGKLLVRNEPVASIVQEGLEGYATGRFASQAELKRFFESQPAFPKDLPNDLIRQQRVSEMLTRIIYAGYVEYEPWGVTRRKGQHDGLVSLETWEQIQDRSKARKLAPARTDLNEDFPLRGAVICADCEAPLTSCWSKSGTGKRYPYYWCKSRTCASYRKNIRAERIDAGFADLMQHMTPSRNLLSLASRMLKDAWSQRDAQFGAKKSQIRRDISACNTQIESLLERIVEASNPTVIAAYEKKLANLEADRMRVEAKLTQNLKPAHSFDEMFELSKAFLSNPCKTWENAGLTLRKIILRLTFSAPLAYDRQSGFRTPQASVIFEFFEKITSKCKMVHLRGFEPLASAFGGQRSIQLSYRCV

SEQ ID NO: 8261 - protein, 448 aa, synthetic construct
MRTGLYVRVSTAEQEKHGYSIKVQLEKLRAFASAKDYTVVKEYIDAAQSGAKLERPGLKQLIEDVENNALDCVLVYRLDRLSRSQKDTMYLIEDVFLKNSVAFVSLQESFDTTSSFGRAMIGMLSVFAQLERDNITERLFSGRAHRAKRGFHHGGGIIPFGYRYDVETGELKRFENESNEVKAMFEMIANGKSVSSVAKEFNTYDTTIRRRIANSVYIGKIQFDGETFDGQHEPIISKELFDKANVRMNARASNLPFKRTYLLSGLIYCGKCGERCSAYESRSKHNDKEYRRAYYRCNARTWKYKQKHGRTCEQPHIRVDELEQAVMEQVKRLPLKHKVKKRAFDFKPVENKIATIDKQKERLLDLYLNEHLDNEMFNKKSKELDKSRDKLAKQLERMRMQAADSVESYQWLDGIDWDALDKDTLREVLERIIERIVIRDKDVEIYFK

SEQ ID NO: 8262 - protein, 604 aa, synthetic construct
MKKVFVYHRVSSDQQLDGSGIARQAELLEGYLERTGICAEMDDPAPVVLSDQGVSAFKGLNISEGELGAWMEQVRNGMWDSSILVVESIDRFSRQNPFDVMGYINALMAHNVAIHDVMANIVISRSNSKDLPFVMMNAQRAYDESKYKSDRIRKGWAKKREQAFNKGTIVTNKRPQWIEVENDKYVLNHKAAVVKEIFALYQTGMGCPTIAKQLQTKEGEQYKFNRPWTGELVHKILTNRRVTGKIFISEIIRNHDDIENPVTQKKYDMDVYPVVISEDEFELVQELLKSRRPNAGRVTVKKDGQEEVLIKSNLFSGIARCTECGWPMYHNVVRAKRTPKKGDPKIEEYRYIRCLNERDGLCENKAMTYETVEHFVVEHLLGMDLNTVIKEQEFNPEIEVIRIQIDQVKDQITNYENGIERRKSAGKAVSFEMREELDDAKLELEQLLARQASLATVQVDLPVLQDVNVTELYNVNNVDIRTRYENELNKIVSNIRLKRNGNFYTIDIIYKQNELKRHVLFIENKKKEQKLISEVIIENVDGAKFYYTPSFVISVKDGEIRFQQTKEDLTIIDYSLLLNYVDAVDRCDAVGVWMRNNMSFLFTK

SEQ ID NO: 8263 - protein, 519 aa, synthetic construct
MPKAISYIRFSTKIQSVGDSTKRQSKYINDWLKRNPDYYLDESLRFQDLGISGFSGANTKSGAFGEFLAAVESGYIEAGSVLLVESLDRVSRQDIDTAGEQLRKILRAGVEVVTLVDNEWYTKESLKDSLSMIKAMLVMERAHEESAMKSTRLRSMWAGKRERAANGEIMSKRCAAWLKVSEDRSHFEFIPENVKAVQRVFQLRLEGLSHVKIAKQMNDEGFSTLNQFKPVKGGWSQSSVTELLSNRSVIGFKVPSKSMAVKGVSEIPNYYPSIITDEQFYAVQQLKQGSGRKPSSDLPLLTNLFKGVLRCSECGFIVVVAGVSAKRSGIYKCSMKSEGRCNSVGFSRLQTDRALVQGLLYNTNRLSLNRDNGSAIGSLQSELEELHKQRERLIKLAMLADDTESMAKDLKALNSRIKDAEKAVSEVHQREQSSQLETISHLDLTVKKDRIEAQIIIKRIVKEIRLNTTGKKCDVFLHNGLKLLNFPLDRVVEGEIFLEVLPLLEADEFDFDTYRLINP

SEQ ID NO: 8264 - protein, 448 aa, synthetic construct
MRTGLYVRVSTAEQEKHGYSIKVQLEKLRAFASAKDYTVVKEYIDAAQSGAKLERPGLKQLIEDVENNALDCVLVYRLDRLSRSQKDTMYLIEDVFLKNSVAFVSLQESFDTTSSFGRAMIGMLSVFAQLERDNITERLFSGRAHRAKRGFHHGGGIIPFGYRYDVETGELKRFENESNEVKAMFEMIANGKSVSSVAKEFNTYDTTIRRRIANSVYIGKIQFDGETFDGQHEPIISKELFDKANVRMNARASNLPFKRTYLLSGLIYCGKCGERCSAYESRSKHNGKEYRRAYYRCNARTWKYKQKHGRTCEQPHIRVDELEQAVMEQVKRLPLKHKVKKRAFDFKPVENKIATIDKQKERLLDLYLNEHLDNEMFNKKSKELDKSRDKLAKQLERMRMQAADSVESYQWLDGIDWDALDKDTLREVLERIIERIVIRDKDVEIYFK

SEQ ID NO: 8265 - protein, 559 aa, synthetic construct
MKTKLYSYIRFSSMRQNDGSSYERQIRMAREIAAKYDLELVNDYQDLGVSAFKGANSKTGALSRFLDAIGRSVPVGSWLFIENLDRLSRADIVSAQELFLSIIRRGITIVTGMDNKIYSLDTVTANPMDLMFSILLFIRGNEESQTKRNRTNSSALIKIKAHQENPQNPAVAIEEVGKNMWWTDTTSGYVLPHPVYFPVVQEIVELRKNGRSTAEILDHLNETYAPPPAVSNKKHSKWSRAMVERLFHTRALIGIKEVSVDGVNYELKDYYPRVIDDATFYHLKKNIGARAWNFGDKEEVKPIPLLSGIGLLKCDHCGCAMVKVKGTNKRSDQYRYTCDATRSRRLDCEHPNWSFRGDQLEKAVLQLLADKIWIAEDKANPVPALKVQVDEISRKIDNLIALSAMTGATKELADQITTLNSERETLYNQIKMAEEEMYSVDSQGWEKLAEFDLEDVYNEERLKVRFKIKQALKRIGCSRIDRNKNLFVLEYIDGKTQRVVIENSRGTRKGRIFIDLKTINDRQILESNGLVLHPCLDMLTDKNWKPEEEIPGPLQEFGI

SEQ ID NO: 8266 - protein, 700 aa, synthetic construct
MDSNAFLNDLMSKMKLPEAKGKKKAEQSESVAQILAAMQKVKTEKKKPPVTSYAPTKEMPVNELESMEEFSQLASDVMQECRPAIPAVKTSISEKTVRVAAYIRVSSTNPAQEDSYEMQERYFMSLLAGNAGWTSAGIYSDHGISATSREGRTGFNRLLRHCKQGKIDRVICKSISRFARNTQDFLVALRTLKENNVTILFEREAMDTADAYSEFILTTLAAIAQEESRSISANIAWSNQKRFPAGNVCNKDIYGYEFRKGEYTVNENGYRYRAVFIIPEEAEIVRMVFRFFTKEELSFTQIAQKLDALHIPPPNSGCRQRQKRKPTVLPAGALKEEDKRGWTATDVRYMIANVRYCGSVLCQKTYTDHRNGHKQKVNKGEKPKYLIRNHHPAIISEELWQEAQEVWKAYTAKYRGIEKGRNERNYSKLLLCGECGRYFQGHSTTRTTIWRCATKLAQQGQKRCRMEPIYEEQIQTLLCKAFAEKFKMGEKMDAEVHEVMQMISKAPIDNARNQALKNLTEKLREIHDFDQMEQEGDFLKRQLSAVNYSIRDVHQHIRDIQAEKEALKVRCEVLGEPRDKEAVTGLENRLLNEEEQLEKLEHEAQQQAEQVRYMEDYWKKLEQTHEIREKTLQWLDSLAGGTQMFLDEAVGTYVKAFVLSVTIFSPKHFRIHWFDDTCTEVECDSVFEGYQQPGMIRRKY

SEQ ID NO: 8267 - protein, 519 aa, synthetic construct
MKKVTKIDKIQPSQTSKKKLRVAAYCRVSTDSDAQLESLDAQKEHYKNYITSRDDWTFAGLYFDEGITGTKADKRPMLLRLIEDCKAKKIDFVITKSISRLSRNTTDCLDIVRTLLSLDIPIYFEKENINTGSMESELFLSILSSMAEGESASISENNKWSIKKRFLDGSYKLGYVPYGYRWKDGEILVDPAQAEIVKRIFRELLSGKGTEAIAKELNQEQVPTKKGGRWTSTSIRDIIRNEKYTGDCIFQKTYTDSNFNRHKNDGHLDQYYVPDHHEAIISHEDFEAAAALIEQRASEKGIKKGNAKYQQRYAFSSKIICGECGNTFRRRIHSSTYGKYAAWVCNTHLEDNSRCSMLYIRDDDLKLAFTTMINKLIYCHKLVLKPYLKALQENTGDASLLSIQQLEILLEQNTEQRETLHKLMGQGYIDQILYTQENNALLSQAGEYRNQIELLNRSQSLDATKVYETERLLHFCERGEMQLEYREELFELFVDHIEVYSRQKIGFALHCGLILKEMI

SEQ ID NO: 8268 - protein, 521 aa, synthetic construct
MGNVMVIPAKRQVGNTARQQNAKPKLRVAAYCRVSTDSDEQATSYDAQVEHYTEFIQKNPEWEFAGIYADDGISGTNTKKREDFNRMIDDCEAGNIDMIITKSISRFARNTLDCLKYIRQLKDKNIPVFFEKESINTMDAKGEVLITIMASLAQQESQSLSQNVKLGLQFRYQNGQVQVNHNHFLGYTKDADGNLIIDPEQAEVVKRIYREYLEGYSMDRIAKGLEADGILTGAGKTKWWTSTINKILRNEKYIGDALLQKTYTTDFLNKTRVKNNGIVPQYYVEGNHEAIIPKDIFLRVQEELVRRRVVKTSANGKKRSYSCNHCFAQIVICGECGEMFRRIHWNNRGCKSIVWRCISRLEPTGQECHARTVNEPVLENVVVQAINTLLGDKSTYQAQLQQNIAKVIRSAQQNTADGIDEKLQELQKELLKKANNKEAYDEVADEIFKFREQREKCTFDTAARDAQIARINELQDFIKQQPAHLEAFDEALVKHWLERIIVWEDHFTVKLKSRLKIDIKG

SEQ ID NO: 8269 - protein, 510 aa, synthetic construct
MALHENSKIAVYSRKSREDRDSEDTLAKHRNELEYLIKRENFKNVQWFEEVVSGETIDERPMFSMLLPKIENGEFDAVCAVAMDRLSRGSQIDSGRILEAFKQSGTLFITPKKIYDLSIEGDEMLSEFESIIARSEYRAIKRRTINGKKNATREGRLHSGSVPYGYKWDKNIKAAVVVEEKKKIYRMMIKWFLEEEHSCTVIAEMLNELKVPSPSGRSIWYGEVVSEILSNDFHRGYVWFGKYKKSKSNNSIVQNKNLDEVLIAKGHHETMKTDEEHALILNRIEKLRTYKLAGRRLNMNTHKLSGIVRCPYCHKAQAIEQPKGRKKHVRKCLRKSATRTKECEQTKGIHEEVLFQSIMREIKKYNEALFSPTEQDVNDDTYTTQLIGLREKAVKKAKGRIERIKEMYLDGDISKTEYKEKLKISQETLQKAENDLAELIASTEFQNALSAETKKEKWSHHKVQEMIESTDGMSNSEINLMLKMLISHVTYAVEDLGDGTKNLNIKVYYN

SEQ ID NO: 8270 - protein, 493 aa, synthetic construct
MKLAAYIRVSSQNQVEYGDSLTGQEESIYNWAEKNGHTIVRKYIEPGSSAYNDNYRPQFNMMLKDIENDNFDCDAIIVYALSRFARNLISQSAAQSVLDKKSIRLLSVVEPLPEDYDTYRLLSTVIGLMNEMQSSQNSRTVCDRLQDTAEKGYFTGGNIPYGYESINVKDDSIFRKKLIINEYEAKIVRKIYKLAQKGNYGKGWGIKQITSYLNDNNILNRGNDWKINTIHRILNNSIYYGDRVFGKNRVKRAGKENPLPTIVNTPAIISKKLFDNVRDELKSRDLKNNKDKPLRSNSLLTGIVKCGKCNTNLVIRTGKGGKYKYYSCGKRIRSSVNSCTCQNIPKQLLEEQINEALIKNILTKDTIESILKELKLLIKANNTEEIELNRLTKKLKYNKANLNAFYTKLFTSEIEVDDTVKGFINTEQGKINEIQREIDKIKVTKKITYKNFGSNQVNMFVKTIKNLINSENTEVTKSFLIAMGLEVRVYPKN

SEQ ID NO: 8271 - protein, 508 aa, synthetic construct
MKKAIAYMRFSSPGQMSGDSLNRQRRLIAEWLKVNSDYYLDTITYEDLGLSAFKGKHAQSGAFSEFLDAIEHGYILPGTTLLVESLDRLSREKVGEAIERLKLILNHGIDVITLCDNTVYNIDSLNEPYSLIKAILIAQRANEESEIKSSRVKLSWKKKRQDALESGTIMTASCPRWLSLDDKRTAFVPDPDRVKTIELIFKLRMERRSLNAIAKYLNDHAVKNFSGKESAWGPSVIEKLLANKALIGICVPSYRARGKGISEIAGYYPRVISDDLFYAVQEIRLAPFGISNSSKNPMLINLLRTVMKCEVCGNTMIVHAVSGSLHGYYVCPMRRLHRCDRPSIKRDLVDYNIINELLFNCSKIQPVENKKDANETLELKIIELQMKINNLIVALSVAPEVTAIAEKIRLLDKELRRALVSLKTLKSKAVSSLGDFHAIDLTSKNGRELCRTLAYKTFEKIIINTDNKTCDIYFMNGIVFKHYPLMKVISAQQAISALKYMVDGEVYF

SEQ ID NO: 8272 - protein, 542 aa, synthetic construct
MQQLKTKRVGIYVRVSTEMQSTEGYSIDGQINQIKEYCDFHHFEVKDIYADRGISGKSMNRPELQRMLKDAKEGNIDCVMVYKTNRLARNTSDLLKIVEDLHKQNVEFFSLSERMEVNTSSGKLMLQILASFSEFERNNIVENVFMGQTRRAQEGYYQGNLPLGYDKIPDSKHELMINQHEANIVKYIFECYAKGHGYRKIANALNHKGYVTKKGKPFSISSITYILANPFYIGKIQFAKYKDWSEKRRKGLNDKPVIAEGKHSPIINQDLWDKVQMRKKQVSQKPQVHGKGTNLLTGIIHCPQCGAPMAASNTTNTLKDGTKKRIRYYSCSNFRNKGSKVCSANSVRADVIEDYVMKQILEIVKSDKVIQRVVTHVNQENQVDGAALHHDIAYKQQQYDEVQIKINNLIKTIEDNPDLTSVIRPSIQKYEKQLNDITNQINQLKNQQNEDKTLFNAKEISKLLQHIFHDIKHIEKSRLKALYLSVIDRIDIKKDGNHKKQFYVTLKLNNEIIKQLFNNKQLDEVHLSTSSLFLPQTLYLTI

SEQ ID NO: 8273 - protein, 543 aa, synthetic construct
MAQAISYIRFSSALQRGGSSTDRQSRMIADWLKAHPDVSLSPISASDEGRSGFSGAHLQHGLGQILAAIEDGKIATGDFILIEAMDRLGRLPPLEMLSLLQRIVGAGVNVVTLEDSQTYSKESLNEKIGDLFILVGKISQAHEYSKNLSRRMKAAYESKRQKAKDGETIKRYTPFWLTSDGKIIEEWKEGIERVVEYYLKGWGPRNIVIELVSKNLIPENTTTQSVRKWLRSKALVGSWDNNGDEIENVVDAVIDRETFYRVQTEIKRREVDHSPRSTFKLSGLIKCKECGSSYYITKKMVKGYPQHSAKCLGREKKGADFCSNQKQLPYVVLLHALESYLPEQLSQLAYDSSLDEELNKISALKSERTAIDDQLNVLLDMLLSMPDQSNLKAKFEQLSASKDEIETKIANLEVSLVDRGASVSINSVVMNANMSIDEILSDDTATRETLKKTNWRIIAFDSKFSVNVGSAGNVDYEIVKRRAKFNALYVTRTVPEHEVFNESTDEYDVIEAETEWLAFVSGELVATAQSEDKVENILGEKNA

SEQ ID NO: 8274 - protein, 462 aa, synthetic construct
MRARTYIRVSTDEQAREGFSLSAQAARCRQFIQSQGWEEDGSYKDDGYSAKNLERPGMQQMLRDAKEKQFDVLVVYRLDRLVRSVVDLHLVINLLEEKKIAFKSVTEVFDTTTAMGRFFITLVGSMAQWERENLGERVRMGMERKFLEGKDLHTFAPYGYTTDENGKVVTDPNESAIVRRIYDMYKTKGIRTISRALNREGITTRRGNHWQDPQIQYILTNPYYIGVLRFGEHSREGNHPRLIDSDLWLETQKRIEDRRVGKRAATSDYPFSGVLTCARCGGNMIGQSLKHQTKKYIFYKCGTQHNYGTCDLPRIAETKVERSFFDALVEWQAEGINMPSDQKEGLDLKQIESELDRIKRRRRKWQEAFAADIITLEELKERTQEDRAREEELKTKLTKQPETPRVTLEEFKEAIQDLRKVWPQATATERKQIIRTLFSEIVIDRDGNGRNDPVKVISTELA

SEQ ID NO: 8275 - protein, 537 aa, synthetic construct
MSRPAERNNPSIRQSVETHRTTVRCAIYTRKSTDEGLDQDFNSLDAQRESAEAYIASQRHEGWLCISERYDDGGFTGGNMERPALKRLFADVESGGIDCVVVYKVDRLSRSLLDFARMMELFDKHAVSFVSVTQQFNTTSSMGRLTLNILLSFAQFEREIISERTRDKMSAARKKGKWVGGMPVLGYDVDRKGGRLIVNEDEALKVRGIYDLYLEHKALIPVVQELERRKWGAKQWTTQRGDVRGGNLFNKSSLFRLLTNVVYTGNVCYKGTIYRGEHEGIVDPDLWQRVQDTLRHNGRSGGKDIRNKYGALLRGLLYCAPCGTAMVHTYTAKNGRHYRYYVCLTAQQRGWTACPTKSLNAHEIETAVVDYIRGLGSSTEVFSKTASEVRAQSQKRLTELETERRAHERELKRLDVRLRALVAESPTSSTDRRLVTDQMADLQDQIRSLEQRMTAIREETVAIQKETLDEGDLEKALTAFDPIWESLAPREQARIIKTLVERVAYDGRDGKVTVTFRSPGIKAMCMGDGTRGVEERT

SEQ ID NO: 8276 - protein, 526 aa, synthetic construct
MNNAYSYIRFSTAKQLKGDSYERQQAMLDKWAEDNPAYTLNRDLTFKDLGISGRSGKHLKHGFGKLLEAITNGDIGAGDVVLIENIDRAGRMEPGIMSGILLDILNAGVTLITLDDRQVYTQESLRGGSFYILVGKVQAAFNYSEVLSGRMKASYKTRNKLAIEGKTPKRNTPVWLKSDGTLIEEIAPFIKQVFEDYAAGLGERRIYERILENGGSKHSCFVRMAPSTVKRWMTNRTVLGEWQGVPNVYPVVVEPELFYRVQKRMEEKFTPRSAPTKHKYTGLVVCGECGKNFNTKAYSVRKNGIAPPAVMECSGRARRGSTACSNSKGIPESVIALVYFQSFSKGALRALQGQVLSASQKREVEIDGEVAELTKKISRAEKVILDTDNDDEADEMITTRRGLRERRKELLAEKEGLTASAVSVYDKIVDVTKFNLDPAKANAMLQSVGYRIVCNQDSTVVSESGTYKYEGWGRAEDVHKVITPEGKLMKLPIHRLGVERKPMKDTGAADKIRARLAKMITKAQGA

SEQ ID NO: 8277 - protein, 593 aa, synthetic construct
MPLCFPYVRFSSQKQRDGNSVVRQSERIESFVSRHNLTVDTRLEDHGISSFRGANAKKGQLSGFLQRVRDGEIPNGSYLLIENWDRLSRQVLDASIEIFSDLIRSGIKIAVLDEDTVYDDLTSNSFIRAIVQFERAHSESLRKSDMSKASWRAKHKAMDKGTIATEKCPQWLVVKDGAWCKLDDICLHIETMFSLAQTYGVAETGRRLNAQFGTSYKTHQIQYLLRNRRLIGEHSPVELSKEHGKNVPTGQVVEHYYPQVIPPATFEEVQTILKSRKPFSGRQDATNLNIFRNLLVCAECGGSTRFMLRSGKEFYYCTASMTGGCVDDQIRSIRGENLRRVLFKFEHWTAIRDYIAAGSDVLKTLKKEETVAVAKLNRLEIKAEGLKNKFAAEDDEDKAETYVGLLTDTRKAVATANADIDRIKQELANLDGAFALSDSNVDSFESMLTSDSEQARTDRQRLNRYLRGIFLKLELHFPTRRLVTQPIPALANRISPVVAYVEQPKDKRTGDDYGHHTWISKVQQTLIIKRIKARLRRAGIPSPTFEQVKPIYESVAYSLLPKRKPRCKNPPKVADLPTELEGVVWKAPDPFLK

SEQ ID NO: 8278 - protein, 582 aa, synthetic construct
MTNAVKAGTRKAYGYVRVSTAEQAEHKTSLKQQVADLEAYGAKNGIEFAEIFVEPGLSGSDWKRPEFNRMILLATSDDHPVDFIVACDMARLARDVEFTITTQGQLQRAGVQCRFVYQKFEDSHFGLLHKLLTSWQDQDAVVKASMNTRRGLRGTAEEGFWVGGVIPLGYESRTVEVRSKKEKKKLFENASEAAIVRMIFDLAERGLNGTPMGGRAIANHLNQHGYTRRGEKFFNSSIAGILARPHYLGKFPGNRFDTDGTLLPEDEWTWVPCPQLISQEQFDRVAALRESRAPRNTAPRVVSGPTLLVGIAKCGMPGCGAGMTIATGKGGRYRYYKCHAKNSRGASSCACPNVRTEQLDNLVMQQVADRIFDQNELEPLLQRILDVSDVSLQKKQIEIDLCKERLDHCRTRLANLHDGIELGTISARDPDIAARVKERRTEIDAFNDKLKTLRQQVERGPARITPAAVRKFGKLVRQKLLQGDSPARQQIARAFIREVRVGKGVEISGDTDALANGVAAVARSKGAVPIFDRSWCGREDSNFHGLSATTTSTLRVYQFRHDRTSYCFGSACVRPHPVGARH

SEQ ID NO: 8279 - protein, 615 aa, synthetic construct
MKPYDITATMFGTPTQDTTVEVKDAVSLLRVSSKRQMDTAVDIDPDGLSIATQRRVVELKASSVGTHVVKEFLEPGYSAKTIDERPIFKELLHYLNTHPNVGFVIVYMRSRAFRNQYDAAMVQMHLQKRGIRLISAKEDFGEGPYAEAMEGMVDIMNGLTNKLQGLDIQTKMYEKARHGGTNGQARLGYLNVRDVYDGKPFNTVRLDPKRAPLVKKAWELYATGDYTLEGVADTMTDLGLTARANRRWPERPVSYKWYHRMFKDIYYLGFITYKGKGEQTQIFPGRHEPLIEQELFDRVQDVLNQRSLKGQRDRIHQHYLKGHLFCARCERQGRTSRLIYTEAKGRNGSYYGYFMCRARQDKLGCDLPLLPVELVEDTITDHYHTLALPADFIDSVRELLSQTLADEQGSVRTMHAQLAKRIKDLDQKEERLIDLAADDSLPQDKIRIRLRRIQNDRASAQAGLLSTTAELNTGADIVKSALAALSNPASYYQRADDTTRRFMNQTFYTKFLLDDEGVVDHCLNPPFDDFHQAKAAWNTTKPATLTDYLNAHPPQTQKGLPSRETPSHNLEPTLTGIVSVPGLSTASMVELRGIEPLTFSMRTRRATNCAIAPRR

SEQ ID NO: 8280 - protein, 571 aa, synthetic construct
MAECRAAFYARVSSEAQARDKTIASPVAALRERIAADGVTMLPEAASIDEGHSGSSLVRPALERLRDAAFAGDIDRVYVLAPDRLARRHAHQALLMEEFRRAGVEVVFLNRPIGASPEDDLLLQIQGVIAEYERAQILERGRRGRRHAARMGSVSALAGAPYGYRYITRERGGGVARLEIVPEEARLVRLIFAWIGLDRLSLREVCRRLQQAGCRTRSGTTRWWASTLHGMVENPAYTGTAMDGRFHAVEPKPRLRPIRNHPPHSSRPTTRVPVPSEDWVAVPVPALVDPAVAEAARAQLEENRRRKREQSRGPGWLLQGLVVCRRCGYAYYGKATPGLAECHRPGAFGYGAYRCIGSDGHRFDGQAGCTNRPVRSDRLERVVWAQIEAVLNDPQRIAHEYQRRLTDLASASQPDADVGEVERRIGALRRGVGRLIDGYADGVIDRVEFEPRVADLRACITQLEEHRNALAAASEARRDLTLVIGRLEDFSMTVRENLVLLEWSARRDIIRLMVRRIEIDEGQVEIVFRIPPPPSGDPGGDRKLKSKHHCTGERRADHRLVDHQSAARQGL

SEQ ID NO: 8281 - protein, 455 aa, synthetic construct
MVNEIKQVALYIRVSTDQQAKHGDSLDEQQHTLNEYVRQQGNMRVFKTYIDDGISGQKLYRDEFQKLLDDVKKGRIDTILFTKLDRWFRNLRHYLNIQEILDKNNVTWLAVTQPFFNTETAMGRSFVNQSMGFAELEAQLTSERIRAVFDNKIRKGEVVSGKVPLGYEIKDKHLVPNEKAEIVKEIFQYYLETGSMRATVRHLENHFNMTRDYQSVRQMLTNRKYIGELRDNKNFCEPIIDRDVFERVQLQLSKNIRMNKKRDYMFTGLLVCSECGCNYSATAVISRYVRKDGTTNPNERHLYRCTKNRNNVKKCSNKKGIYETTLENFLLENIEKQAEELSVKMQQEPEVKKTKNTNDKIKKKIDRLKKAYLNEVITLEEYKKDRKELEALLIPERDNKIAKIDLNSLHNYSTAEFRDGYIQLTISEKSSLWRQVIKNIVVYPDGNLKINFLGY

SEQ ID NO: 8282 - protein, 560 aa, synthetic construct
MTKLYSYIRFSSSRQADSSSYERQKRTAKEIAEKYGLELVTSYQDLGVSAFKGANSKTGALSRFLDEIGKSVPVGSWLVVENLDRISRQSIIEAQELFLSIIRRGITIVTGMDGKVYSKESVNANPLDLLLSVMMFARANEESQTKRNRTNSSALLKIKAHQQNPQSPAVAIEEIGKNMWWTDTTSGYVLPHPVYFPILQKIVKMKQEGHSTGSVLDYLNEHHTPPAPTSNKQHRKWSIAMVSRLFKTKALIGVKEVTVDGVQYELKDYYPRVLSDSEYYFLKNNLIKKAWSFGHAQEKTIPLLSGIGLLKCAHCGSPMVKRKAANGKVEQYRYTCDGEGSGRTDCLYPNWGFRASSLEGAVLQLLADKVWVAEDKANPIPEIQVQIDEISRKIDNLINLSAMTGATKELANQITDLNTQREALHEEIRLFEREMYSVDSQGWEKLAQFDLSDVQNEERLQIRLKIKGALRSIECARIDRNKNLFTLVYLDGLRQRIVIENNRGIRKGQIFVDLKTINDRQILESAGMVLHDHIDILIDEKAFYDGLPKEEDGPLSKFGI

SEQ ID NO: 8283 - protein, 483 aa, synthetic construct
MKAAIYVRVSTMEQAEEGYSIDEQIDKLKKYCEIKEWTIAKVYKDGGFSGSNIERPALLNMIDDAKQRKFDTVIVYRLDRLSRSQKDTLYLIEDVFSKYGVTFVSLSENFDTNTAFGKAIVGILAVFAQLEREQIRERLMMGKVGRAKSGKAMAWSNFPYGYTLPKGGKREKYEIVEIQAEIVRRIYRDYLNGKGITQIKDELNAEGHIGKEKPWTIHVVRRILDYPVYAGYNRYRGEVYEGQHEAIISKDIFERTQKEMEKRQKKAYSLFNNPRPFQAKYLLSGLLKCGICGMRFELIQYKPRPDGSRIRYYKCYSQSSSKHCTTMKKNPDGCTAPKYYLPEIEEYILNEVEKLRLNPDIATSFVDDSSDIDVSSLENRINELNSQLKKLVSLYVDEDFPRDIIESKKEKIISEKNAITKKIREESDKKPDKNVNEIIDELGKIRLSVFDLDYEEQKKLVRKLIQRITLFPDRIDIHWTFTL

SEQ ID NO: 8284 - protein, 455 aa, synthetic construct
MANEIKRVALYIRVSTEQQAKHGDSLDEQQHTLNEYVRQQGNMKVFKTYIDDGISGQKLYRDEFQKLLDDVKKGRIDTILFTKLDRWFRNLRHYLNIQEILDKNNVTWLAVTQPFFNTETAMGRSFVNQSMGFAELEAQMTSERIRAVFDNKIRKGEVVSGKVPLGYEIKDKHLVPNEKAEIVKEIFQYYLETGSMRATVRHLENHFSMTRDYQSVRQMLTNRKYIGELRDNKNFCEPIIDRDVFERVQLQLSKNIRMNKKRDYMFTGLLVCSECGCNYSATAVISRYVRKDGTTNPNERHLYRCTKNRNNVKKCSNKKGIYETTLENFLLENIEKQAEELSVKMQQEPEVKKTKNTNDKIKKKIDRLKKAYLNEVITLEEYKKDREELEALLIPERDNKIAKIDLNSLHNYSTAEFRDGYKQLTISEKSSLWRQVIKNIVVYPDGNLKINFLGY

SEQ ID NO: 8285 - protein, 481 aa, synthetic construct
MKAALYIRVSTDRQNEEGFSMEAQHDLLMELLEKKGMELYRVYSDPGISGRTIKKRPGIQRLIEDMKAGKFEAVLVHKLDRLSRNLGDLYEFIALINKLNKRFVVASLGSEEIDTQSPMGKAFLYFNGIFAEIYSDNLREETLKGLTKKMENGGLHMSKAPLGYDIEVIDGERKLIVNEYEAELIKEVFQLYLAGKGVVSIAKHMNGHSRGKEGGVWDSKYVRIVLQNHTYTGHNHFKPVLWEESKRIIKLGEHEAIISMEDFLKVRKMMERRGENHMSKHSYDYPYGGIVKCGACGATYIGNASRQTLVDGTVRVYRSYRCRNQYSNKTCDAPGISEHHLQQLVFERLQITNKKLQDKKTSAQAKSDQRMLQKEIEVSNRRRKNWMLALGDGKLSPDDYANLIDDEEARMKAITAQYEEKEDYYINELSTEEIKDMMANLKDNWVLIEPETQKLLVQSMFRQIVIKKESDKWGILQMLTV

SEQ ID NO: 8286 - protein, 533 aa, synthetic construct
MKRAVIYARYSTDLQNDASVEDQIRICTALAERQGLSVVGEYHDRAKSGASMFGRPGLASMMQAAEHGAFEVVIAEAPDRLSRDIADLGSMHKMLTFRGIELHCVNGGKIDTMQVGLYGLVGQMQREEGAKKVRRGMVGVVQSGRSAGGRSYGYRPVPGKPGELEIVESEAEVIRRIFDYFAAGISPRTIAGKLNDEGVAPPRGTKWNASTINGNGARGYGILRNPLYAGTLVWNRVRMIKDPSTGMRVSRPNDEADFQRQEMPHLRIVSDEIYHAVQQRKEARGGKHAKTTAKGKRLLSGLLKCGKCGGGLSIVGADRSGPRVVCSTHKESGTCDNNARYYVEKIERKVIDTLRMQFADTDVIDAYVKEYEAEQKRATLERRKGRAAAEKGLQEAKDAISAVVLKLAKGLIEDDDAAAILPGLRAERERFKAELEAQEPEQRVIEIKPKAIEKFRESVTRIADILTRQDGEFHIDLMKHFRQVIAAVIVQPRRPGEEYQIEIKGYLSSLISPDLSAVIVVAGEGLEPPTRGL

SEQ ID NO: 8287 - protein, 597 aa, synthetic construct
MPVTPQQPAHTGTPTMTNNHQTPSPRSTSTTSTPPSVVSYSRYSTKKQSKGFSLERQDENLKRWSDRNGIPISDLSFADLGISAFSGTAVREGLSNMLEAVRQGAVPRGWWIAFERIDRLSRRGITETRRLIDQILQHGVNIVCIGEGIELRQNDDANDELKGSLMVAIHAHLAREQSAKASERIRATAAAKRRRARETGAPIKKRLPYWLELSPDGSKYQFKAGRIETVRYIVKRRLEGRGFHGICAELNEMNTPPLTRMSKQWNDMAVAATVRNVALFGQYQPAITNEVEKVDSDGRRKMVRVAIPDGEPLDNYFPAVVDRATWDQIQSDSRTKMKAGRRGDNPVSGLTFCRHCGGTLPMKPASKTSTNGTRHTYRYWTCRGAVDGKCDHGKGIKDLDQFVIQACRRIVPRTLGQGGGGQDPAAAFEYQSLLEQRGKITAQIATLDAAMADPELGAAALKHIARQIDVATANLEQVDAEIATVEARQKADQDTTPEAVERLKQLEGDPVAYNLHLKTLVQRIVAGAVRLDDGSWSDVALLFRFTVELLNGQRIDVTVSRRNRWDKGPVVLYSHSEDATSTGDVELFPWETGDQED

SEQ ID NO: 8288 - protein, 487 aa, synthetic construct
MEGVAVVVSKRAVIYMRQSTYREESISLELQEAACRQYARAQGYEVVAVEADPGISGRTFDRPAVRRVMGMVEEKRVDVIILWKWSRLSRSRKDWAVAADTVEQAGGAIESATEAIDTSTSTGRLARGVMVEFAAFESERIGDGWREAHARRLAAGRPANGKARFGYQYDRDQKLHMPDPITGPILADAYRRYLSGESVYSLTQWIRSTGAEPAAGYGSVMAAPWHSRTLRRVLDSGFGAGKLLVKGEYLDGAHEPVITPGEWTRYRRRREERAARPRGERSEYLLSGLIRCGVCGGRMQYSKRPARESGPQIRCRESVEGRAHGQGITLAVHAERAVETWVGEAAAELEGTVDLDVPQTVQDPTGVLERELEKTYDAMGRLAMRLAEEKISEEAHSRAAATFESRLCQLQGDLEAARERAAAPPPLERDVIRLAEDWLLLDVPARREELTLLLEDITVTPGGRYGKVRVEVHPRVREPRSFEYVSR

SEQ ID NO: 8289 - protein, 613 aa, synthetic construct
MRRVFVYHRVSSDQQAERGGGMERQAKLLEDYLARTKLCEEMDDPEPIVLGDPGLSAFKGHNLQHGELGTWVDQVKKGMWDGSILVLESIDRFSRLNPFEVLDYLNSIIERNVSIHDVYDNNIINRKDISAFTRALNQADRAFKESKFKSDRISAGWRRKREQAFNNGTIVTKKRPVWIDVVDNKYVLNEKAAVVKEIFRLYQTGIGCPTIAKILQKKEGSEWKFDRAWSSEHVHKILRNKRVTGKILISEIIRDYETDDKEKQFTQNFYDMDVYPVVIDEKEFELVQELLKSRRPNAGRATTKKDGDQEIVVKHNMFSGIFRCGDCGQGMFHNVVKSKRNPKKSEPRVEEYRYIRCIVERDDLCHNKAMDYTIIEKFLIGRIKNLDFSEIIKVNEVNPEVELVRLQIEQEKTHIQEYELGIERLLNAGKRVSFDMRQELDEAKERLELLESRQAAFETVRVDTDVLTNFDMNELLDITNVGLRSRYERELAKVVDRIELCRRDNLYFVSINYKSTDLIKHWLVIENGKKKGAHLRGDFRIVKDGDTVYYGTDSFVLSSVNDGMPRIHFIENEPLNMIDYAMLLNFIDYIDQNHTVAVWMRHNMNFLFMDTSD

SEQ ID NO: 8290 - protein, 556 aa, synthetic construct
MLGPQENGTASTQAVIYARVSSAAQMKRGDGIGSQLTRCKEYARYKGLEVIRTFEDDASGSLTSRPGMIDMLSFLKTNRGAEPIIVIIDDISRLARGMEAHLQLRSAIGEAGGLLRSPTIEFGEDSDSILVENMLASVSQHQRQKNAEQTTNRMRARLMNGYWCFAKPIGYTYRRMPGHGNMLVRDEPVASLVKEALQGFASGRFDTQVEVKRFLESQPDYPKDLPDGQIRNQRIAELLTRVVYAGYVESSNWGVSLRKGHHEGLIDLATFEKIQNRLKEGARAPARKDLNEDFILRGFVCCADCSRPLTACWSKSKTGKKHPYYLCFTKGCDSYRKSIRRDQIEGDFGKIVRALQPTPSLFKIARAMFEDVWNQRLAFAKEDKASLQRKIKTIDSKIETLVDRIVDADNSSIASAYEKKIAGLEKERLLIAENQAKSGAPLHAFDEMFELAMQFLANPWKLWESGQSHLRRMVLRLAFAERISYHREKGFSNPKKAIPFNMLGGIEMEKCEMAHPTGFEPVTSAFGGQRSIQLSYGCFTGAALPYQSAAHASNAN

SEQ ID NO: 8291 - protein, 506 aa, synthetic construct
MFLPSHLIALYARLSKDRSGLSENAQIQFAEGLEFVEDGGGQVSLKFKDNDISASKFSKKPRDEYDKLIAAIKRGEVEYIVVTEMTRLYRRIEELLDLIKLAETTRLRGIWTTDGIGYDLSTPEGIHAAIGAVNNAMLESAKISKRQKRKKKAQAQAGLYLGGKKAYGYEGPIRDENDVIINRGRINIAVIEDEKENWLKCVDRVIAGEPQLSIVHSMNKKGIPSPEGKEWAIGNFKRTLTLERYVIFDPEDQEQHGTLVHNGTAYRAAWPGFISREKHELLLARFRDAAAPWASRGQPKGRSYLLTGFTYCGRCGNAARGGGRQLPNRYQRRYNCRPRDNHGAIVGCGKIFRDAEALDAFVTEAVLYRFDSPEVNRALTPTDDRSEVNQLIRTLTEHRQRRSVLLREYSLGEHTKADFDFMRDTLDAEIESTQTALGKLQDANAAAILPTEGALREHWEANEPEWRRTVIKLLVEKVVIHPSRPGGATWNGRRFDPACVEIVWLH

SEQ ID NO: 8292 - protein, 518 aa, synthetic construct
MKKIADLYVRVSTDEQADRGYSQRNQEEMLRKYCDINAVEIRHVIYEDHSAKTFNRPQWKKLLADLKKYKNKTDLLLFTKWDRFSRNAGDAYQMISTLRKLGVEPQAIEQPLDLSIPENKMMLAFYLAAPEVENDRRALNTFHGMRRARKEGRYMGIAPIGYINRVKEDGTKYIAFDQPEASILKWAFEELSKGIFNTEQVLHMAKENGLKAGKNHFWRAIRNPLYCGKIEVPKYKDEERTLVRGQHEALISEMLFYKVQDVLDGRSRKYLPKALSAKPFPLRGFFLCPDCGKILTGSISKGRHKYYPYYHCSAGCRYRINSETANEIFIQNLKKYVPIPEIKNIYANVIGDCYKEQIKDVLEEKTKIISQIKDYETRISNARDLLATKQIDASDYRDMKSDYGEMVRRLELKLSGIDDENKDIEELLKAGVENLMKLNEYYENGNWIESRDLLGSIFPENFTISENGFRTARVNEVVHLIYSINRLIGLNKKGTKKNFSSLSQLVAGTGLEPVNKTK

SEQ ID NO: 8293 - protein, 571 aa, synthetic construct
MLKVAVYSRKSKFTGKGDSIENQIEMCKDYITNTIGKDVEFTIYEDEGFSGGNLDRPNFKKLMSAIKNKKFNILVCYRLDRISRNVADFSSTLEILQSNNCSFISIKEQFDTSSPMGRAMIYIASVFAQLERETIAERVKDNMLEIAKNGKWTGGKIPLGFTSDKVEYIDEKGITRTAPQLIINEKEMEFVNFLYNKYLELGSLHKLEVYIHENNIRSRNDVLYEKSSLKTILQNPIYVKANDDVVEYLNNSNWTVYGEPDNIHSLLTYNKTEQTKKDGKYTKVKKDLSERLAAVSSIKGYIDPELWLSVQRQFDKNKDTFPRLGKTHNALLVGKIRCGKCKEYMLISHGRISKTTGEKLFYYTCSLKKKSRKKLCDNGNAKAADLEKLVLLSLKQLSLNKKDFLSKIRDKYKTDENYKNIDLEKLSLNKSLKEKKLQIDNLVTKLSLCNDIEDIILNKIKTLKDECNNIEKTLTELETKTLTLKNNLLNLDLIESLLNKCSMIDKLDRSEQKLIVDNLIDTIYWYSDGPGKGKIKIKFVGTEDNQKEISFTIKEMQQLMLHFCSHSMSSI

SEQ ID NO: 8294 - protein, 527 aa, synthetic construct
MYGKLPVGKYCAYLRKSRADLEAEGRGEEDTYAKHERILFDLARRLEITITEIYREKAGTSGERISERPEMIRLLSDVEDGVWNGVLAVEVERLARGDTMDQGIVAQAFKYSKTLIVTPMRTYDPLDPNDEEYFEFNLFMARREFKTITRRLQDGRVGSVKEGKYVGNVAPYGYKRVKLPGKGWSLEIHPDQSPIVQLIFSLYTDPDPDRRMGTSRIANYLNEDIKAPTLRNVRWTVATVNGIIRNPVYMGKVKWKSRPLVKSRHGKSRPRMELDKIILEDGLHDSIIDEVTWKRAQEIMASNSHPPAPKGKISNPLAGLVRCGICGGAVVLRPYVNNPDALMCSTARCKNISSYLYLVEEKLLLALRQWLDAYKAHMETETTQTSKTIDIRVNALQEAAKGLQRKLKELREQLSNLDDLLEQKVYTVEKYVSRSSALTDRIQEAEAALMQVQSEIELEVKRSQAKAQTIPQLEHVLEVYPTIQEPAQKNELMKSILENVIYTKEKGGRWSGAQDQFTLQLQPRIPK

SEQ ID NO: 8295 - protein, 498 aa, synthetic construct
MRVAGYIRVSTEEQAKEGYSLDAQREKLSNFCRSQDGWDLIDIYPEEGKSAKDLNRPELQRLLQDAEQKKFDVILVYRLDRLTRSVSDLYDLLKTFEKNNIMFRSSTEIYDTTTAMGKLFITIVAAMAQWERENLSERVRFGMEELVRKGNWHGGPVPYGYNWEDKEMHSITDEFKVLKKLREIYMSGEGLGSTAKKLNALGYLRRGSNWSAQTVWYVLDNPFYAGRIRYGEKKKNGKYASRKKEDLVNVIWSETGFPAVYSWDEYLEHKERMKRKEFYGHSKKREYRFTGVLRCARCGATLIGRPYRNKKKDGSPGEPYYNYICSSRSLSKGCDLPLLKQDLAEALIREYIGRMDFDSNKVPIMESEINYNEEIETLQKELRGVFERRKKWQYMYVEDLINGEDLRERKKEEDDKETIIQDRLMILENSHGDNKQKEHIQRVFGLPDVWDVMDDPDKREFMQMIFKEIVIECSVKNGKTASGKGKTLPFYIKSHEFN

SEQ ID NO: 8296 - protein, 549 aa, synthetic construct
MTNTNYPDNITALYARLSQEDALDGESNSIANQKKILLKYAKDNGFPNLLFFIDDGVSGVTFDRPGWNEMIRLAESGKVKTVIVKDMSRMGRDYLKVGYYTESFFAERDIRYIAINDGVDSDKGDNDFTPFRNLFNDFYARDTSKKIRAVMRAKGNSGEHLCTNPPYGYRKNPEDKKKWIVDEEAAEVVKRIFALCVDGKGPMQIAKLLTADKVLTVKAHYAKRDGKAIPDKPYQWSAKSVAGILERPEYTGCTVNFKTYSKSHKLKKRLNNTPENYRIFPNTQPTIIDEKVFERVQELRENKRRPAKQAERQGLFSGLLYCADCGNKLHFATGKNMTPEQDCYRCARYKSNTGDCTMHYIREETLKLFVLRRIFDVTAMFIDNADDFRRVVQKQRFEEMEKAVKRRKKELEQAKKRIAELDRIFKRIYEDDVTGAISHERFLKLSAEYEAEQKELIGFVKTEQAAVDTYEQDRADFDSFAAVIRKYVGIKELTPTIVNEFVKKIIVHAPDKSSGHRRQKVEIVWNFIGTLEQDENTRTLERQRKSRTA

SEQ ID NO: 8297 - protein, 547 aa, synthetic construct
MKLLVPYIRWSTKEQDSGDSLRRQTNLIDAFYSKHKNDYYLLPAHRYVDKGKSGFHQQHKNQGSDFRRMFENVMSGVIPEGSLIVVENFDRFSRADIDTAIDDVRQILRKGVSILTLGDGELYDKSALTDPVKLIKHIIIAERAHQESLVKQKRIAQVWNHKTQLARELKKPMGKQAPGWLELSEDGSHYIVDEDKASLVNIIYDKRLSGMSMFAICKWLNEQGYPTINQRKVRISKTKKPDGNWSALSVKHILTSRSVLGYLPAKISTEDRKTVLREEIEGFYPQIVTDSKFYAVQQLLEETGKGKTSSGEHWLYVNILKGLIRCKCGLVMTPTGIRKPVYQGTYRCNGNKESRCSYGTVSRKLLDTQLCSRLFSKLSQLHDEATDTAKLDELQRRLNTVDGELEKLTETLIQLPNITQIQEALRVKQEEKDELIVQLSREKARVKSVSSLDLSGLDMESVEGRTEAQIIIKRLVKEIVVSGNEKLVDIYLHNGNMIRGFPLDGKDDHTLTLEEATDEMQSLDDMLIFGEPVTRIYPAGDMEEVDA

SEQ ID NO: 8298 - protein, 589 aa, synthetic construct
MSAHVTILRNTVLPVKFNTMNRPRLYSYIRYSSERQGKGSSIERQKSYIAEMAKQIATEYDLEIFEEYQDLGVSAYKGKNVQEGALSDFIDQVESGLIPKGSFLLIESLDRFSRQNAMQAVNLFTSLLLNGITVITGIDKQVYRQTEVNTETLQQLMFSVMLFSRANEESSTKSHRTIASALSKIRRHQERKPGDPVVAIKELGSDKWWTDSSTGYVNPHPVLFPIAKKIIQLKQDGWSNRMILQHLKNNYDGPVIGNKKSKGIWNMQHCSRILEPAIYGRKVITVNNAEYVLDDYYPAIISKDEYEALKLQVGNKGFAPNRESNPEIPLLSGIGILHCAHCSCYMVKAKSTLKNHPHAYRYQCASRDLHQDCNKWGFRASTLERTILQLIADRIFLQTKYQPSGLEGKIADIQSQIENYVLAIGSAKSPEIINSLTSQIDQLEQEKQSLIVEKRLYDESIVQMNTEGWDKFRKFDIDDALNPLRTKIRANIKTVIMRVDCSRIDKKHNLFTITYRDQHKQRIVIENNSGWKKGKIYVEAQTINDIQILESEGLILHDHIDILINRDKFMTEAKKRLDHPRTLIDELTE

SEQ ID NO: 8299 - protein, 484 aa, synthetic construct
MKPIRAILLLRISDDKSGEAAGVTRQDEDGRRLADRLGWTIGPDETHVIIENDTSAFKRRKIRLPDGGEGLRTVRPGFRRGLDMLADGTADGLLAYDLDRVARDPRDLEDLIDVVESKHHRIPVESVSGSLRLANDADVTMARVMVAVANKSSRDTSRRVARKHEELAMSGRPGGGGIRAFGYEQDGATVRQDEADTVEWMAERVLEGESLNSIAAMLNERDIAPVRGAEWNARSVWSILTGPRIAGLRRFRGAVVGEATWPAILDRDVWEEVRERISNRATGHRNQLTRWLTGTLWCSLCDYPLIGTAATKRVGPRYWCPTPRGGCGKIAITALAAEDLIGRRMIEYLSDENVTTNLLAAVSGGSSEDVRRQVAEDESQLKDLARMWATRRITLAEYSEARDIIEARIKDARMFTLGSVPRVLRRLLEGDVEEGWSDLAPKERRDVLQAIVPNGFAVLPHPKEKARRFDPDRIVPRSAEETRI

SEQ ID NO: 8300 - protein, 520 aa, synthetic construct
MTDGKLLPVGALVRISDARDEDTAGVERQEKDCRKLAAGLKVPGYDGVEVVRVYVENDTSAFKRKKIRLPDGSMGMRVVRPEFRRAVNDLASQAIGGLIGYDLDRVARDNRDLEDLIDAVEMTNALTRSVTGSLDLSTDAGITMARVLVAMANKSSRDSSRRIKRKRDEMAEEGIYVRGGRRRYGRNSDNSIRPEEAEHIKEWALRILGEFVDADGNRQVEKDSLRTIARDFTARGIPTVSASLRPDGTPQGWHVRTIHSSLTSGHVAGLVIHRGVVVKKAVDIEPILDRDLWDRVQIQLGSNSRGGGHKLKRWLSAVLLCAKCGRRLNGAPYRAARGRPMGKYQCWPENTPHIGGCGGTSIDAQHAHDTAEALILEYCSRPDVMMTLSEAVSVEGAAKARENLKADEQQMQELATMWGQKVITMPEYLAARKEIDDRINRWRAIVGQSMPSEIRKLVTADSVEAHWETLNPEARREVARVVFPFGIMIVPAKSKFQFDPDRLVKLDEPWSPSMIPAGIE

SEQ ID NO: 8301 - protein, 529 aa, synthetic construct
MTRRVAEEFRDAHPDELVGKGPGDLVDLYLRRSKKRETLETLKQHARDLRREMERQHLTVRKVWLEQRSASKQHVRREKLEGAMAAVIAGEVKTLAVWKTDRFDRRGMAAIGAALDEFDRRRARLYVLQENLDSSQQGTRIVFAILAERAREEIKDLTLRVTTGKAAARTAGRWSGGRTPYGVHSPKGSGILERHPDEYPAARRIADELLKGRSAMSVAHELERDGIRTRDGARWSSRAIVRMVKSPAWAGLLPSKERKYDADGQPLDVWIPSVEPERDSRGRPVKIGEGVVSPGERLRILASIEERVSKVGGGSTGKRPHTTFLGGILQCPRCHHTMTGSGGERGRIYRCRIRGTYGNDACPGVVVRAERLDAAVEAMWLSHVSALEHGDPGLDAIVRRWSILHDPERDAQRIELMASLDAARARRELLQHDYYIEGRLSAERFRELSDAQTELIETLEKEAARLAMEADLTVFFADGEALTEAWEESTLQDRRMLLGCVLKSLTITVPKRSGDRTPIMERLVPQWVA

SEQ ID NO: 8302 - protein, 504 aa, synthetic construct
MTLAFSYVRFSTKHQASGTSLERQVNASKLFCSQNGLTLSNQSYHDLGISGFKNVRRPELEQMLEAIQTGDIPSGSYILIEAIDRLSRKGISHTQDILKKILQYDVKVAFVGEDAKTLQGHILNKDSLNDLSSVILVALAADLAHKESLRKSKLVKASKAIARDKAADGEILPGKSVFYLDYDKKNKKYVFNKRVDLARKIVQMRLEGKGPRKIARLLNEENIPGPTGKEWYQMSVKRLLKSPVLYGAYQTHQIIEQKYIPVSLIEGYYPALIDYQVFSQIQFDDKRASKGRPSRHKFSGVLYCECGSVLCRKVNTYETKQGPKEYQYFNCFGAMEKRCNNSKAIKDLHVYLEKAIDKLQIKTRSVKNIKNEQIIAKREKIDQLNKMLLELDTPPVSVLKTISTLEKELQELLEQPEVHAPKTEDVKTLVAITDSEQYNLYLKRLVKRITIYQLNGPKNIRIKIEKTDGHYQSFVVNNGKIMFNADTKALQEHLHKLKEGTSDE

SEQ ID NO: 8303 - protein, 505 aa, synthetic construct
MKSAYLYVRVSTDEQKRKGYSLPEQEDRLLRYCEQNQIAVRGIFREDFSAKDFNRPEWKKIINALKKNKKSPPDSILFIKWDRFSRNIEYAYQMLGILRGLNTKARAIDQPIDFDVPESIVMLAVYLSIPEAENSRRGRNTSDGMRRSRKMGRWPGKAPMGYSNQSTQEGRKIIVPKFPEADLIRWAFEQFAKGTFSIRQVRTMACQKGLQCSNNNFWKILRNPIYCGIIVVRATKDEEIQFVKAIHEPIISEDLFRKVQIQLTGRRKQKEAKFCRKLLFPLRGFTDCPFCGCRFTGSISQGKLSKYRYYHCSTSRCKGRYRADILEALYESQLKRISLSPSVYELFSLVLEDENIFSARRQCLDEKKAVLTEISQFEELISKARRHLLAEKIDFEDFRSIKKEYTENIHNLNGRLQHLLQKLNGYDSSNKSIWSDSGNNIFQCYSALDFVGKRHIASLFSPSSINIQRRDFNPLQIDRAIKKIVICNAIDSDVKQANSQVYAKE

SEQ ID NO: 8304 - protein, 541 aa, synthetic construct
MQASQGVVYSYLRFSDPRQAAGNSADRQAEYAKSWAAARGLTLDESLSLRDEGLSAFHQRHIKQGALGVFLQAVDEGRIPAGSVLVVEGLDRLSRAEPIQAQAQLAQIINAGITVVTASDGREYNRERLKAQPMDLVYSLLVMIRAHEESDTKSKRVKASIKRLCDGWVAGHYRGLIRNGSDPRWVRLVDGHWELIPERVEVVRFAIDKYREGHGADRAHAMMQERGFDTSYLGISPQQIYRLIKLVALKGAKQISVDGEDFLLKDYYPRLLTDVEFDELQLLRGQRSRRRGKGAIPGVVTGIGITYCGYCGTPMTAQNVMHKVRSDGTLMDGHRRIMCMSYMNKGGCDVGGSCSVAPVERAVMSFCSDQMNLLRLQQPVGPSGDLQQGVMISRKHVVDLEAQLGRITEALALGEGDGVLPITFLRKARDLEEQLTAAKAKLHQEERELAGIASRQRPADARAWLDLAAGVEAQEVEARDKVRQLMIDTFDRIVIYMRGVVPAGRRARYIDVLLISKAGQRRWLRVERKTGEWAAGVDRPD

SEQ ID NO: 8305 - protein, 598 aa, synthetic construct
MTKKNGEVGDSVRRQMENQRKAVETYNLHVVDVFEDLGKSAFRGKHRLKGALSLFLASLDEGKIPTGAYLLIESFDRLSRERMTDGLTVVLTILRKGIKIITTDDLKLYDLSIKGKDLEQTIMITVLLERANNESTTKSDRQKAKWDGRRERIIKGEKKFLNKNVPWWISLNESTGEYSLIPERVAELKTIYELLMVKNLGLRAAAAHINENNPIKVAFGKNPKSSGWTARGIKRMIDTPSLYGSLELCEYIYDNGKSVPDRKTVQVMDNFYPAAFTKHEVDLLKAKIASRMTSKEKPTRRDLQYYNIYHGLIKCAFCGGNVRFSQKQKYSYLVCRNSEIKLCKYPKTLSIQYERFHEVFFKYAEHYNFELLIQSGGNDNDVVVKEINELEETIVSEKHKAQKFTEKLLDMFDGDIPEEQEAALLTRTKKIKALEAKVKALRAKIVYVDTDAETISDAVQYAEKLVETKDGRLELSNYLTKLIDKMVVDFGKAHGRDNDYVKVLFRNKDFSHHFLFNKTDAHSYDSDGELFLDTLSGVRRDEGYYLEAGEIPVWEGVEIPDFTDEEIQSDIEANKTNPPMPEGFVVEHYEYQDDEEIQ

SEQ ID NO: 8306 - protein, 543 aa, synthetic construct
MGTDDNNSSPFPIRAYSYVRMSTRKQLRGDSLRRQLERSKAFADEHSLLLDDSLQDLGVSAWKGRNFKTGALGRFLSMVESGQIPKGSYLLIESLDRLSREAVPDALTLFMAIINAGIVIVTLGEDRQIYSRDRLNGDWTKLIIGLAVMSRGHEESQTKSERISAVAKRKREMAREGKGHITSITPAWIDAKRIDANCYAFTLNDHVKTVQAIYEMATRGLGATVIARKLNADGIPAFKSKDGWYQSVIKALLTRQDVIGTFQPHRIIDSKRVPDGEPIANYFPAAIDKDVFLRVQARRSNPGKPSRKGKTFANLFTGLCQCAHCGGPMTMKMSRVKGNENGRYLVCANYVRGHRCVEGNRHFRYQPLEAAILDHVNELNLAETLQSTRFDDAHRELDETIARLTLEREELRRREQRLAQAIEDSSEPPDAIVDLLNVRQNERHAVEAELRQQQAERQRRSIRHDSPMETCGHIGRLRALWKRADDIARYELRCEAHTAIRELVSEISFDSRAYSAVIVVENGVTAYRVQDGRLSGHFRAFAA

SEQ ID NO: 8307 - protein, 641 aa, synthetic construct
MLRQSNEKITALYERLSRDDELQGDSNSIVNQKKMLEDYARNNGFKNLVHFTDDGFSGTNFERPGWKRLMAEMEQGKVSTIIVKDMSRVGRDYLRVGMYTEEFFKAGIRFIAVNDNVDSDNGDNDFTPFRNIMNEWTARDTSRKIRAVFRARAMEGKRISPSTPYGYLRDPQDKQKWIVDVEAAEVVQRIFRLVIEGYGVYQISDILTADKVLIPSVHWERIGADNQRHKHYQDPYRWRGGVVAKILERMEYMGHTVAFKTHTASYKDKRSKATAPEERVIFENTHEPIIDPETWRNAQRLRRTVRKPAKQEKPSRLTGLLYCADCGAKMTHDRSIDKRPGRSAKNEYYCSSYRTQTRSCTMHFIRVPVVETLILNALREVSAFARANKQEFIRLVTDSTSMRQDKTAKQQRKKLTAYRKRSNELDTIIRKLYEDNLSGKLSDKRFEKLSGDYEREQEELEQTIERIQSEIDNLEKQTVNADRFLDLVDRYTDFEELTTPMLNEFVEKVVVHERVKGSRYTTTQKVDIYFNFVGLVELPGEKNNVDPDSSALQKSVSKKAMKAYAPFKQYLEQQSASTIRLTISGIERIIGSKLTATAYKYRTYWYPQKNRPLGCVIFNAGYDIQKLDLERQLILLKRAEG

SEQ ID NO: 8308 - protein, 507 aa, synthetic construct
MKRVISYIRFSSEKQAKGDSLRRQSKMVTDWLKAHPEYCLDESLTFRDLGVSGFTGKHLQGGLGDFLTAIEKGLVKAGDTLLIESLDRLSRQDVDQASELLRNILRSGVDVVTLSDGEHYTKESLKDPLALIKSILIMQRAHEESLRKSERIQAAWDAKKESAKAGIKISKRCPAWLKLNDDRKSFSVIPEKVETVKRCFQLRLEGKSIWDIVRTLNAEGHQTLNQYKAGSFGQTSVQDLLKNRSVIGYFTPKGCEEISGYYPSIIPETDFYRVQQLSYSRYGRKPISENPMAVNLFKGVIRCSECGHTLIINGFTEKRHGIYRCPCKQENRCNAKGLSRKQTDGTLLTLLSRIDRFEPEQINVIDTLKLQREGILKNIEKLVELSLIIDDMTAITSKLKQLKSDLSLIESDIEKENQRIKSIDTGSLSDCDLRTKAGRIEAQLIIRGVVKEAVLDTTNKRCKVVFHNGKVIGLPITENPLEAVTEAMQSLSEIASKGLLDIDEFSL

SEQ ID NO: 8309 - protein, 555 aa, synthetic construct
MMIGNEIPDKLQAFSIFAKGEIKQKVSNAKCVIYTRVSSKEQTKGMSLETQRKDCELYATRNKIPIMGSFGGTYESAKTDERKEFNRMLTFVKKSKEKISIIIVYSVDRFSRSGANAIYIADQLKKQGIVVFAVTQPTDASTPSGRFQQNIQFIFSEYDNQLRREKCMAGVKEKLLAGIWCTSVPFGYDIVRSEGQPKRIVLNAKGKLIKYAFELKAMGMSNEDVRSQLAGKGLKLSNQRVSDMLRNPFYCGLVVHKALEGRILEGIQEKAVSKEVFLKVNGILAKKHKSGYTMEPENEEIPLKRFLKCEQCGQFLRAYKAYKNQQYYYKCNTKGCCCNKRADELHKTFAEMLDQYVLNIENEGIRYVISQQIVATYNQLTEEGELQRSHIDNELEEVTKRLERLEERYVMEEITKAMFDKYAGKLQEEQQELEVSLGKTGSRVSNLENCVQKAINLSSKLATVWHLSDYKGKQELQFLLFPDGIYYNRKTEGCRTPKVNEVFSYMSSLQRTLGQKESGNSNTKLDVPAWVASPGIEPGSGASETLILSIVLRSH

SEQ ID NO: 8310 - protein, 547 aa, synthetic construct
MKLLVTYIRWSTKEQDSGDSLRRQTNLIDAFYSKHKNDYYLLPAHRYVDKGKSGFHQQHKNQGSDFRRMFENVMSGAIPEGSLIVVENFDRFSRADIDTAIDDVRQILRKGVSILTLGDGELYDKSALTDPVKLIKHIIIAERAHQESLVKQKRIAQVWNHKTQLARELKKPMGKQAPGWLELSEDGSHYIVDEDKASLVNIIYDKRLSGMSMFAICKWLNEQGYPTINQRKVRISKTKKPDGNWSALSVKHILTSRSVLGYLPAKISTEDRKTVLREEIESFYPQIVTDSKFYAVQQLLEETGKGKTSSGEHWLYVNILKGLIRCKCGLVMTPTGIRKPVYQGTYRCNGNKESRCSYGTVSRKLLDTQLCSRLFSKLSQLHDEATDTAKLDELQRRLNTVDSELEKLTETLIQLPNITQIQEALRVKQEEKDELIVQLSREKARVKSVSSLDLSGLDMESVEGRTEAQIIIKRLVKEIVVSGNEKLVDIYLHNGNMIRGFPLDGKDDHTLTLEEATDEMQSLDDMLIFGEPVTRIYPAGDMEEVDA

SEQ ID NO: 8311 - protein, 568 aa, synthetic construct
MTNAALAPSETGAVQPALRAALYLRVSSPRSAESDLSIPDQRRQTSSYCHSNGWEVAAEFVEPGVSGTDDRRPAFQEMIDAALERPSPFDVIVVHSFSRFFRDQFQFEFYLRKLAKNGVQLVSITQILGDDPMSEMMRKIMTLFDEYQSKENGKHTLRAMNENARQGFWNGARPPIGYRAVAAEQRGAKIKKKLEIDPLHAETVRRIFRLALEGADGRGPIGVMAIACWLNENNIRTRYGGRWGKGMVHQVLTRTTYIGEHRFNTYDVKKGRAKPETEHAIMEVPPIITVAEFEAVQRSLKARSPKMMPPRAVGGSTLLTGICFCACCGGAMTLRTGTSRSGQEYRYYTCATKATKGKTGCPGVSLPMDRLNEAVIEHLEKRLLDPARLEVLMDQLIARRDEWVTERRQHVAEMERRATEVETKLSRLYEAIENGLVDMGDPSLKARIAELTTIRDQARGDAERAVAHIERISPEITVESLHAFALVAKRKLRHDDGSYARNHIRAVAQRVEVHSKTDVRICGTRTELLRTLTAVSGVEAAVLGTRAFGPKWCPEEDSNLHGLATAST

SEQ ID NO: 8312 - protein, 529 aa, synthetic construct
MENRAKRALIVTRLSRVTEATTSPARQMEICQGLCDDRGYEVVGHAEDLDVSGSVDPFDRKRRPNISRWLANEAEPFDVIVAYRVDRLTRSLRHLQKLVHWAEDNGKLVVSATEPHLDMTTPFAPVLIALIGTVAEMELEAIRERNSSAARHNIRAGRWRGGQPPWGYVSSNASGEWRLVPSPDQVELINEVVARVLSGEPLQRIAHDLTSRGIPTPKGRSEWNVTPLKRSLTSEAMLGYVISGDKPLRNDDGSPILRAEPILSRDVFDRVKVELESRSRRGQPTKRSSSLLLRVLYCGVCQRPAYQFNGGSHSKSPRYRCSSNARSKSCENLTVRMDLADEAFNENLLDLFGDSERLERIWDSGSDHSAELSDINEMLEDLTGLVGTGPYKTGTPQRSALDARIETLAARQAVLSSEAIRPSGWVWKEVLQLVEQPGHRKPERLAPSHERQSDIHQFIWGYHLGPGLGRPQEVRGTTEVRGVGSSDYPRYFPLETSSIHCEYSSRLFDVIAPVSMAAYIRFRYSMSLR

SEQ ID NO: 8313 - protein, 473 aa, synthetic construct
MARKVSAVRSAAVYARISADVEGKSLGVQRQLEDCRKLAAERGWVVGHEYVDNDISAYSGKARPGYEAMCSDLAAGVRDAVIVYNLDRLHRRPVELEEFVALCEAAGVNQVATVTADIDLGNDDGLFMARIFAAFAAKESGRKSARMKRKYEQKAAQGLPHGPNRPFGYDDDKITIRDAEAEVVRQLVVRVIAGESVNSLTAWLNETDVKPVRGGRWASTAVRNIVSSPRIAGLRAYKGEVVGEAAWEPIIPVAQRDQVLAALSVRSWNRKRSPRKYLLSGLCRCGRCQSRMFSAARLEAGAHKRRYVCSSSPDHGGCGRMTVVADPLEKLIADAVLTRLDSKVLADALAGKVRANPDTAALSAEVEQAQARLDELTGLYSSGAITAREWIMARDPITDTISRLRREIADTADTGPLAELAGKGSVLRAQWDDLGLDRCHAIIRAVVDHVVIKPGKPGARGLDMGRIDPIWRM

SEQ ID NO: 8314 - protein, 502 aa, synthetic construct
MNKICIYLRKSRADEELEKTLGEGETLSKHRKALLKFAKEKKLNIVKIKEEIVSGESLFFRPKMLELLKEVENKQYTGVLVMDMQRLGRGNMQDQGIILETFKKSNTKIITPMKTYDLSNDFDEEYTEFEAFMSRKELKMINRRMQGGRVRSVEDGNYIATNPPLGYDIHWIKKSRTLKINAHECEIIKLIFKLYTEGNGAGSIAEHLNNLGYKTKFNNNFSRSSVLFILKNPIYIGKVTWKKKEIKKSKNPNKVKDTRTRDKSEWIVVDGKHEPIISMKIWNKAQEILNNKYHIPYQLVNGPANPLAGVVICSKCKFKMVMRKLKGIDRLLCRNNKCDNISNRYDSTEKAIVQALERYLKEYRINISNQNKTSDIKPYERQVNILEKELAALNEQKLKLFDFLERGIYDENTFLERSKNIEERITKTSSGIEKINDIINKEKKVVKEEDVIKFQKLLDGYKNTDDIKLKNELIKKLVNKVEYTKDKRGETFGIDIFPKLKP

SEQ ID NO: 8315 - protein, 506 aa, synthetic construct
MKRIALYTRRSIYSEESESIQMQIDTCKNYFKKGDYTFETFIDEGFSGSNTNRPAFLRMLQKIENKDFDAVVVYKMDRISRNMVDFINLSNKFEILGVPLISVTEGADPSTPAGKFVMNILASVAEMERANTIQRVKDNMLTMAKHGRWTGGRTPLGYKSKKSDHGTYLTINEKEREVVYAIYRKYLKCESLNQTTKYIKANYKNISICSVMNTLTSPVYVNSCKDIHTYFKLKGFTIFGEPNEKGYITYGRRPKVNNKKDWNSKDMIVAVSKHEAIIDSKTWLKVQELLEKHSGESKPKESKYSYLNNLVKCGICGSNMFIELSYVRKDGTKVYSFRCSKRKRKSTCTNGMIMVDEMENEIEKFLMSIGTNKKIFKEAVDKSSDLSYLKEIKNLTNRINKNNTSINSLVEKLILLSTEASKVVANKIESLTEENKKLESKLFKLEKKQNLLDAKDERVYILYEEVKLFNNLKNASIPVKRKRIRNIIQKIVATKNELLDITFVED

SEQ ID NO: 8316 - protein, 502 aa, synthetic construct
MNKICIYLRKSRADEELEKTLGEGETLSKHRKALLKFAKEKKLNIVEIKEEIVSGESLFFRPKMLELLKEVENKQYTGVLVMDMQRLGRGNMQDQGIILETFKKSNTKIITPMKTYDLSNDFDEEYTEFEAFMSRKELKMINRRMQGGRVRSVEDGNYIATNPPLGYDIHWIKKSRTLKINAHECEIIKLIFKLYTEGNGAGSIAEHLNNLGYKTKFNNNFSRSSVLFILKNPIYIGKVTWKKKEIKKSKNPNKVKDTRTRDKSEWIVVDGKHEPIISMKMWNKAQEILNNKYHIPYQLVNGPANPLAGIVICSKCKFKMVMRKLKGIDRLLCRNNKCDNISNRYDSTEKAIVQALERYLKEYRINISNRNKTSDIKPYERQINILEKELAALNEQKLKLFDFLERGIYDENTFLERSKNIEERITKTSLGIEKINDIINKEKKVVKEEDVIKFQKLLDGYKNTDDIKLKNELMKKLVNKVEYTKNKRGETFGIDIFPKLKP

SEQ ID NO: 8317 - protein, 585 aa, synthetic construct
MKVALYARYSSDNQRDASIADQLRMCRLRAEKEGWTVVEEYTDHAISGASMILRPGVQALISDSLRGRFDMIMAEAMDRLSRDQEDIAGIFKRMTYADVKMFTLSEGEITHLHVGLKGTMNALFLKDLADKTRRGLRGRVEDGKSGGGLCYGYDVVKKFDDRGEAIRGDRTINETEAGIVRRIFADYLDGKSSRTIAMSLNHEGVAGPQGSEWGPSTIHGNPKRGTGILNNELYVGKLVWNRLRYIKDPDTGRRVSRLNPESEWVVHEVPDLRLIEQDIWDAVKARQSRLAYDVVETSPNPLNDRRRPKHLFAGLVKCGCCGGGYTMISKDLLGCATARNKGTCDNRLNIRRDALEASILNGLRKHLMDPALFREFCDEFTKEVNRLRIERGADLEGWKRELERTDRELDKAIDAILQGVPPLKLKEKIEKLEARKAELAEKLANAKEPPPLLHPNMAALYAQRISQLYEHLQDENGRAQAAETFRSLVDEVTLVPDNGELAIVLRGDLGAILRFAAGKKNPDFLSEAEALDNLLSQESLVAGGRNSRSLRNEGKNAKTSAARPAEVSQLSLVAGVGFEPTTFRL

SEQ ID NO: 8318 - protein, 579 aa, synthetic construct
MSATMIPAVIYARYSTDMQSASSVEDQIRLCAERAAREGMAVTQHYADHGISGASLMRPGVQQLLQDAMAGKFQVVFAEALDRISRDQEDIAAVFKRLSFAGVQIITLSEGAVSELHIGLKGTMNALFLKDLSDKTRRGLRGRIEAGKSGGGNSYGYDVARKVNAAGEPERGDRKINEAQADIVRRIFNEYAAGTSPRVIAKTLNAEHVPGPTGKTWGPSTIHGNKDRGTGILNNELYIGRLVWNRLRYVKDPETGKRLSRLNPADQWIVQDVPHLRIIEDDLWQKVKARQDATALGKHDKSKAEGFWDRRRPRFLLSGLIKCGCCGSTFVKISQQHFGCASARNKGTCENKRTIRRDVLEASVLNGLQHHLMDEELLTVFCEEYTRHLNALRMAESGNRAKDEARLAKIIRELDRMIDAICDGVPAERVKDRMISLEAERAEVEERLKAEPKEEKPLLHPSMGARYRKSVAELRTTLADQSAQHEAVEILRSLIDRIVLHPSSDEPSGFVMDIEGDLAGILSLCQTSKKAAGLSPDDLLQIKLVAGTRSGHDLQDDDDTDLQMKLVAGVGFEPTTFRL

SEQ ID NO: 8319 - protein, 510 aa, synthetic construct
MSDDRENWPFVDLLLRKSKRVRDGELTLSIRAQEDRGRAWADANRYRVRKVWKENLSAWSDVERPKYDAAMDAVLNAEVPALWCYALDRFSRKGAEAVVPILGKARVVFDYEGLDSMNERDRKWIIDKAEQARDYSNRLSYNVSSTKAKQRNEGRWLSRAPFGLKVNKKTGKLSPDKKKSKKRSYSYWDIVLRIFTEIADGKSARGLARDFNGEGITTAWGNAWRAESIRYIVINPVYEGWLTVSIKGRPTAYRNEEGKRVKVAAKKSEMIPKKLAEKARRVLSGHQILDNTPKEGRSKHLLAERVGCISCKYAMTLNGVSYVCSGPACELPAMVTRTLLEKHVLKLWFARLDNAERDDPILTVVAQRWHALTRPKEAKGMREATAALREAKSALDKFHADDRAGFYEGRSARYRIPAKNKAEERLTAAEKRVEKLSGGAVDITFLMWGHAAKAWKKADDALKRELLGLAIDRVYVAKAAKKGVRFDGDSRVVIEWAQPEEGDEEPTLAA

SEQ ID NO: 8320 - protein, 506 aa, synthetic construct
MRTVITYLRFSSATQGAEGADSTRRQNELFKQWLRKNSDAQVVASFSDEGLSGYKGKHLTGQFGDMLARIESGEFSEGTVLLVEAIDRIGRLEHLETEALMNRIIAHGIEIHTLQDGLIYTRDALSDDLGISIIQRVKSYVAHQESKQKSFRVSQKWKQRAKLALAGEQRLTRNVPGWIDPDTFKCNEHAETVRLIFKLLLDGESLHNIARHLQSNDIKSFSRRKDANGFSVHSVRTVLRSESVIGTLPASQRNDRPAIPNYYEAAIDAATFNKAQEILDKNRKGRTPASDNPLTINIFKGLFRCQCGASVHPTGTKRTYQGVYRCNNHLDGRCDVPPLKRKPFDRWMIDNFLGMIDVGNDGEAEGKIASLQHEVEIVTARIKKATALLLEMDDITELKAQVKGLNQKRTELQTTIDNMRRKASLTDKELPQLKDIDLTTKAGRVECQLILSKHLKGLTLGKDSVTVTLQNDTEITIPTNPLPLNDGSPIFEIADKELLDIDAYQL

SEQ ID NO: 8321 - protein, 527 aa, synthetic construct
MSYLMYLRKSRADKEAESRGEGETLARHELLLTELSVKMDLEIGAVYKELVSGETISARPKMQQLLVEVMQGMWEGVLVMEVERLARGDTKDQGTVAEAFKFSNTRIITPMKTYDPSDEFDEEYFEFNLFMSRREYKTINRRIQRGRIAAFRDGWYIAGTAPYGYEKVKHKGDKGYTLQIVPEEAKIIKYIFELYTAGEPQEDGSYAQFGSYQIRDRLNELSIPSRSEKPWSASSIVDILNNPTYCGYQRWQWRKVQKQMVGGKIIESRPKDADCEKVRGRFDPIISEDTFNLAQKIKAGKPLPINTSTALQNPLSGLVYCAKCGNLMTRQPSNTRLRYAVLRCANSKCSNISSPLSLIEEQVIESLKEWIPEYDVEWPEQSEHEGETTLTVLENSIGNIKEKLNQTIKQLNKTFDLLEQGIYNLETFQDRRVTLDTQKAELEEELTRIETERNRIISIEQARRDFIPAIEHLIEAYWEVDDIMTRNFMLRNVIDHIDYLKTERNKKGAGNTANFTLNIFPRIPENR

SEQ ID NO: 8322 - protein, 508 aa, synthetic construct
MKKAIAYMRFSSPGQMSGDSLNRQRRLITEWLKVNSDYYLDTVTYEDLGLSAFNGKHAQSGAFSEFLDAIEHGYILPGTTLLVESLDRLSREKVGEAIERLKLILNHGIDVITLCDNTVYNIDSLNEPYSLIKAMLIAQRANEESEIKSSRVKLSWKKKRQDALESGTIMTASCPRWLSLDDKRTAFVPDPDRVKTIELIFKLRMERRSLNAIAKYLNDHAVKNFSGKESAWGPSVIEKLLANKALIGICVPSYRARGKGISEIAGYYPRVISDDLFYAVQEIRLAPFGISNSSKNPMLINLLRTVMKCEACGNTMIVHAVSGSLHGYYVCPMRRLHRCDRPSIKRDLVDYNIINELLFNCSKIQPVENKKDANETLELKIIELQMKINNLIVALSVAPEVTAIAEKIRLLDKELRRASVSLKTLKSKGVSSLGDFHAIDLTSKNGRELCRTLAYKIFEKIIINTDNKTCDIYFMNGIVFKHYPLMKVISAQQAISTLKYMVDGEIYF

SEQ ID NO: 8323 - protein, 587 aa, synthetic construct
MAVIQSIDGVLKGVKPHVKAWLYCRVSTLIQIDGYGLQRQQDTVKAFITSYKVPDELGYDIDRENYEVIEDVGRSAYHGNNFTKGELGKFRQKVLDREIISGLLLIENVDRFTRMPEYLSMQEFNNLILRGIDILEVETGTIFSKKIDGSLTKLSVSISRAYSESKRKSNISKRSWANRKRKSLEQGIAINNNTPEWLILHDDKQSYILDEQKIKIINDAFQLYVEGHGATSIINRLNKQKIFINSTGWSTNKFYHLLRNKRLIGFLGDERHYPEVVDPVLFNQVQTLLDGRARQRKKSGTMMRSLFNGIAKCKYCGNGMVCQTMTSSQSYLRCIAERSKTTKCDTAKLIRYKEAEKVLLEHIRNVDWASLQKESSRDAHELNELKIQAAIINGKIEDAQKELVKADDDLIVLLSRVITNRRNELRTLEEKIINLEGNVEEPDVSIIKDLEAIQDQSNIELRQKIYTLLNKTVSTITCARYDIPETIYVFELNYIGTEQKHVVYCTKALEKVIAIYIKKKDDVDLYVTSSFSIEATDKEITLYIPSAIIMEDYATLKNYLELTDANSKIAIWMQTHYDEVLSQAYYR

SEQ ID NO: 8324 - protein, 559 aa, synthetic construct
MKTKLYSYIRFSSMRQNDGSSYERQIRMAREVATKYDLELVNDYQDLGVSAFKGANSKTGALSRFLDAIGRSVPVGSWLFIENLDRLSRADIVSAQELFLSIIRRGITIVTGMDNKIYSLDTVTANPMDLMFSILLFIRGNEESQTKRNRTNSSALIKIKSHQENPQNPAVAIEEVGKNMWWTDTTSGYVLPHPTYFPVVQEIVELRKNGRSTAEILDHLNETYAPPPAVSNKKHSKWSRAMVERLFHTRALIGIKEVSVDGVNYELKDYYPRVIDDATFYHLKKNIGARAWNFGDKEEVKPIPLLSGIGLLKCDHCGCAMVKVKGTNKRSDQYRYTCDATRSRRLDCEHPNWSFRGDQLEKAVLQLLADKIWIAEDKANPVPALKVQVDEISRKIDNLIALSAMTGATKELADQITTLNSERETLYNQIKMAEEEMYSVDSQGWEKLAEFDLEDVYNEERLKVRFKIKQALKRIGCSRIDRNKNLFVLEYIDGKTQRVVIENSRGTRKGRIFIDLKTINDRQILESNGLVLHPCLDMLTDKNWKPEEEIPGPLQEFGI

SEQ ID NO: 8325 - protein, 508 aa, synthetic construct
MKKAIAYMRFSSPGQMSGDSLNRQRRLIAEWLKVNSDYYLDTITYEDLGLSAFKGKHAQSGAFSEFLDAIEHGYILPGTTLLVESLDRLSREKVGEAIERLKLILNHGIDVITLCDNTVYNIDSLNEPYSLIKAILIAQRANEESEIKSSRVKLSWKKKRQDALESGTIMTASCPRWLSLDDKRTAFVPDPDRVKTIELIFKLRMERRSLNAIAKYLNDHAVKNFSGKESAWGPSVIEKLLANKALIGICVPSYRARGKGISEIAGYYPRVISDDLFYAVQEIRLAPFGISNSGKNPMLINLLRTVMKCEACGNTMIVHAVSGSLHGYYVCPMRRLHRCDRPSIKRDLVDYNIINELLFNCSKIQPVENKKDANETLELKIIELQMKINNLIVALSVAPEVTAIAEKIRLLDKELRRASVSLKTLKSKGVNSFSDFYAIDLTSKNGRELCRTLAYKTFEKIIINTDNKTCDIYFMNGIVFKHYPLMKVISAQQAISALKYMVDGEIYF

SEQ ID NO: 8326 - protein, 540 aa, synthetic construct
MKAIAIYARKSLFTGKGDSIGAQVDTCKRFIDYKFANEDYEIKIFQDEGWSGKTTDRPDFTNMVNLIKSKKIDYVITYKLDRVGRTARDLHNFLYELDQLGIVYLSATEPYDTTTSAGRFMISILAAMAQMERERLAERVKSGMIQLAKKGRWLGGQCPLGFDSKKEFYIDDMGKERQMIKLTPNKEEIKIVKLIYDKYLEMGSMSQVRKYCLENSIRGKNGGDFSTNTLKQLLTSPIYVKSSSDIFKYLESHGINVFGTPNGNGMLTFNKTKEIRIERDKSEWIAAVGKHKGIIEDTKWLQIQKQLQQQAEKQIKSSGRQGTTSTGLLSGIIKCEKCGNNLLIKTGHKSKKNPGTTYSYYVCGKKDNSYGHKCDNKNVRTDEADSAVITQLKLYNKELLIKNLKEALIKNEKADTDNIEILESKLKEKEKAVSNLVKKLSLVDDENISNIILSEVTKINKEINDIKLQLSNETLKINEVTKATLDTEIYIKILENFNKKIDDITDPIEKMNLLKSALESVEWNGDSGEFKINLIGSKKK

SEQ ID NO: 8327 - protein, 539 aa, synthetic construct
MRTLLYARFSSHLQNSKSIADQVALLTARCEREGWQIVDIYTDHAISGAAGIDEGQRPGLAALLDRLSRRDIDQVFAESTDRLARHEGDAFTIRERIAFFGARLYTANDGEVDDIKGTIKGLFDSRFRKELGAKVKRGQHGTVSDGRAPAGKAYGYAIANRLTPDGKLLRGLRTIDPDQAVIVRRIFSEYAAGISPRAIAHRLNNQGITGPSGGHWRSSTIAGDRQRQNGMLQNELYRGVLVFNRTSKLRDPVTRKTLIKPNPESLWQRHDVPELRIISDDLWAAVQAKRQRYATHTPQDARRPKRPLSGLTVCGTCGGAWIVLNRNYTGCGSRKDGSTCDNSARVRIDRLEARVLGGLEEQLLQPELVSAFVAEFHRERATLLKAATRQRSGMESELKKVETQIARLVEAIMDPELDLAEVRDRLTAAKARQLELRQTLSAIEDPRVVTLHPNLAEDYRKRWANLRSAMATQEGLTEIVPHLRAMIDRITISPPAEPKGEAQIEIVGKLAEILGFATGKPIQDECTIAVERVRGIEPL

SEQ ID NO: 8328 - protein, 541 aa, synthetic construct
MLRQTTQQLITALYPRLSHEDELQGESNSISNQKRILETYAKQNGFSNLRWYTDDGYSGANFQRPGFQAMLADIEAGKVGTVIVKDMSRLGRNYLQVGMYTEMIFPQKGVRFIAINDGVDSAQGENDFAPLRNIFNEWLVRDTSKKIKAVKRSKGMSGKPITSKPVYGYLMDEDENFIIDEEAAPVVRQIYSLCLAGNGPTKIARMLTEQQIPTPGTLEYRRTGSTRRYHPGYECKWATNTVVHLLENREYTGCLVNFKTEKPSYKLKHSIENPPEKQAVFENHHEPIIDRETWERVQELRKQRKRPNRYDEVGLFSGILFCADCGSVMYQQRYQTDKRKQDCYICGSYKKRTADCTAHFIRTDLLTAGVLSNLRKVTSYAAKHEARFMKLLIEQNEDGDRRRNAAKKKELEAAEKRIAELSAIFKRLYEDSVTGRISDERFTELSADYEAEQKELKERAARLREELSKAQEATANAEKFMNVVRRHTTIEELTPTLLREFVEKIVVHESVALDGKRRGKLRRQEIEIYYSFVGKVELPDT

SEQ ID NO: 8329 - protein, 540 aa, synthetic construct
MSRNLRKKIILITAAFSAPSAEAGWCGTLKSMGTLYGSVMAESGKAQLTVKELGFLTEWCRLSCQYGKRFTSRKGRAEMARNITVIPAKSRNELQGKSRTEKKLKVAAYCRVSTDQEDQLHSFEAQVEYYTRYISDHPNYEMAGIYADEGITGTNTKKREQFRRMISDCESGKIDMVITKSISRFARNTQDCLQYSRMLKNLGIGILFEKEHINTLDSSGELLFTILSSLAQDESRNISENCKWGIRSKFKKGEMHVNTHKFLGYDKVDGKLVINEREAKIVRRIYREFLWGHSPQEIAKGLEDEGIEGCMGAKKWYPSTVINILKNEKHMGDALLQKSYTADFLTKKQVKNHGEVTQVYVKGSHIGIIDKETWNAVQLEFARREEFVKEHGLKGYGYGRECNPFTSRIFCGECGSPYTRHTWRSRGIMQWQCKNHMTDGKVTCVNGFVSQSDLELGFVKAYNMLLKHKEILIPRWKDTIENGNALERLRAKQFLDLSEQPELECYVPELAQMVIQMVIIKGIKKYEFTFMDGSRETVCV

SEQ ID NO: 8330 - protein, 609 aa, synthetic construct
MIRAVIYCRCSTEEESQKNALEKQVAEAESSVRQYGWVLVDRYVESRSGTTAKGRNEYKRLFNDLLTDKFDVIVIKSQDRLMRNTKDWYLFVDRLCTEQKKLYMYIENKFYSTDDALITGIKAILAEEYSRELSKKINNAHRNRQRDGGNVMLPGNAYGFKRMPDKSVALVEKEAEIKREMYRLCAAGYGTRTISTIMRNRGIVNRDGKPFTSSYILRMLRNPINKGTAVMGKYHFDFDSKRTIKNPKEKIYIHEDKVPRTVSDELWNAANEQIDKRSVKTKDGEDDIGKNPGKYQPSGKIVCGMCGQPYWRKVHRKHSNHELIYTWACSSYLELGRSDNLRARPNLRKVFLENEKGCDNINIAENEFYAVLEEICSNQYQKNKKKIIEKIMKLLSKSLNNQDGTKEIEKLEREQEDIERKMKFLVDKLIDGVLTDQMYKTKQEELEKKRDQNKKKILELTERTSNTQNIKDRLQEIETRLNDDDLFKKATIDDMLEEVDKIVVYPRYMEIYFSLSSVTGCMDLKIFDGDKKCFRVDYGNRLDYKGRQCDAREVVVDLIRENPRITGKMIAKEIGCSLSGANYKLKVLKKEGRIRFNGAGGKGCWEILE

SEQ ID NO: 8331 - protein, 540 aa, synthetic construct
MKQPYNTTIYNTALYLRLSRDDELQGESGSIQTQRMMLRQYAAEHGLTVVDEYIDDGWSGTNFERPSFQRMIDDIEDGKINCVVTKDLSRLGRNYILTGQYTEIYFPSKGVRYIAINDNVDTINGESELAPFLNILNEMHARQTSKKVKAAMHTRFANGAHYGAYAPLGYVKDPDKKGHLLIDPETRWIVEKIFDLAVHGRGAASITRILVEEKVPTPGWLNYERYGTFANIYAGAPAEKAYAWTIAQVKSILKEETYIGHSVHNKQSNISFKNKKKVRKPQEEWYRVENTHEAIISEEVFQKVQELIASRRRRQKNGTTQIFSGLVKCADCGWSLAYGVNSQNKNPYAHYHCSKYGQGLRQCSMHYIRYDVLYAYVLARLQYWSMLAQKDEDKLLKRLLNASDRERNSAKKKQAAELKKAEKRKAEVDGLFAKMYEDWSAGRITEYNFNMLSEKYQNEQRELETKIRQLHETMEAAVQTAADAEKWIALMKQYVNPVELTAELLNTLIEKITVHEAVKGEDGSREQEVEIYYRFIGKID

SEQ ID NO: 8332 - protein, 541 aa, synthetic construct
MQTTEIRETWTALYARLSLDDGNVGESMSIQSQKAILTRKAEELGIYNYRFYVDDGYSGTNFNRPSFQQMIADIEAGKVTCVITKDLSRLGRNYLESGAYIEVFFPKHQVRYIAVNDGVDSANSGEMDITPFKNILNEFYSRDVSKKVKSGKYIRASQGKFMGTHAPFGYQKDPEDKNHLIADEETAPTVRYIFQLALQGMGNNKIGKILYEQKIPKPAYYKPEYFGKFLVKEDDAYNWKQETVIRILRNPLYKGYFWVQKYDKKHFKQETRGYIPMSERTIIPSDHEALVDEHTWDTVQEILDRHTKVKPCTSGYENKFRGILKCADCGSTLMVHTDGRNKEKPVIERTFYQCRIYRVRGTGFCSQHRINADDLEKLVLADIQTHAKKVIKNREKFMRKVLGQMDMTAANNRENIQKKLEKLEKKLLESDRQFIKLYEDFTKQLVSEQQFRMLSTHFEQEKKETTEEIEKLKTTADNLKDSTCKAEQLANEMAECAEIKELTTAIVNRLIEKIEVSEPQTIDGEKVQNIRIFYKFVGEIN

SEQ ID NO: 8333 - protein, 640 aa, synthetic construct
MRRKKDKSNGITALYERLSRDDDNAGESNSIVHQKQMLEDYAIKHGFTNLVHFTDDGWSGATFDRPSWNRLVEGVKNGEITACICKDMSRIGRDHLQVGFFTDILFREKEVRFIAINNGIDSDRQETSEFAPFLNIMNEWFVRDTSKKIKAVLKSRGSSGNAHTSNIPPYGYLKDPENPDHWIIDEEAAEVVRRIYRMTIEGKGPYQIARELSEEKIERPSYYLGKKGLGNHASNYDKENPYMWRGNQVTTLIARPEYIGKTVNFRTFKNSYKDKKTKRADKEDWVVFDDTQEPIVDEETWLLAQKLRQNVRKADPMGEPNVLTGKIYCADCGAPMYNHRQRKGRERIYYTAKGEKRTSHSNPADCYECSTYNLGCQRYDRHCTCHHISTKALKSIILKTIQETCHYVSLNEREFVYSLQEESAMKDIAVSETVKNRIERNQKRVHELDMLIRKIYEDNVIGRLPDRLFQSMLTDYENELNELNKIIETDTADMQRIIGGQNNVERFLKLVKKYENITELTPAMINEFIDKILVHEPQGKGADRTTEVEIYLNYVGQFQVPVEQHEPTEEERIAAEKEAERLRRKRESNRKYMKKIREKSKEFAEHERIAEEKSSDSNVCVEQNATSKSNRQKVKGEKIA

SEQ ID NO: 8334 - protein, 556 aa, synthetic construct
MAMMNEMEYRTIGSALAGGYRAAVYCRLSKDDDLQGESASIANQRDMLEKYCEKQGWEVVAVYQDDGFTGLNMERPDLQRMLRAIERRQINLVITKDLSRLGRNYLQTGHLIEDFFPRNGVRYIAMNDGIDTLRDNNDIAPFKNILNEMYSKDISKKVHSSYLLKAQKGQFTGCLAPFGYRKDPEDKNHLLIDEETAPIVRLIFGYALNGHGPNYIRRRLEEEKIPCPTWWNRERGLRNTRTKWEKKDPENGRYMWDFSVIKDLLMNPVYTGAIASQKKDYRFKIGTIGEKKPEDWVVVEGQHEPLIDRMSFDIVQNKLKSRQRPGQTNEISLFAGLIKCGECGKSLTIRYTNAKHPQRIYSCKTYNAFGKNHCTQHRIDYDTLYSHVLRKIRECARAALMDGEAVADRLTNTCEAEQREQREAMERSLTRDEERIEVLDKMVMRLYEDMIAGRISEQNFNTMLEKTQTEQTELKTKVSEGRKRLSDEVQLANDAKQWVEAIQEYANITELDAATLNRLIKEIVVHERIDEDKTRHISIEIHFNLKPIPEVEQVTA

SEQ ID NO: 8335 - protein, 627 aa, synthetic construct
MTEKQGFMTALYERLSRDDELNGESNSISNQKKLLEQYAKEHGFTNLVHFTDDGISGTRFDRPGFLAMMKEVESGKVRTILIKDMSRMGRDYLKVGQYMELLRQKNVRLIAVNENVDSFREDDDFTPFRNIMNEWYARDTSKKIKSTFKAKGKSGKHVASTTPYGYLKDKDDPNVWIVDEEAAVVVRRIFHMTMDGYGPYQIARALKEDKVEIPAVHMAKKDAGLWKGRVEEIKDPYGWGSSTVAGILKKREYLGHTVNFKTRKHFKDKKSHYVSEDNWTVFENTQEAIINQETFDNVQRIRSNVRRYPDGWGEAHPLTGLMYCADCGSKMYVHRVNNGKRVPQYTCSAYSKVPVGTLCQTQHRINADVVMELIKELLKAVAEYSQLNREEFLETVKKAQTSQQSSEITRLKNRLAEAKKRVQELEKLICRIYEDNILGKLPDERYTILDGQYSKEQKDLSAEIADMEAELSGYEEGRRSAEKFIALVDKYQNFEELTTYMLNEFVEKIVVHERDRKGSIETTQEVEIYFNFIGKYLPPHFGEVEMTPEEIEEMKKREARKDRLHQNYLKRKANGKQQEYYERTKAKKKAEMDAKKEEIRQEDIAKGVFVPVSLLPPAEPKKGVASA

SEQ ID NO: 8336 - protein, 616 aa, synthetic construct
MSNYNKITALYSRLSVGDEDRDGGESNSIQNQKIFLENYAKGQHLTNIRHYIDDDESGRFFDRSAYSRMIEDVESGKIGVCIMKDLTRWGRDYLQVGNAMEIFRRNNVRFIAVNNGIDSENPDTLEFAPFINIMSEWYAKDISKKVKTGIKTKGMSGKPIATEAPYGYIKAPDNKDFWIIDEEAAEVVRLIFRLFLDGKNRNQIAVYLTQEQIPTPTFYMKDRGRGTCKNKTLNEDNRYKWNKATLTHILTRQEYCGDVVNFKTTKHFRDKRNHYVDRSQWHITENVHEPIIDRTDFENVQRILENAPVKRPNGDGEIHPLSGLLFCKDCGAKMHIRIDYRNGGKRHVAYCSEYHKGKAKNPKCSSPHIMDADLLMQTVADVLKKIAEYSISNRAEFEALVKKSLAMQQTDKTKKQQKRIPQITTRLEQIDKVLNKLYEDNALGTIPQDRYEQMSQKYSEEYYSLKAELEQLREQLSAFENAGGRAQKFVKLIDRYADFTDLTPTILNEFISRIEVHERDKKRAKQAIQHIGIYFNHIGRFENELTQLAEPTEQEIRQMREEIEEARKEKSRAYHRNYSREYRARNLEKRREYDRIKAREYRAKKKAQAAAALSAP

SEQ ID NO: 8337 - protein, 522 aa, synthetic construct
MKRTFDHIKHVAIYLRISQEKKGENVETLENHRQILCDFCKENRYTYEEYGEVVSGGKSEIEQRKELQRLLEDIEKFDAILCFELTRLSRNGLISQTVKQYCIDYDKPILTPYQSYDLANSETDRLLYDVGSMISSHEHGTIGKRSKANKKQMSKAGLHVSGNVPFGYRRNNETKKLEIYEEEAKVVRYIFKLHSEGLGSFKIRDILNSEGYKSAKGKAFELPTIKRIIKNPTYKGTIVFNDRKKVKKNGKFVYEPIETIQVDNAHPAIIPPDEWNRANRERLNRAKQAAVIREKPASTTGTTMLKDLVYCGVCGRKMRIFFDDRSSTGYVIQRCYHLYNGEKCPNRGIKLELVEKEVAKALPNFKSLLKKSVQRLQQDKEAGVETDIKRKIKQQERKLKDLNDQQDKLIDLALKGIFNEEEIRNKKQELIDEIKYTESAIADLKEKMSNIDINDHINSLVNIIELIEKLPNMEPEEVNQSLKTFINKIVYTRVLPPELLKKSTRNKERKEYPFEIEIEFIE

SEQ ID NO: 8338 - protein, 518 aa, synthetic construct
MQYEEYLIYLRKSRSDASLEAMGVDVLERHEQILLDLAKRMNLSIGGIYREVVSGESISARPEMQRLLSEVEAGRWKGVVVMEVERLARGDTIDQGIVQRAFQYSGTQIVTPAKTYNPNNEFDEEYFEFGLFMSRREYKTIRRRMRAGVTAAVKEGKWPFNKAPYGWQRVKLEHARGWVLAPDPEEAPVVKLIFQLYTGPDRIGITNICRYLDNRGVKPRNGDTWTECSIMGILRNIVNDQRVGIGRRKIVKQVQNGSVSKVRPHSDYDFTAPGLQPRLIDHDVFLEAQTHLGKNSHKLPESYGIKNPLAGIVVCSCCGKKMMRRPASKTPGGASYDVLKCNTRNCPTIGSALDLVEREVIQALSDWVAGYQLDPTLEVENKVPEKEQLLSSAISNHDVLLKQNGNLYDLLEQGVYTTEIFLERSHELQKRIKESEAHIEVLKKDLEYEKEKIANIENFIPSCMELLSCYWELSAQDRNKALKMLLENVEYTKTKRNQKGDKDNPTFTLNLKPRIPRI

SEQ ID NO: 8339 - protein, 495 aa, synthetic construct
MTTAAAYARFSSDAQRDESIEIQLREIGRLCDREGWDLAQTYTDYAISGTREDRPGFLRCVADAERGLFDVLVVYKMDRFARNVSYAQETKRRLFAAGVRIVSVREGEQTDTPDGFLTGGISDLFAEYYSRNLSVLVRGGIAQSARECKAAGRRMFGYAVDPETDRFVPDPVQAPQVRGMYDRYRSGETMEEIAAWLASEGARTLRGNLWSVTAIGNALRNPAYKGVYAYAGTEVEGGMPAIVPEEEWDEVEEIRLRRKNSKRRRRVNDYLLTEKVYCARCGKPMCGTAGTGRSGRKYTYYGCMHRGGCRVRVPSDAVEQTVLAALTDMLSDPGTVDAIAADMLELAQGRVRHAPEWRSEATESRRRRDRLVAAVADGLPVDSVRDQIVGLEERIRELEALADAEEAEAETMLDPDRARGFIEGYMSLIANRKDYARPLVDTFVDRIYVDPESAVVFFAIGEERDWGFDISELGSIKKSEPAGRLQVRSYDLWSG

SEQ ID NO: 8340 - protein, 502 aa, synthetic construct
MTNKICIYLRKSRADEELEKTLGEGETLYKHRNALLKFAKEKKLNIVEIKEEIVSGESLFFRPQMLELLKEVEANKYDGVLVMDMQRLGRGDMKDQGIILETFKNSNTKIITPQKTYDLNNDFDEEYTEFEAFMSRKELKMINRRMQGGRVRSIEEGNYIATNPPFGYDISFIKKSRTLKINEHESKAVKLIFKLYIKGNGASFIANELNNLGYKTKLGNNFSSSSVLTIIKNPVYAGKIAWKRKDIKKSRTPGKIKDTKLRDKSEWIISDGKHEAIIDMETWNLAEEILKGRYHIPYQLANAPVNPFAGLITCGVCGKKMVMRKARGINRLMCIYKCGNKSTRFDNVESDCLDALKEYLVNYSAEIKNSTKKEDVDVYSNQISMLKKELSLLNNQKLKLFDLLERNIYDETTFLERSKNINDRIFSINNSLCNLEKLLKKKSIRSYEEDIKLFKSVLDAYNETEDVSKRNTLLKSILYKIEYTKTEKGKDYEIKLFPKLRK

SEQ ID NO: 8341 - protein, 517 aa, synthetic construct
MNNNIACYIRVSTDKEDQQKSLDRQRILLQEQFKDSNISLYSDTGTGTSFNRVGFKQLLFDCGLNARKLRDGRITFEADLTRDSIYNEIIVLSSSRFARNIAIIDILRVLWDYKKVNVKFLDVQKDSSNSSDMILLQMFFAMAENEVKETSVRTKRGNKTSIIQNRIRNNSIFGWDFDRETNSLIANLKEKVIVEFIFKTSLTNGLKKTAKIVNEKGYRTKKGNLWTDSTIKTLITNPKYKGYNVRNKFNNINLFTESKTKYVKKEHWIIQKNERIEPLVSEELWEEVQKALEERCISGNRGQNARIYDTRGKIKCNCGANYTRCVTTRVADKPREQHYLICGNKKKYSKNYCSSENITVGTLDNFIEEQRVNYYKNIQLQIQIKIIQLENELEKINSNEIFNTKDKENKLEILKNKLEKLIDTFIASSETMQEVLQNKINELEKEISKLEFEIANSKSINFNREKHQRDINSKITKLRDNLKTLSNKELTRKEWLDKVESITINSKLDFKVKYNFE

SEQ ID NO: 8342 - protein, 558 aa, synthetic construct
MNIDKVNKIEQVAIYCRVSTIEQAEEGYSIDEQERLLRDWCNRMNYSVYKVYSDRGISGKDIKNRPALKELLKDAEERKFQMVISWKINRISRKLSDVLKIVDILEQNSISFNSYSEQFDNSTPAGKMQFQMMALIGEFERGTIAQNVKMGMCAKAKAGEWCGGRVLGYDLVPVENQEGTKRRKTKLTINEIEARSVRLIFNEYSNGKGYKAITNQLNKLGYKTKKGNDFSVGSIREILTNPVYIGKVRYNVRQNWSEKRRRNINANPIITDGIHEPIIDEGLWDKVQAIMESKKGKPSRIYDGEYPLTGILKCPKCGAGMVISRTTNKLADGTKKRIAYYCCGAWKNKGTSVCNSNTIRVDKANEYVFNKLSELLSNEKMVETIVRNVNKERHNKINPAKKELEGIDKELEKIDRKKTKLFEAYEEEVISKEEFKERKDELNKRAKSLQEEKEPLLVTLSDDVSEEIPYEFIKSILENFSKVLTVSATREQQKKLLHMIISEITINEAREIDSIKLKINDSLVDYISKEEGVSIKDTPSSFMLRNIGMSVLNLDIAI

SEQ ID NO: 8343 - protein, 463 aa, synthetic construct
MARSVTVIPARNRQVSGYRAAPQKKIRVAAYCRVSTDQEDQLHSFEAQVDYYTKYINDHENYEMAGIYADEGISGTNTKKREQFKRMIADCEKGKINLVITKSISRFARNTQDCLMYSRKLKNLGIGIIFEKENINTLDSTGELLFTILSSLAQDESRNISENCKWGIRTKFKNGEMHLNTFKFLGYDKDENGKLIINREQAKTVRRIYRDFLWGLNPAQIAKELEDEQVPGCLGQTKWYASTVIGILKQEKHMGDALLQKTYTADFLTKRQVKNNGEVAQVYVKDSHKGIIDKETWNAVQEEFERREKFMQKHGTDRYSYGSECYPFCEKIFCGECGSLFTRHSWKSRGIIQWQCKNHRKDGKVACTNAYVDNADLEKGFVKAFNRLVSEREKHMERWNAMRSDGTPLEKIRAGQMMEVTGSGQLQQYVPEAAQLVLEEITIFGAKKYEFAFLEGSRVKVSV

SEQ ID NO: 8344 - protein, 463 aa, synthetic construct
MPSKIERCAIYIRVSTAEQMMHGKSLEAQKQYLTNYAKEHNMTVAGVYADEGKTARKELKKRKAIHSLLEDVKAGKIDVIIFWRIDRWFRNLSDFYKVQEVLDDNNVHWISTSEPGINMETRDGRLQLNVVLSIGQNEVDTTSERIKFVNEASIRQGKLIFGDVNMGYGYKSGIIDGVKRMVKDPDREDTVNAFYRFFFKHHAKGLSMRYIQENYDPDFTWANMRTLLSSEFYKGTYRGIPYCPAYLTESEWNNLQEIQNANVKRAPSGRIYLFSGMINCPICGRRLSARGSSSIINRKTGAKKVYCYYRCNKAFIDHKCSYRHMVSQNLIERYLIDHLEYEYNKFKIKCEKIEKEQEKKKKVQTPEKLQKELERLNLLFQKGRIEWDYYSKEYDRIENELNELLNAAPELEPDYAYLEELLNTDFRTMYYNLTQENRRAFWHSIIREIHLNTDHTVDSVDFL

SEQ ID NO: 8345 - protein, 486 aa, synthetic construct
MKAAAYARYSTDKQTENSIAYQMNAITKYCLDHDIDLISAFSDEAESGTNTDREGFQNLVRAAQNKEFEAVVIYDISRGSRDVADWFQFRKTMRALGVQVISTNQQLGDITNPNDFLIELINVGLGQHMVLDTRKKSMAGMLERAKKGLYCGGNCPLGYRIENGKYVIEEKEADLVREIFTRYAAGESYSQIIDALNGAVGKFGRPIGKNSLHSILVNERYTGVYKWNERNVRIMRKWAGGKKNPDPVIIDGIIPPIIDKTTWERVKKRMAIRKNGTNKAKREYLLTGLIECAECGATYVGHCNVAHRKDGSIRENRYYECGNKYRTRTCHSKNINADELELFVVTQIQDALRNWNPSEVARKYIKEIQGATADCTEEKRELVDVEHQINNGVKAVLSGMRVPELDKEIDRLRQRKLDLENIIAEKSQQTNHSYSADEIEAALSDLIKNFDPKEAVKQLVQKIYANADGSCTVHIGVHKIGAGDRT

SEQ ID NO: 8346 - protein, 536 aa, synthetic construct
MTAVIYARYSTDSQREESIEGQIRECTAYAEKNGFTVVKHYIDRAVSAKTDNRPQFQQMIKDSERGIFDVIIVWKLDRFARNRYDSARYKTQLKRNGVKLVSATEVISAGPEGIILESVLEGYAEYYSADLSEKVVRGMTENALKGIYNGGTIPFGYMIDETRHYQPDPLLAPYVEQTFQKYADGATMTDLRDWLKAHNIKNSMGGEMSYNTIQRMLSNRRYIGELRLRDVVQPNAIPALVSEELFNKVQKKLAKNKKAPARHKAEEIYLLTTKLYCGKCGALMFGESGVSHTGKMYTYYKCAAAKKKKTCDKKAVRKQWLEDLVVNETMKLVEDDASMNAIIVKVMELQNQESTDLPIYEKQLKETEVGITNMLNAIQMGILTSSTKERLEALEDQRKELQARIAEERLAKPKMKEEFVRFWLLRFRKLDMTQPEQRQALVDTFINAIYLYDDKVLITFNYKEGTETVAFGEAVKAEKSSDMSARGAPDIERQIVRFGVLSLCRKAAAHFLHTVCTFARIRGFSVHGLHSLFSFA

SEQ ID NO: 8347 - protein, 687 aa, synthetic construct
MQSAFFFIPFFGSWRKGLFMAYVRNKKKILKFWSKKKAALYVRVSTRYQVDKDSLPFQRKKLKEYCKFLGIEDFVIFEDDGYSAKNTDRPHFQEMMSRVRDGEFSHLIVWKVDRVSRNLLDFAAMYQELKDHKVTFISMNEQFDTSTAIGEAMLKIILIFAELERNMTSERVTGIMLDRAEQGLWNGARMPVGYRWNPEIKFPEPDPEETKIVQFIFDEYERVRSTTKIARYLNHNQIASKRGGQWTSKLIRDIIRNPFYIGTYRYNLRESGRGPLKPESEWIVRENNHPAIITKEQFDRCNAIMDENGTSRDTSELRARKYVHTFSGRLMCGKCGANMIASKDRARANGWRPSMYRCAQRSRMMDCDNSKTVNESYIGPFVFNYVANLARIQKNFKNIKTLEQLEKELLKGPEFENMKVSKESLRRTFDALAFQEVGKGAYLPDIDISDGDDDYTAAEQLSILKRELDKCKTAIDRLTDLYLYDPDSMTKEEFAKKKRDLVNKIAGYEKQIEANQATGGKDDLADLEFIRKASAFLVAQRIVSKKHVDYIQMALDLDNEILKDFVDQVIDRIEILEGRVQSIRFVNGLVHEFTYSTPADLPVCQKCGGRIGSTCGCRTRTFDFSGKPYRRIKVGDPGDKFQGVSGAVCPECSAQAGRWHHWKCGIERCPICGEQLIACEHGPNGKK

SEQ ID NO: 8348 - protein, 557 aa, synthetic construct
MLQSNKITALYCRLSQEDMQAGESGSIQHQKMILQRYADEHHFLNTKFFVDDGFSGVSFEREGLQAMLQEVEAGRVATVITKDLSRLGRNYLKTGELIEIVFPENGVRYIAINDGVDTAREDNEFTPLRNWFNEFYARDTSKKIRAVKQAQAQKGERVNGEYPYGYIPDPNNRHHLIPDPETAPIVKQVFAMFVSGVRMCEIQKWLAENKVLTIGALRYQRTGQARYQRAMIAPYTWPDKTLYDILARQEYLGHTITAKTHKVSYKSKKTRKNEEEQRYFFPNTHEPLVDEETFELAQKRIATRHRPTKAAEIDIFSGLLFCAGCRHKMYYQQGVNIEPRKFSYSCGAWRNRARTGSECTSHYIRKNVLLDLVLEDMRRVLRYVKEHEQDFICKATEYGDMEARKALAQQQKELFKAQARMTELDTLFRKLYEDNALGRLTDERFVFLTSGYEDEKKSLAARIDELQQQIATVTERKRDISRFIQIVGKYSDIQELTYENVHEFIDRILIHELDRETNTRKIEIHYSFVGQVDTEQEPTQVVNHDRRNMVDVKSIAI

SEQ ID NO: 8349 - protein, 528 aa, synthetic construct
MAYCIYLRKSRADRELELQGFGETLKRHRDTLIELAKKKNLPIGEIYEEVVSGDSIAARPQMQRLLNDVSDGKWEGVLVMEIERLARGDTSDQGIVTKTFTYSNTLIITPMKTFNPTDEFDQEYFEFGLYMSRREYKTIKRRLHAGMEASCKEGNYIHHTPPFGYSIVKNKKSKGYRLEPKPGEAEIVKLIFQWYTKGILKEDGSYELLGTARIADKLNSEYSINPLGGVWTIPTISTMLRNEHYLGYIVFGKKKRKKVVENGIIVDKWTRNESYGLYKGKHPALVSQDTFNLAQERLSRNPRRPSKTITNPLAGVIKCGMCGRSMYRRPYQKRGQSASLICSEKTCHNVSSAFYLVEDALLTAIKEWIDGYEIKEEANKYDTSVLESKTKLLEEQQKQLITYKNQLTKVFEAYENGIYDSDTFLNRQKTVSESISSTEEAIVKLNKEIANEREIISHQEEIIPKARKILEIYKTSDDVQLKNDLMKSILDKVVYTKTANGHFKDQRQDDFKLELFPKLPKNKGNSSE

SEQ ID NO: 8350 - protein, 541 aa, synthetic construct
MQTTEIRETWTALYARLSLDDGNVGESMSIQSQKAILTRKAEELGIYNYRFYVDDGYSGTNFNRPSFQQMIADIEAGKVTCVITKDLSRLGRNYLESGAYIEVFFPKHQVRYIAVNDGVDSANSGEMDITPFKNILNEFYSRDVSKKVKSGKYIRASQGKFMGTHAPFGYQKDPEDKNHLIADEETAPTVRYIFQLALQGMGNNKIGKILYEQKIPKPAYYKPEYFGKFLVKEDDAYSWKQETVIRILRNPLYKGYFWVQKYDKKHFKQETRGYIPMSERTIIPSDHEALVDEHTWDTVQEILDRHTKVKPCTSGYENKFRGILKCADCGSTLMVHTDGRNKEKPVIERTFYQCRIYRVRGTGFCSQHRINADDLEELVLADIQTHAKKVIKNREKFMRKVLGQMDMTAVNNRENIQKKLEKLEKKLLESDRQFIKLYEDFTKQLVSEQQFRMLSTHFEQEKKETTEEIEKLKTTADNLKDSTCKAEQLANEMAECAEIKELTTAIVNRLIEKIEVSEPQTIDGEKVQNIRIFYKFVGEIN

SEQ ID NO: 8351 - protein, 563 aa, synthetic construct
MLKNIQSVTTGNTFTTSPIKETDTGITALYCRLSQDDGNVGDSDSIINQKKILAEYAERNGYTPYQFYIDDGFSGTNFERPQFKQMIEDAKKGTVKRIICKDLSRFGRDYIKVGLYTEFIFPDKDIHFIAVNDDVDSNVQKDNDLAPFKNLFNEWYARDTSKKIKAVKKAKGLAGEHMSCVAPYGYRKNPDNPKEWLIDEESAEVVREIFRLCVDGYGPRRIANILTERKILIPSAYALEKGYAVRNNIPKNPCQWSSTVVVDVLERMDYLGHTVNFKTHRKSYKQKKKIENDKSEWKIFENTHEPIIDKSTFDIVQKIRANRKRPTKMGEMPMFSGILYCADCGKKLSFHRRANDPDTKHNFVCSNYRSDTHNCSMHYIRNVVVEQLVLENLREVVSYVKAYEDEFVQMVMDADIKQKSKELAKKKRVLSDKEKRYTQLDGLFQRIYEDNVSGKLSDERFVKLSQGYEAEQKDLQSEIEALRMELSQEKQQSVNVKSFLSTVKKYTEIPELTSEIVHEFIDRIIVHEADKSSGKRIQEIEIIYNHIGVFDRSKVNVYMGKAV

SEQ ID NO: 8352 - protein, 464 aa, synthetic construct
MNSTYFRPQPELFGLRVVKYIRCSHDGQVLHGDTLEAQDALLDEFIKVNRMVLIDTFIDEALTARKKFTRRKEFVRLLDGVRAHNFDMILFTKLDRWFRNIGDYHKIQEILEANGVQWKAITESYDTTTTNGRLHINIRLSVAQDECDRDSDRIKDVFAYKLKNKTYLSGSLPRGLKLDDEKHVIIDPEWKQFALDMFDRFEQTNSKRGTLLYLKEKYGIYLCYDTISRNLRNSLYKGMYRDDPDFCEPLIEPERFDRIQVLGKRNVRQRYSNRTYIFTGLLICSSCNHYLVGQTTHRTLSDGTEKHYPSYRCNQRYQSHSCDRNRSYREDYVEEYLLQHIRPALSEYVAEYEVTGTNPVRKNPAAEAAKIRTKMQKLYELYMDDLIDRDTYKRDYSAFQEKLKELDSIVVAPSRDLADLKKLLEQDYEDIYRTFSPQEKNAFWKSFVQSITVHEDGEMDIVFL

SEQ ID NO: 8353 - protein, 518 aa, synthetic construct
MQYEEYLIYLRKSRSDASLEAMGVDVLERHEQILLDLAKRMNLSIGGIYREVVSGESISARPEMQRLLSEVEAGRWKGVVVMEVERLARGDTIDQGIVQRAFQYSGTQIVTPAKTYNPNNEFDEEYFEFGLFMSRREYKTIRRRMRAGVTAAVKEGKWPFNKAPYGWQRVKLEHARGWVLAPDPEEAPVVKLIFQLYTGPDRIGITNICRYLDNRGVKPRNGDTWTECSIMGILRNIVNDQRVGIGRRKIVKQVQNGSVSKVRPHSDYDFTAPGLQPRLIDHDVFLEAQTHLGKNSHKLPESYGIKNPLAGIVVCSCCGKKMMRRPASKTPGGAPYDVLKCNTRNCPTIGSALDLVEREVIQALSDWVAGYQLDPTLEVENKVPEKEQLLSSAISNHDVLLKQNGNLYDLLEQGVYTTEIFLERSHELQKRIKESEAHIEVLKKDLEYEKEKITNVENFIPSCKELLSCYWELSAQDRNKALKMLLESVEYTKTKRNKYGDKDNPTFTLNLKPRIPRI

SEQ ID NO: 8354 - protein, 562 aa, synthetic construct
MKNKKIKCDIYTRVSTTMQVDGYSLDAQKEKLKRYAEFQNMEIVNEYSDEGKSGKSVEGRPEFQRMLDNIENGTDEVQFVLVFKLSRFGRNAADVLNSLQRMQDFGVNLICVEDGIDSSKDSGKLMISVLSAVAEIERENILVQTMEGRKQKAREGKWNGGFAPYGYELVNGELQIAEDEAEIIRLIYDKFIHTNMGISAIATWLNQHGYKKKKRQNNTLDAFAASFTKGVLDNPVYCGKLAYGRRKNEKVSGTRNEYRIVKQENYMLHDGIHEGIISETDWELAHQKREKTGVKYEKTHSLEHEHILSGILRCPLCGSGMYGNVNRKKKKDGTLYKDYFYYACKHRRLVDGHKCGYRKQWSEEKINNAVEEVIRKPVKNPKFEEAILNKIGSRIDTEEIEKEIERLEKQHRQLTGAKGRLGQQMDSLDIMDKFYEKKYQDMETRLYRLYDEIEGVENSIEEVKNRLLNIRQQKISEENVYQFLLYFDKLYDKFTDLEKKEFLNSFVEQVDIYEQEQPDGRFLKHIKFRFPVYFGDRETQELCWDKESTVETVCLLSRKASV

SEQ ID NO: 8355 - protein, 478 aa, synthetic construct
MNKVAIYVRVSTTNQAEEGYSIEEQIDKLKAYCMIKDWSVYDVYVDAGFSGSNIKRPAIQKLIKDTKRKVFDTVLVYKLDRLSRSQKDTLYLIEDVFLENKIDFVSLLENFDTSTAFGKAMVGILSVFAQLDREQIKERMQLGKLGRAKSGKPMMWAKVAYGYTYHIGTGKMTVNQSEAIIVKEVFSSYLNGRSITKLRDDLNEKYPKTPAWSYRTIRQMLDNPVYCGYNKYKGQVYPGNHAPIISKEIYNQVQDELKIRQQKAYEHNNNYRPFQSKYMLSGIAQCGYCKAPLKITLGTIRKDGTRFKRYQCVQRTPRKTKGATIYNNNEKCNSGFYEKDDIEAYVLESISKLQTDSNCIDDLFNDEPEKLDRDALNKEIEALSNKISRLNDLYINNLIALDDLKTKTDTLQSKIDILKERLEKDPALERQKNKQKMLKTLDTKDIFKMDYEEQKMLVRALINKVQVTADSIKILWKI

SEQ ID NO: 8356 - protein, 509 aa, synthetic construct
MKKMYGMYLRKSRSDDPNEDINDTLAKHEKILFDLADSLNINRKEIMQFKEVVSGENIQNRPEMKKLLEYVMEGVLEGVLVVDSQRLARGDTVDQGTIIRAFSINNTKIITPMKTIDPQNEYDQEYFEFDLFMGRREYKMITRRMQRGRHIAAQEGYYVGSIAPYSYSRIKLEKGYSLEIYEEENIVFNIMKKKALEDEGSTNISNHLNELGYKPRKGEYWTKSAVEAILLNETNLGLIKWNSRKEVKVFKDGKIVKTRPRNPNYELYPGKHPAIMTQDEYDRIKFLMKKRSHPVKKDKTLQNPLAGLIVCGFCNHKMARRPYKNGRVETILCTTSRCKNVASDIHVVEQRIIDTLKDTLKNYTNYVNNYSVSVNKTYDDNKKLQLEECDKELEKLNKQIIKACEMLELGAYTVELFKERKNTLENKINTVNKRKDILAKETEAMKIEQYKKAIPQLQNAIDLYWKSSTEEKNKILKSIIDKCIYKKEKGGRWDPDAIKQFKLEIYLKV

SEQ ID NO: 8357 - protein, 521 aa, synthetic construct
MGNVMIIPAKRQVGNTSRQQEDKPKLRVAAYCRVSTDSDEQASSYETQVEHYTEYIKKNPEWEFAGIYADDGISGTNTKKREEFNRMIEACKAGEIDMIITKSISRFARNTLDCLKYIRMLKNKNIPVFFEKESINTMDAKGEVLLTIMASLAQQESQSLSQNVKMGLQFRYQNGQVQVNHNHFLEYTKDREGNLVIDPEQAEVVKRIYREYLEGSSMDKIAKGLEKDGILTGAGKKKWWTSTINKILRNEKYIGDALLQKTYTTDFLNKTRVKNNGIVPQYYVENNHEAIIPKDIFLRVQEELVRRRVVKTSANGKKRSYSCNHCFAQIVICGECGEMFRRIHWNNRGCKSIVWRCLSRLEPTGQECHARTVNETVLENVVVLVINTLLGDKSTYQAQLQQNIAKVIREAQKNNTDGIDEQLMELQKELLEKANNKEAYDEIADQIFKLREKRRQNTVDTAARDAQIERINALQDFIKQQRTDLAEFDETLVKRWLKQITVWEYHFTVELKSGLSIDIEG

SEQ ID NO: 8358 - protein, 519 aa, synthetic construct
MKKVTKIDKIQPAKNAENKLRVAAYCRVSTATDAQLESLEAQKSHYENYINSRDDWCFAGVYYDGGITGTKASKRPELMRLLADCKAKKIDFVITKSISRFSRNTMDCLEIVRTLLNLNIPVYFEKENINTGSMESELFLSVLSTMAEGESASISSNNRWSIKKRFENGTYRLSSAPYGYKLESGGLQVVSEQADIVKRIFRELLSGKGMYSIAKELNAEQVPTQKGGRWTSTSVHNILTNEKYTGDCIFQKTYADSNFNRHTNNGELNRYLIQNHHEAIISHEDFNATAALIKQRATERRIESGSDKYQQRYAFSEKLICGECGNTFRRRIHKGKYNSYVAWVCNTHLSDTNRCSMLFVRDDALKLAFVTMLNKLIFSYRLLLKPYLAAMQSNTADEALLRIQYLENQLDQNAEQRSTLHKLMAQGYIDQILYTQECNELLLQARDFRSEIEALNNTVAGDTTKVYETERLINYCKRGEMLTDFNESLFELFVDHILIYSRQKIGFVLRCGLTFEEMI

SEQ ID NO: 8359 - protein, 591 aa, synthetic construct
MEVEIIKAKGAGEDTSTGRKIDRLRVAAYCRVSTDDEDQIKSYNSMVRYYTDLIKSNKQWVFAGVFADKAITGTKTDKREEFQLLIQECLSGNIDLVIAKSIPRFARNTLDTLKYVRMLRERNIAVYFEVEKINTLKDGEFLLTILSSVAQQEVENTSAYVKKGLKMKMKRGELVGFQGCLGYDYDVVTKSLSINEEGAETVRYIFDRYVAGAGSTMIARELNEQGISTIKGNLWTSSSVMGIINNEKYKGDILLGKTFTVDPISKRRLENLGEEDRFYIKNHHEPIISEEKFARAQEIRERRNGGRKKGVAPGKREKFSRQYAFSCMLECGFCGASLSRRRWHSSSKYKKTIWQCVKSTKHGKRFCPDSKGIPEQVIEDAFIESYRMLCTDHKDVLEEFIKRVEKTLSEDSIEDKIEKLNKNAYNIQYKRKKLLESYLEGVVAKDIYEETDMGYEKKLSEVNAQLGMLEQQYDNEGSLQRRLVDFRKALSKNQILEGFDRGIFESIIEKVIVGGYDENGEKDPYKIIFIYKTGFKNEIGNAKERFGKKSKAVEKAKEMCSHIADEVKDVCSYVSDNTCGKHRALVPQVTR

SEQ ID NO: 8360 - protein, 562 aa, synthetic construct
MKNKKIKCDIYTRVSTTMQVDGYSLDAQKEKLKRYAEFQNMEIVNEYSDEGKSGKSVEGRPEFQRMLDNIENGTDEVQFVLAFKLSRFGRNAADVLNSLQRMQDFGVNLICVEDGIDSSKDSGKLMISVLSAVAEIERENILVQTMEGRKQKAREGKWNGGFAPYGYELVNGELQIAEDEAEIIRLIYDKFIHTNMGISAIATWLNQHGYKKKKRQNNTLDAFAASFIKGVLDNPVYCGKLAYGRRKNEKVSGTRNEYRIVKQENYMLHDGIHEGIISETDWELAHQKREKTGVKYEKTHSLEHEHILSRILRCPLCGSGMYGNVNRKKKKDGTLYKDYFYYACKHRRLVDGHKCGYRKQWSEEKINNAVEEVIRKLVKNPKFEDAILNKIGSRIDTEEIEKEIEGLEKQHRQLTGAKARLGQQMDSLDIMDKFYEKKYQDMETRLYRLYDEIEGVENSIEEVKNRLLNIRQQKISEENVYQFLLYFDKLYDKFTDLEKKEFLNSFVEQVDIYEQEQPDGRFLKHIKFRFPVYFGDRETQELCWDNESTVETVCLLSKKCPV

SEQ ID NO: 8361 - protein, 536 aa, synthetic construct
MLRQTNQQPITALYPRLSHEDELQGESNSISNQKRILETYAKQNGFSNLRWYTDDGYSGANFQRPGFQAMLADIEAGKVGTVIVKDMSRLGRNYLQVGMYTEMIFPQKGVRFIAINDGVDSAQGDNDFAPLRNIFNEWLVRDTSKKIKAVKRSKGMSGKPITSKPVYGYLMDEDENFIIDEEAAPVVKQIYNFCLAGNGPTKIARMLTEQQIPTPGTLEYRRTGSTRRYHPGYECKWATNTVVHILENREYTGCLVNFKTEKLSYKVKHSVENSPEKQVIFENHHEPIIDTQTWERVQELRKQRKRPNRYDEVGLFSGILFCADCGSVMYQQRYQTDKRKQDCYICGNYKKRTHDCTAHFIRTDLLTAGVLSNLRKVTSYAAKHEARFMKLLIEQNEDGGKRRNAAKKKELEAAEKRIAELSAIFKRLYEDSVTGRISDERFTELSADYEAEQRELKERAAAIQAELSKAQEATVNAEKFMNVVRRHTSFEELTPTLLREFVEKIVVHECSYDENKTRRQDIEIYYSFVGKVDLPE

SEQ ID NO: 8362 - protein, 464 aa, synthetic construct
MARSVTVIPARSQKVRTGHKAVQEKKIRVAAYCRVSTDQEDQLHSFEAQVEYYTKYINEHENYEMAGIYADEGISGTNTKKREQFKKMIADCEGGKIDLVITKSISRFARNTQDCLAYSRKLKNLGIGIIFEKENINTLDSTGELLFTILSSLAQDESRNISENCKWGIRTKFKNGEMHLNTFKFLGYDKDENGKLVINKEQAKTVRRIYRDFLIGINPAQIAKELTEEKVPGCLGQTKWYPSTVTGILKQEKHMGDALLQKTYTADFLTKRQVINNGEIAQVYVKDSHKGIIDKQTWNAVQEEFDRREKFMESHGTDRYSYGADCMPFCEKVFCGECKSLFTRHSWSSRGIVQWQCKNHRKDGKVACTNAYVDNADLENGFVKAFNRLVTDRDKHMERWQQMKSDGTPLEKIRAGQMMEAVGNEPLTRFVPEIAQLVLCEVTVLGAKKYEFFFLEGSRVKVSV

SEQ ID NO: 8363 - protein, 527 aa, synthetic construct
MSKKKSKEKVVEFSKLTNKVAAVWTRVSTERQADTNGSLESQRRICTEYAESHAIRIKKYYGGTNESAKVEGKLYREMIAEVARDKEINIILVYSFDRFSRAGYEAMMTKAYLKAKGIYVVSATQATDPDSAAGGFMEDVIFLFNQFENNLRKDKCITGMVECLRNGNWYSKPPLGYDKLKVGREHVLTVNEKGKILRNAFVWKATEGIGDIEIVQRLKGLGLVIDRKHLNKILHNPFYCGFIQHSLLGDEVIKGNQEILIDEATFNKVNSISNAGYEHKEITEPFPLKRHIICSDCGGYLTGYTVKARGRDYYKCNKKGCKSNHSTEKLHQKYINLLNGYNIPDEFIPILTDVLRKVFEEYNQSKGETKKVLLKRKTECENRINAVKVRFGLGEINSEIYTATMSELNSRLAEIRRDLEDAGKNLSNMMNYINQTIEISCKLGSLWRDSDFSNRQKIQNLVYPGGIYFDKKNDDYRTENENEVFRIFRRFTAVCKGGKEKATSNFHCLSPSVGMRRLERPTPTSRT

SEQ ID NO: 8364 - protein, 540 aa, synthetic construct
MKQPYNTTIYNTALYLRLSRDDELQGESGSIQTQRMMLRQYAAEHGLTVVDEYIDDGWSGTNFERPSFQRMIDDIEDGKINCVVTKDLSRLGRNYILTGQYTEIYFPSKGVRYIAINDNVDTINGESELAPFLNILNEMHARQTSKKVKAAMHTRFANGAHYGAYAPLGYVKDPDKKGHLLIDPETRWIVEKIFDLAVHGRGAASITRILVEEKVPTPGWLNYERYGTFANIYAGAPAEKAYAWTIAQVKSILKEETYIGHSVHNKQSNISFKNKKKVRKPQEEWYRVENTHEAIISEEVFQKVQELIASRRRKRRNGTTQIFAGLIKCADCGWSLAYGENKQNKNPYGYYHCSKNGQGLRQCSMHYIRYDVLYAYVLARLQYWSMLAQKDEDKLLKRLLNVSDRERNSAKKKQAAELKKAEKRKAEVDGLFAKMYEDWSAGRITEYNFNMLSEKYQNEQKELETKIRQLHEMMEAAVQTAADAEKWIALMKQYVNPVELTAELLNTLIEKITVHEAVKGEDGSREQEVEIYYRFIGKID

SEQ ID NO: 8365 - protein, 533 aa, synthetic construct
MAQPVAYSYIRFSTKRQAAGDSLRRQTEKARAYARKHALRLDERLSYQDLGVSAYDQSNSERGQLAAFLQAIDEGVVKSGSYLLVEQLDRLSRAKPLVALRQLEGIISAGVIVVTLDDERVYDSEASEDMGTLFLSLAMMYRAHNESQTKSIRIHAAWQAKRDRREPVITAECPRWLRPKADRSGYELIPEKAESVRRVFELTIAGYGNVALARRANREGWPHPGDADKWNQTIITKLIANRAVIREYQPHVRKEGKRVPQGEPWKDYYPRVVSDEVFALASAAKAQRARVPGRRDRHYKNIFQGILVCGTCGGSFVRKNKHSNKQPNYSLYMCARRVSGVTKCSSINGQQLEINLLTNIYLEGYSHMRTDEEAEALRARLTLLTTEQAATQQRIQRIADAIEATDSPMMYERLTDAEGKLTAIKEDLRKTEHAMGELRLAERNVGTMMQTTFTEDYNRIQDESEVEFRAQLREKVLSVVNRIVIYPDSFAAVLFYRHTGEPALQPLSTDFDISDEPPLLSSARAVFSRLESN

SEQ ID NO: 8366 - protein, 568 aa, synthetic construct
MNDTATQPTAPTLTGLTAVSYLRVSTKEQAERDGDPEGYSLPAQREANRRKAESLGAQIVEEFVDRGESARSADRPDLQRMLKYIATNPVNLVIVHKVDRLARSRADDVEINLAIQQANARLVSVSENIDETPSGMLLHGIMSSIAEFYSRNLANEVVKGMSQKAKTGGTPGRAPIGYQNRPLINEEGREVRTVVTDDERAPLITWAFRAYASGNYTITQLVDELTARGLTSPPTPKRAARPVTVSQMYNILTNPYYRGIVTFQAKTYPGRHTPLIDEKTWWKCQQVSDSRSTGEKARIHNHYLKSSLYCGMCESRLIIHHAKNSAGVTYPYFVCIGRHQKRTDCTMSAINIHDVERQVENLYKLVALGPEVAARTKSQLRTTMEAGAAQAKRTQKDLLTQQTRLMNRSKRLLDGHLDGTIPSQLYREEQERINNELTAISDRLDALQTEFEILEQNLDDAIALSENCYEAYRRAPDSLRRTYNQAFFTRIFVTRNESIEGQLAEPFATIVTVTETSNGASPRGETPYPNDSYKVICSKESDLVDLRGIEPLTSSMRTRRATNCATGP

SEQ ID NO: 8367 - protein, 536 aa, synthetic construct
MLRQTNQQPITALYPRLSHEDELQGESNSISNQKRILETYAKQNGFSNLRWYTDDGYSGANFQRPGFQAMLADIEAGKVGTVIVKDMSRLGRNYLQVGMYTEMVFPQKGVRFIAINDGVDSAQGDNDFAPLRNIFNEWLVRDTSKKIKAVKRSKGMSGKPITSKPVYGYLMDEDENFIIDEEAAPVVKQIYNLCLAGNGPTKIARMLTEQQIPTPGTLEYRRTGSTRRYHPGYECKWATNTVVHILENREYTGCLVNFKTEKLSYKVKHSVENPEEKQAIFENHHEPIIDTQTWERVQELRKQRKRPNRYDEVGLFSGILFCADCGSVMYQQRYQTDKRKQDCYICGNYKKRTHDCTAHFIRTDLLTAGVLSNLRKVTSYAAKHEARFMKLLIEQNEDGGKRRNAAKKKELEATEKRIAELSAIFKRLYEDSVTGRISDERFTELSADYEAEQRELKERAAAIQAELSKAQEATVNAEKFMNVVRRHTSFEELTPTLLREFVEKIVVHECSYDENKTRRQDIEIYYSFVGKVDLPE

SEQ ID NO: 8368 - protein, 516 aa, synthetic construct
MAQAQKQVHIIEPLERFVNRINLIGCYARVSSDSEDQLNSYNNQVDFYESYVNSLENSKLVKIYTDEGITGTRMDKRDGFLQMIEDCRKGLINTIITKSISRFARNITETLSVVRELKSIGVSAYFMTEKIDTAKMGSEMMLAVYAACAEIESKAISNAQKWAFRTRAKEGRYNQPKLPYGYQRIDGEVKVIEDEAKIVEDIFNKYVNKDFSVTKLVDYLNKHYFKKKKWSQSTVSSMLKNERYCGDMLLQKKYSPDVFPYKLVTNKGELAQYYVYDVFPKIIDRELFEKANEKLVNNKLKFNKNQTDGNREYLLTSKIKCEHCGGTFKRRVLRNKEYWSCSNHVTSAKKCEVKMIGTDEIEDAFLKIFYKLKGNIHVLEAYKKHIVNFTTNDDDRCELDLANRELKKVTSSINTLVRYYQKDLISLEDYKKKHNELLVDKSVFEMQKCKLNEKIYQRFEVIQTQIIIECLESAKEITALDEEIFNTLVDSIEVGTLDIQFTLKNDLKLKVERKQF

SEQ ID NO: 8369 - protein, 555 aa, synthetic construct
MNYIIRDDKEHETTAPKVKVIAPRKKFQPSYNDRQNREIRVGAYCRVSTDSDEQELSYETQCEYYENYIGSHENWELIAIYSDEGITGTSTNKRSDFMRMIDDARAGKLDMIITKSITRFARNTVDSLMYLRILKEYNVDVYFEVENVHSLEANEMLLTILSSVAQQSSEDKSESIKWGYQRQFEKGKVYAANMYGYKSNRGTLDIIEEEAEVVREIFSKYLSGMSESKIARYLTENKVPKKNGSTKWDSGTIGRMLQNEKYSGDALLKKTFNIDFLHKKRYKNEGQKKMYFVENSHPAIVTKEVFKAAQVERTKRNMKSNDEKEVVESHHQNRYSSKNPLSNKIICSECGALYRRAVWTKRNKEKEPVWRCSNRLKNGNAICSNSVTLKEKPLLDALTSLIDGKTKSKEKTRLELAKELSEYLNPKDIVEKKQKLNCELENVNSQINELLDKGMLLVARGVQDESQIEEHLAQCYQTKQMLKKELKKLDDKYNALKQGRQEKLLKTLEKNSNEHTVMTQEDLAVFIDRIIVKKDKIEIETIDDQKCELLLNQIS

SEQ ID NO: 8370 - protein, 548 aa, synthetic construct
MLDQQKITILYCRLSNEDAQEGESNSIANQREYLTRYARDHGYTNLKILVDDGYTGTNFNRPGVQEGFELVKQGLVGCWLVKDLSRFGRDYLTVGQYTDIIFPSYDVRFIAINDGVDSNRGDSEGFAAIRNLFNEWYPRDTSKKVRVSLRQRGTSGKHMGKPPYGYRCDPEDKDHWILDEEAAPVVKLIFDLCIDGKGPEQIARILEEKQIMTAKALYAKRKKKPMPERPYHWGNQSIAGILERQEYTGCTCNFKTYSKSYKLKKRIPNEPENMFYLPDTQEAIVSQAQFDRVQELRKNKRRPAKAERQGLFSGLLFCADCGGKLHFATSKSFEGKQDHYVCNNYKSNRGTCTAHYIREDVLREIVLERIRAVNEYIRSDVDGFQEEWLQCRRTDQERSIRDDKKKLEQAKKRLADLDVIIARLYEDYVLGNLNQDRYRKMSADYEAEQERLKLEIEVIEEWVEQREEMNDGLDAFIALTQKYVDVEELTQTIVNEYIKKIIVYAPDKSSGKRKQKVKIFFNFVDDVDIPVISEPIITQTTYEHRKTA

SEQ ID NO: 8371 - protein, 463 aa, synthetic construct
MRRKTTAPVEKILLRVAIYIRVSTDKQVKDGDSMRDQLATGQKYIDSHENMILVDTYIDDGISGQKLKRDDFQRLIDDVRAGRIDLIIFTRLDRWFRNLRHYLNTQDILDKHGVSWTAIEQPYFDTSTPHGRAFVNNSMIWAELEAQNDSDRILGVFDDKVDNGEVLSGSTPLGYTIVNKHLVPDDDAPTAVAIFQYYRKTGNLSMTLRYMESEFGLVRSAASLKNMLTNTKYIGEFRDNKNYCPAIIDRDLFFDVQRLLKINIKSGKKHDYIFSGLVVCDDCDHIMSGCQQRARGRVRADGTRIIYKYSVYRCRQGVNLHRCPNRKLVFETTLEKMLLERIRPELENYIAEYEVANLPALRTDAKRRSVEGKMQKLKDLYLNDLITMDEFKLDREKLLMQLEKINAEDSRPVKDLSYLKNFLKMDFESVYDSLSIPERRELWRSIVKEIRVDHDKNIHIIFL

SEQ ID NO: 8372 - protein, 616 aa, synthetic construct
MTDYSKITALYSRLSVGDEDRDGGESNSIQNQKKFLESYARQLKLTNIRHYIDDDESGRFFDRSAYSRMMDDVENGKIGVCIMKDLTRWGRDYLQVGNAMEIFRRNNVRFIAVNNGIDSEKPDTLEFAPFINIMSEWYAKDISKKVKTGIKTKGMSGKPIVTEAPYGYVKDPDDKDFWIIDEEAAEVVRLIFRLFIGGKNRNQIAIYLTQEQIPTPTFYMKDRGWGTCKNKTLNEDNRCKWNKVTLTNILTRQEYCGDVVNFKTTKHFRDKHNHYVDRSQWHITENVHEPIISRSDFETVQRILENAPVKRPNGDGEIHPLSGLLFCKDCGAKMHIRIDYRNGGKRHVAYCSEYHKGKARNPKCNSPHIMDADLLMQTIAEVLKKIEDYSISNRAEFEALVKKNLAMQQTDQTKKQQKRIPQITTRLEQIDKVLNKLYEDNALGTIPQDRYEQMSQKYSEEYYALKAELATLQEQLSAYENAGGRVQKFLKLTERHAAFTDLTPAILNEFISRIEVHERDQKRARYAIQHISIYFNYIGKFENEVTQLAEPTEQEIRQMREEIEEAKKEKSRAYHRQYSREYRARNLEKQREYDRMKAREYRARRKAQAAAAQPTQ

SEQ ID NO: 8373 - protein, 418 aa, synthetic construct
MPKELKVAAYVRVSVESVQMHHSLEAQKEYYKQMIDNEPNWKFAGIYADKGISGTKIKQRTGFCEMIRDCEAGKINKILVKSVSRFSRNTVDLLNIVRKLKSQNISVWFEEQKIDSMTEEGELMLTLIVSIAQAESESISENEKWAIRKRFEHGIGNTKRRTFGYKWADDQMVIVPEEAEVVKQIFSDFLGGSSYMKIVDRLTEKGITTVNGKLFSTSAISRILRNITYTGNTLLQKTFIQDPISKKKKINKGELPQYFVENTHEAIVEMDTFQKVQEIFAYNKEAGKFPYNHTGKKYPFTKKVVCGRCGRHYTRQLWNTSKNGEKCPTWVCTGKKAEKYRRCDSKNIPEAKLMEASAKVLGIPEFDEELFFDKVESITVQGVHELLFCLHDGTEVIQHWEHTAQKASWTESSANFVD

SEQ ID NO: 8374 - protein, 465 aa, synthetic construct
MKGNAGDTIVKKIDLSPELVRVALYIRVSGEEQKIKGLSLEAQQERLEAYARERGWVIVGIYIDAAKTARKNIHKRTDFQRMMDSVKRDEVDILLFCRLDRWFRSVADYYKIMEVLEAHNCDWKTTDEEYDTTTANGRLYINVKLSIAQNEADIDGERIDVVFDSKIAHGTVVSGSAPFGFRVNAGKRLEVVPEDAAIVQDAFNYFETSISQRATVRYIRETYGVNWCDATFRRMLKEKLYTGVYDRGGRFNDHFCPAIISKQQFDRVQALLERNARSVPSGKVYIFTSILTCAECGHKLVGYKSSDYYYYRCNQHFQRGRCSHNHSAREDVVEKWLFEHLAEELERYQLEWEVAAAKKKASVARTDKAALKRKLTKLKELYVNDLIDIEDYKRDYQIYTAALKQIPEPSIEPPPDFAAVRRLLDNDFKTIYENLTREEKRTLWRSVIKEIRIDNDQNITGVVFG

SEQ ID NO: 8375 - protein, 520 aa, synthetic construct
MKRVYCLYRVSTKGQVDKDDIPMQKTSCREFAERNGWTILKEFQEKGVSGFKVSASDRDAIQDLKSAAEKKEFDVLLVFMFDRIGRIDDETPFVVEWFIKHGIEVWSVNEGEQRMDNHVDKLMNYIRFWQANGESQKTSARVKTRLNQMTLDGKFTGGVAPFGYKLIKSGEINKKGKELMDIVIDDDEAPIVKKIFEMTVKEGYGSYRMADFLNSHGIRTHNNSKFQCNTVNRILKNRLYCGYLVSGGVESPYIERLHIIDENIFDQAQFILKQRSSKNEEKQQIARTTKGSTLLSGNIYCAHCGQKMVLTSYIDRYDRADGSQYRVRRQRYICTNKAMKRGACDGQSAYVAHRIDSAVLATLRDYLAKIKSTPKDIALEKRYKSEISEYRRKQTKLEKEIEKLKRQVVELSAEIGRSLLGESRFTPDILSTSIDNTNDLLHKKEIELSDIKFKLANQQNAMGRLDFYYSQFRTWADEFDNSTMEQKKMIACQLIREVKVSRGYELEIIFDLNYEQFLSL

SEQ ID NO: 8376 - protein, 516 aa, synthetic construct
MSYCIYLRKSRKDLEAEQHGEGETLARHERALLSLAKKNNLIISNIYREVVSGETIAARPVMQQLLHEVEQNLWDGVLVMEVERLARGDTIDQGVVQRAFQYSNTLIITPSKTYDPANEFDEEYFEFGLFMSRREYKTIKRRMQNGRYAAISEGKWPYNSAPYGFRRTKLEKEKGWTLAFDENEAPVVRLIFSMFTGPERVGIRSITRTLNSYGTKPRNSKLWSESTVRGILSNVVYDQCVKIGERKVVRTVENGVLTTTRPRTSDYTIVSGRHPRLIDHDVFAEAQSYLGCGSPKPAGSNIIKNPLAGIIVCSECKKKMIRRPPSGTASRVPYDLMLCSTYDCPTIGSPLDLVEREVYNALSDWVEGYRLSGQMPSKSLIPEKEVLLESAQQTLDQLLRQKGTMYDLLEQGVYSTEVFLERSDSLQNRISEAESNVAQLKLELDKERQREANIEQFLPACEDLLSCYWDLSIPERNRLLKLLIESIEYKKLTKNKRGHLNEPNFELTIKPRIPRK

SEQ ID NO: 8377 - protein, 516 aa, synthetic construct
MSYCIYLRKSRKDLEAEQHGEGETLARHERALLSLAKKNNLIISNIYREVVSGETIAARPVMQQLLHEVEQNLWHGVLVMEVERLARGDTIDQGVVQRAFQYSNTLIITPSKTYDPANEFDEEYFEFGLFMSRREYKTIKRRMQNGRYAAISEGKWPYNSAPYGFRRTKLEKEKGWTLAFDENEAPVVRLIFSMFTGPERVGIRSITRTLNSYGTKPRNSKLWSESTVRGILSNVVYDQCVKIGERKVVRTIENGVLTTARPRTNDYTIVSGRHPRLIDHDVFAEAQSYLGCGSPKPAGSNIIKNPLAGIIICSECKKKMIRRPPSGTASRVPYDLMLCSTYDCPTIGSPLDLVEREVYNALSDWVEGYRLSGQMPSKSLIPEKEVLLESAQQTLDQLLRQKGTMYDLLEQGVYSTEVFLERSDSLQNRISEAESNVAQLKLELDKERQREANIEQFLPACEDLLSCYWDLSIPERNRLLKLLIESIEYKKLTKNKRGHLNEPNFELTIKPRIPRK

SEQ ID NO: 8378 - protein, 527 aa, synthetic construct
MNIAAYCRVSTDKSDQLNSLETQKEFFLEYTKRTGDNLIKLYADEGISGTKIKNRKEFQRMLADAEKGLFDMVVVKDISRFARNTVDLLQSVRRLKSLGIETQFLTANMTSMGNSEFVLTIFGALAQEESANTSKRIKFGKKMNAEKGRVPNIVFGYDKTIGDYFNLSINENEAMAIRQIFQWYTEEGNGGSKIANMLNERGIKTKRGNNWSQNSVCRILTNEIYTGKIINGKEEIADFLTGQRKEKDESEWLVTLRPELRIIEDEVFDKAQDILKGRHDSFKITHERQSNKYLFSTLIKCKECGWSFRRTVRQYKNTYVRWVCSGHNGKGADSCPNAVTVDEEELIQALQEYFQEILGKKKKVINYVIKEFQRVYKAKDENIEYEKQLNTELNRLRKSREKYMDMYTDDLISREELNEKIGGMRKEIERLENELKMVSYHLTKGEQLEAILNSTFKQLEDITDVHEMTNVQLKRLINKIEVDKDGNVDIYLRLIGELGLDETVLIEGNDRAEETEDKTALNCNIHT

SEQ ID NO: 8379 - protein, 535 aa, synthetic construct
MLRQTTQKITALYPRLSHEDELQGESNSISNQKRILETYAKQNGFSNLRWYTDDGYSGANFQRPGFQSMLADIEAGKVATVIVKDMSRLGRNYLQVGMYTEMIFPQKGVRFIAINDGVDSAQGDNDFAPLRNIFNEWLVRDTSKKIKAVKRSKGMSGKPVTSKPVYGYLMDEDENFIIDEEAAPVVKQIYRLCLAGNGPTKIARMLTEQEIPTPGTLEYRRTGSTRRYHPGYECKWATNTVVHILENREYMGCLVNFKTEKPSYKTKHSIENPIEKQAVFENHHEPIIDTQTWERVQELRKQRKRPNRYDEVGLFSGMLFCADCGSVMYQQRYQTDKRKQDCYICGNYKKRTHDCTAHFIRTDLLTAGVLSNLRKVTSYAAKHEARFMKLLIEQNEDGGKRRNAAKKKELEAAEKRIGELSAIFKRLYEDSVSGRISDERFTELSADYEAEQQELKERVARIQAELSKAQEATVNAEKFMNIVRKHMNFEELTHTLLREFVEKIVVHECSYDENGTRRQDIEIYYSFVGKVDLPE

SEQ ID NO: 8380 - protein, 467 aa, synthetic construct
MAREIVHIPARRGLSNRATVTDRKIRVAAYCRVSTDHEEQINSFENQVTYYTEYINRNPNYELADIYADEGISGTNTRRRDDFNRMIADCEAGKIDLIITKSISRFARNTQDCLNYSRKLKDLGIGIQFEKEGINTMDSSGELLFTILSSLAQDESRSISENCQWGIRSLFKQGVLHLNTNRFLGYDKDEKGNLVINEEQAAIVRRIYTEFMNGINPDVISRRLRDEGIPGCMGEAKWQASTIFGILRNEKYMGDAILQKTFTSDYLTKKTVKNEGQLEQYHVKGDHEAIIDPEYWDAVQLELERRQNYMTAHSLRTMGRYTDEQPFSNRVLCGECGKVFWRRTWYRLNNTYKVWQCGNRYREKGVVTCHSENLKESDLQVAFVMAWNGILENRAEFTETWKAQAENGNALERFRAKQMLELTKMKPLKEIDLLLVGKVLDYVIVRHGGELEFHFLDGTQLAVEVTE

SEQ ID NO: 8381 - protein, 578 aa, synthetic construct
MGYVTKKAAQRFEEKKAAIYVRVSTQYQVDRASLPVQREELINYAKYALGISDYVIFEDAGYSAKNTDRPDYQQMMARMRTGEFSHLLVWKIDRISRNLLDFSVMYAELKELGVVFVSKNEQFDTSSAMGEAMLKIILIFAELERKTTSERVSAVFVSRANDGIWNGGKVPYGYSYDKEGKTFSIAEDEAKVVRLIYSLYESEKSIVRVARIMNERGLKSRAGSDWSPTTVHTILSSPFYSGTYRYNYRNESNRKRFREKGKDEWVLVENHHPAIVSPERQAAVGVILESKRYNKNATYQRKNVHVFAGLLTCGCCGSTMAATTDKVRADGWRPSMYICSRRRKSEDCTNKYVSDVSLGPFVLNFFANLIKASNSFGRTTSIETLEKKLLRGEALSRVDHIERPGLEELYNHLRSGFDEKRFESPTIAATESSADLSERDLLLSEKRRLERALNRLKTIYLYGDDEMASKDFNIERERITKALSEVDSRINELDIANAFDLSLSDEAFMQKASQFILTQQLLDKRYVNYERFIRKIDPKIVKDFLNETVSNFCIKDGLTTSILLKNGIELRFSYKTAE

SEQ ID NO: 8382 - protein, 576 aa, synthetic construct
MKKNFKMPGSGSETPIRVAIYVRVSTVYQIDKDSLPMMKQDLTSYCKYILNTDDFVIFEDAGYSGKNTDRPAYQKMMSQIRQGLFTHLLVWKIDRISRNLLDFANMYAELKDLGVTFVSKNEQFDTSTAIGEAMLKIILVFAELERNMTSERVTATMINRASNGVWNGGRIPYGYSYDKPTQVFSIDPEENKIYNFMVETYEDTQSIVHTSRRLNEAGYRSRNGNMWSPVAVWTILRNPWYKGVYRYNYYKIPGRKAIKDESEWVIVENHHPASIDSDRFDRIQATLDKNARYRNTPGRKTAQKNVHVFSGLVWCAECGSAFTASPGKLHVSGYRPSKYGCPNVRKTKTCHAKYTSDVVLGEFLLNYILNILNAQKQFAYIHSTDDLQKRLLHGSTFSNVDHVDPDGLASLLNMLEKCSGSDPVLLKRPRSKPKMDPELKRMMADQKKQQRALDRLNDLYLYSDDSISEREYLVRKQQITDRLQEINEAIGMMSQEPWMRTMNDEEFIRQASSFILTQKLADKQYIYYENLAESLDPEILKNFFVSILDSIILRDGRPETVVFRNGLSHTFTYKDS

SEQ ID NO: 8383 - protein, 492 aa, synthetic construct
MISFCIFGYIYIQSEIDCAHDCVSALFVNDVFDSRTVGINDSLTTVRKLKEKGVEVYFQKENIYTLDSKGELLITIMSSLAQEESRSISENVTWGQRKRFADGKVSIAYSSFLGYQKGEDGQMEIVPEEAEIVRLIYRMFMQGKTPYAIAKYLMEKKIPTPTGKQRWQHRTIENILTNEKYKGDARLQKCYTVDFLSKKRKVNEGEVPQYYVEGSHDAIIAPAEWHMVQLEMERRRNMGRSHNCCGPFSAKLKCGDCGEFFGSKVWHSNSKYKRTIWQCNAKFKGESKCTTPHLYEQRIQELFLEALGRLLENRETIIDDCRAVMDVLGDCSSIEKELETVSGEMEVVTGLIQKLVVENATRKLDQNDYRRKYEGYVNKYAALESRMDSLKKDRESREIKFDIFSGFLFELSELEELPLEFDVKLFHSLVDYATVYHDGRILLLITPRIIFLHLIIPAYWNVYIVYRLTIYYIFMADYIHIVMNLQFWDMEM

SEQ ID NO: 8384 - protein, 640 aa, synthetic construct
MKRKKDKSNGITALYERLSRDDDNAGESNSIVHQKQMLEDYAMKHGFTNLVHFTDDGWSGATFDRPSWNRLVEGVKNGEITACICKDMSRIGRDHLQVGFFTDILFREKEVRFIAINNGIDSDRQETSEFAPFLNIMNEWFVRDTSKKIKAVLKSRGSSGNAHTSNIPPYGYLKDPENPDHWIIDEEAAEVVRRIYRMTIEGKGPYQIARELSEEKIERPSYYLGKKGLGNHASNYDKENPYMWRGNQVTTLIARPEYIGKTVNFRTFKNSYKDKKTKRADKEDWVVFDDTQEPIVDEETWLLAQKLRQNVRKADPMGEPNVLTGKIYCADCGAPMYNHRQRKGRERIYYTTKGEKRISHSNPADCYECSTYNLAYQKYDRHCTCHHISTKALKSIILKTIQETCHYVSLNEQEFVYSLQEESAMKDIAVSETVKNRIERNQKRVHELDMLIRKIYEDNVIGRLPDRLFQSMLTDYENEQNELNKIIETDTADMQRIIGGQNNVERFLKLVKKYEKITELTPAMINEFIDKILVHEPQGKGADRTTEVEIYLNYVGQFQVPVEQYEPTEEERIAAEKEADRLRRKRESNRKYMKKIREKSKKLAEYERIAEEKSSDSKLCAEQNATSKSNRQKVKGEKIA

SEQ ID NO: 8385 - protein, 522 aa, synthetic construct
MELLNVCIYLRKSRADREAEARGEGETLARHERILLDLAKKRGYNVGAIYKEIVSGETISARPVMQQLLREVESGMWDGVLVVEVERLARGDTIDQGVVARSFQYSNTLIITPLKTYDPNNEYDEEYFEFGLFMSRREYKTIRRRLTAGRESSAKEGKYCGSKPPYGYSRVKLVGEKGWTLQPVPDQAEIVKLIFNLYVHGVSGERIGMAKICRKLNDSGIKTMDGGLWTISRVQAILRNPVYEGMIRWNSRKAVKHIKDGQITISRPFAQNYILVKGRHPAIVSRELFQQAQDIVNKNPARPLNSLHVLRNPLAGIVRCGKCDHVMTRKSPNGRQGDLIRCPYSSCSNISSKLPLVEKALLDGIQELVDGYRLNNSVSDQEYSLSISEREKMIQGKLKEIDILKKRKQRQYDLLEQGIYSTEEFLERSRATAAELSACDAVILSLKQEIEHEQELQFQRSSFIPKCEDLLANYWTWDTSTKNRFLRELIEKAVYTKNAKNTWKNGDDISFTLDIYPKIQQK

SEQ ID NO: 8386 - protein, 558 aa, synthetic construct
MLQQSNSTITSIYPIGNQTEELTALYCRLSQDDKQEGDSNSIINQKKILKRYAIEHGYQPYVFFVDDGFSGTNFNRPDFQRMIAEVEAGRIKRVIVKDMSRLGRDYLQVGMYTEIMFPNMDVHFIAVNDGVDSHVGDNEFTPFRNIINEWYAKDTSKKIRAVKRSKGMAGEHIGSHAPYGYMKNPDNKKEWLIDEEAAEVVREIFRLCVNGYGPTRIANILTERKILCPTYYALEHGEKPRTVLPPDKYLWSATVVSHILERMDYLGHTVNFKTHVKSYKNRKKIDNSPEQWKIFENTHEAIIDKETFEIVQKIRSGKRRPTKMGDMPMFSGLLYCADCGSKMTFHRQMAQSAEKHNFVCSNYRHNSKSCTMHYIRNVVVEQIVLENLKEVIRYVSDYEDEFVQMVMDTDMRQRNKELLHKKKRLTEIHSRIQELDKIFQRIYEDNISGKLSDERFMKLSRGYEEEQHTLQEEQTSLEKELQKEEKQSVDVKQFLSVVRKYTNLTELTPEIVHEFIDKIIVHAPDKSSGKRLQEIEIIYNHIGVFDHSKVTLWKGKAV

SEQ ID NO: 8387 - protein, 521 aa, synthetic construct
MKRVICLYRVSTMKQVEDNDLPMQREACRAFAAQHPDWKIIDEKYEKGVSGFKIRGKDRDAVAELLVDAEGGTFDVLLVYMMDRLGRIADDTPVIAKTIASCGVEIWSVMEGQQHFDTQSDHLMNYIRSWAAECESVKTSMRTKTRLAQIVLEGRFRGGKAPYGYRLEKQGRKNARGHEVYEILVNEEEAPVVAHIFALSALNGYGSRKIATALTEEGYRNRNGKPFHPSTIQNMLKNVLYTGVLRSGESRSEVFPHLQIIPEMVYNHVQAQIQQHRSDYEGSRLSPVARNGQALLSGNVFCGTCGGRLISTTVRSTHHPTKSENPRVPIYRCYNRIQHKELCDGQSTYRADRVDAVVETAVCQILDRIRVIDQKDYLKKRRQQELNAARVKLRQLESAYNKAVEERKQLSSHMVDVLEGKSPFTAEDLKERMDEAKAMAEEFAQQMEAQKVLLRETQLRQEAVEEHFQQLKGYAQVYQDATMEEKRRIVSALIERVTVSRGYEIHIQFRVGLDVLDNLDD

SEQ ID NO: 8388 - protein, 556 aa, synthetic construct
MDIHSVRQQLKTRSIYDLPLRVTFYARVSSESDEQLNSLGNQIQYYENLIRKNTKWTYVEGYIDEGLSAATTKNRENFHRMVADGEKGLFDLIITKEITRFARNTLDSIHYTRRLLTAGVGVFFQNDNINTLDEDSELRLTIMSGIAQDELRKLSSRVKFGHQQAIKNSVVLGNSRIFGYRKDSGRLVIDEEEAPMVRELFELYATGQYSMKQIETLFWEKGYRNHNGKKIAHTTMSGMISNPKYKGYYVGNKVKVIDLFTKKQKFLPPEDWVMFKDETGEIVPAIVDEILWDQANAVLKKRSEDVKGRQGICNHQNLLTGKLYCTHCGAAYYRRESLDRSGNKNSKWVCSGKIKNGSDSCPSFPIYEEELKPLLLQVFRETEVDSKALIEEYIAMYKSLDRDGDLTKRIGELEHTIDTVEKKKQKLLTFNALGELSDRDFLSMNKQCAQELEQARQELMELEQQRDSASDFKNHIDTIRRVLQEAERDAAQGLINKEFVEQYIDKIFATPDEDGSMRLQIKIFTGETTDKYLSKLRGRTGHTFKKMIEAYENGMK

SEQ ID NO: 8389 - protein, 515 aa, synthetic construct
MAEVQVIPPKAARPDTLRVAAYCRVSSDSADQLHSYAAQIRAYTQAINAHDGWDLVDIYADEGLTGTRMDKREDFNRLMADCRKGKIDRIVVKSISRFARNTRDCLATLRELSALGVTVKFEKENIDTGTLTSELMVSVSASLAQEESISISKNQRMSYQRRMERGEFITCSAPFGYQIVDGKNLTIVEDQAEIVKWIFAAYLRGYSSEWIAQELSENGPAPLHGGQKWHQQTIRKILTNEKYIGDALCQKTYTTNTFPYRRKDNHGEADQYYVEHTHPAIISYEDFQKVQELLKRRAERQSIPHDQTPLARKIICGQCGTLYMRRISKAGYVSWVCRKHDRKAADCPNGRISEDSIHAAFLRMYRKLRTHDGIVLAPVLRQMETLSDALHRGNPAMLAVNTAIATASEQSYHLTKLHTAGLLDKAALSAKQAELNAKLTELRRERRKLLCNEDIDEQVDAIRLTIDTIRNGPETLSSFDEALFTKLVERIVVDTQGTIRFQLYGGFEFQETLEA

SEQ ID NO: 8390 - protein, 545 aa, synthetic construct
MEQSSLERTVHRIPALRSNVAGNKTRLHGRQRVAAYCRVSTDSEEQINSYTAQKAYYTQKIEESPDWELAGIFADEGITGTSMKKRKEFNRMITACKRGRIDLILTKSLSRFARNTVDCLETVRMLKARGIGVIFEKENINTLTESSEFLITLFSGFAQAESESLSSNIQLGIRMAMKEGKVNFHYRSMLGYQRGADGKPEIVPEEAGVVRRIYRRYLEGCSEGQIQRELTQAGVATAKGVKACSHQIVHNILTNEKYAGDALLQKTFTTDCISKKVKKNTGELPQYYIKDNHTAIIPRDIYQRVQEEMARRTSRRKILQKSGKTEQGKYSAKYALSERLVCGECGSPYKRCTWARNGVKRIVWRCVSRLEFGKKYCHNSPSMAEDKLHTAILTVLNRVVEASDGLQDELAETLRMVCTPEGDGNNLLELERNMEALTARQNTLLDQVLAHMDDLTLTEQLKALLEEKQHLQTRIDAAKKKAANRINEDSRMAEYTAYLEEHLNGFPHYDDEIVRKMIERVTVVDSEIIRVKFRYSDLEIEQAVC

SEQ ID NO: 8391 - protein, 438 aa, synthetic construct
MARTIQQISFPAPMRPSLKRVAAYARVSSGKDAMLHSLSAQVSYYSALIQKHTGWLYCGVYADEAFTGTKDSRDGFQSLLAECRAGNIDMVITKSISRFARNTVTLLETVRELKALGVDVYFEEQNIHTMSADGELMMTILASYAQEESRSASENQKWRIRRGFERGELVNLRFLFGYKIEKGRVTVDPEKAAVVREVFRRALEGESLTSLAIDLNRRGFTGVLGGKWNSMRIREMLSNEKYLGNALLQKQYRNNHLEKKEIPNRGELPQYYAEGTHEAIIDQAAFDAAQELLAGITENSPIKRPRRRSAFTSMITCTVCGRNYKRCTGGKRHFWNCPTAVQTDLPSCGTSQIPEKLLYDLAAQVLGLAQFDEGVFLERVKGIDALPDKTLVFHFKDGSTAERHWEHISRAKSWTPEMKEIARQRALAQRRGEKWQEP

SEQ ID NO: 8392 - protein, 525 aa, synthetic construct
MARAVTVIPPTIQPITHLARNAVVRRRVAAYARVSTSSEEQLTSYEAQVDYYTRFIQSKPEWEFVRVYTDEGISAVNTKKREGFNQMVRDALDGKIDLIVTKSVSRFARNTVDSLVTVRKLKEKGVEVYFEKENIYTLDSKGELLITIMSSLAQEESRSISENVTWGQRKRFADGKVSLPYSHFLGYRKGDNGLPEIVPEEAETVRWIYSLFLSGKTTGSIAGLLTREGIPTPAGKKKWAASTVESILKNEKYKGEALLQKAFTVDFLTKKQKKNEGEVPQYYVENSHPAIIDPAEWKLVQRELERRKAIGRSYSGNSIFSSRLVCGDCGGYFGSKVWHSTDKYRRTIWRCNSKFTGEEKCQTPHLTEEEIKARFLDAFNTLVSDKERLLDECRTMQAALTDTGSLDSEISALLSEMEVVAELTKRCIEENSTTAQDQTTYLERYNGLAERYETAKAKLEKLQAAKAQREAKAEDIGGFMFELAEYGESLTEFDDRLWLTVIDIVTVHRDGRLTFKFQTGHEMLE

SEQ ID NO: 8393 - protein, 473 aa, synthetic construct
MVKKVLRCAIYIRVSTAEQAMHGKSLEAQLSYLTQYAKDHDMVVAGVYADQGKTARKNLRDRKEIKNLLSSVKRNEIDVIIFWKMDRWFRNVGDFYKVQDILDAHGARWIATAEPNMNMETREGRLNVNIMLSINQNETDTTSERICFVNEASVRLGKAISGAQPYGYKVVRNESGAKVVVKDPERELYVEEFFRHFLVHQSKRGAFLYLTEKYGPVITMSQVITMCKNTMYFGAYRENPNYCPAYITFDQYIQIREINRKNIKVYQSNLGTGEVYLFCGLIHCPICGRPMSANRITKNSHTGKPLKDPLRYYRCQNWCYKKSCTYSKIASEATIEKYLLGHIDEEKERYRQREEILLTRISAQAPVEKKKPSKEKLLAELDRLNNMYQKGRISDEKYDSEYERISSDIKAMSIETLPAPKRSYKELETVLHSGWHEMYEHLSRQNKQAFWRSIIKEIHLNADNSFVNFIDFL

SEQ ID NO: 8394 - protein, 502 aa, synthetic construct
MEILKKKQLKCYLYTRVSTSMQVDGYSLDAQRDKLRKYAAYEDMIVAGEYSDEGFSGKNIQGRQEFQRMLNDIQDGKDDVSYVLVFKLSRFGRNAADVLNSLQLMQDFGVNLICVEDGIDSSKDAGKLMISVLSAVAEIERENIRTQTMAGREQKAREGKWNGGFAPYGYKLENGNLVIAEDEVEVIRVIYDRYIHTNEGVAGVAKYLNRNGYTKKLRQNNTIPGFSRDFVKNVLYNPVYMGKIAYGRRRTEKKQGTRNEMHVVEQSEFPVYEGQHEAIISEEDWYLAQEKRKINSFKREKVNNPDHAHILSGILKCPCCGKSMYGNIAKAHSKDKKTRYYYYCKNTVTPTGHECSFRLNIEQMEINKFVAKVISAMVNNPRFVEAIQAKIGTAVDTEDMEKQIAVLQGRLKQAFGTKSRLERQMDTLDINDVHYDRKILDLQRRYDEQYDTIEEIEAQIGELQSQIRSIQQEKISGDNIYRLLLAFDEVYHPQQKRSRKSL

SEQ ID NO: 8395 - protein, 597 aa, synthetic construct
MEVEIIKANSYDEDISNGRRIDRLRVAAYCRVSTDDEDQIKSYNSMVRYYTDLIKSNKQWVFAGVFADKAITGTKTDKREEFQLLIQECLSGNIDMVIAKSIPRFARNTLDTLKYVRMLRERNIAVYFEVEKINTLKDGEFLLTILSSVAQQEVENTSAYVKKGLKMKMKRGELVGFQGCLGYDYDVVTKSLSVNEEGAETVRYIFDRYVAGAGSTMIARELNEQGIPTIKGNPWTSSSVMGIINNEKYKGDILLGKTFTVDPISKRRLENLGEEDRFYIKNHHEAIISEETFARAQEIRERRNGGRKKGVAPGKREKFSRQYAFSCMLECGFCGANLSRRRWHSSSKYTKTIWQCVESTKHGKRFCPDSKGIPEQVIEDAFIESYRMLCMDHKDVLEEFIKRVEKTLLEDSIEDKIEKLNRSVYNIQYKRKKLLENYLEGVVAKDIYEETDMGYEKQLSEAKSQLSMLEQQYDNEGSLQRRLADFKKALSKNQVLEEFDRGIFESIIEKVIVGGYDENGEKDPYKIIFIYKTGFKNEIGNAKERFGKKSKAVETVKEMCSHIVDEVKDVCSYVSDNTCGNGCLAFQGRGRLEKDSG

SEQ ID NO: 8396 - protein, 522 aa, synthetic construct
MGNVMLIPARRQVGSNARKKEEEKPKLRVAAYCRVSTDSDEQATSYEAQVEHYTEYIQKNPDWEFTGIYADDGISGTNTKKREEFNRMIDDCKAGKIDMIITKSISRFARNTLDCLKYIRELKDMNIPVIFEKESINTMDAKGEILITIMASLAQQESQSLSQNVKMGIQFRYQQGKVQINHNRFLGYTKDADGNLVIDPEQAEIVKRIYREYLEGLSMDKIAAGLERDGILTGAGKAKWHTSTINKILRNEKYIGDALLQKTYTTDFLNKTRVKNNGLMPQYYVEGNHEAIIPKEIYLQVQEELVRRRVVKTSANGKKRSYSCNHCFSQIVICGECGEMFRRLHWNNRGVKSIVWRCISRLESTGLECHARTINELVLQDAVVKAINQMLGDKSSYQAQLQLNIASVIRASQATSVENIDEKLMALQQELIQKAQSKEVYDEIADEIFRLRELRQQTIVDTATRDEQIKRINDLQDYISQQTAHLTEFDELLVRRWVKQITIWDDRITVELKSGVSIDVDA

SEQ ID NO: 8397 - protein, 558 aa, synthetic construct
MKKEKIKVYIYTRVSTAMQIDGYSLDAQKSRMKAFADFNDYEIVGEYEDAGKSGKSIEGRIQFNQMMEDIKSGKDGVSYVLVFKLSRFGRNTADVLSTLQVMQDFGVNLICVEDGIDSSKDAGKLMISVLSAVAEIERENIRVQTMEGRIQKAREGKWNGGFAPYGYKLEKGQLFINEEEAAAIRVIFDQYVHTDTGANGLAKYLATHGIHKIQRQNGKNPLFDSALIRRILKNPVYCGKIAYGRRRTEKVHGTRNDYRLVEQDDYLLVDGLHEGIVSEELWHEAQVKLLAQAEKYEHVNRGKDTKIHLLSGIVKCPVCGVGMYGNKSIKHKADGTKYKDFFYYGCKHRTMTRGHKCDFKKQINEELLDSAVAEVIVKLVSNPKFAAMMQEKISMKVDTSAIEQEIAAHEKQLRQSYSVKVRLMDEIDSLDPDDKHYIKRKADLDDRLYKMYDKIEDTENQLVAARAKKMAIEAEKLTGDNIYKVLIFFDKLYSVMDDQEKRQLMESLLSEVQIYEERQPNGQWLKSIKFKLPIIAEDMSLSLDNDAHIETVVLMSRK

SEQ ID NO: 8398 - protein, 502 aa, synthetic construct
MMYDALYGRQSIDKKDSISVESQLDYCKYETHGEPYIEYADRGYSGKDINRPDFEKMMRDIRDGRIKRVIVYKLDRISRSILDFANMMEVFQEYNVEFVSCTEKFDTSTPIGRAMLNICIVFAQLERETIQKRVTDAYYARCKRGFYMGGRIPYGYRLTSTVIDNIRTSMYEEVPEESEQLKLIYSLYADPTNSLGDIMRYLNKHGIKNLRGSVWTTARISEMLRNPVYVAADIDVYNFYKSQGANVYNPPSDFTGYNACYLYRGTVSTTRKQCDLTDKEIVLAPHRGFISSSVWLACRMRCLNNRQSTHTCKGKNSWLTGKTKCGNCGYALTVRKAHTKWGRYFVCSQAGANGNCKGTGCTIYADVLEEYMLGAIRSKLAEFKQLSSGKAGQAIPKVFQNKIRLTDIDVEIKDLLSKVGSANPILMEYINNRIAKLDEERKTLQEEILALTCSKAEDKMDEITNHVEMWDSVSFEDKQTVVDTLIKIIKIANGKIEIEWKI

SEQ ID NO: 8399 - protein, 557 aa, synthetic construct
MLQSNKITALYCRLSQEDMQAGESGSIQHQKMILQRYADEHHFLNTKFFVDDGFSGVSFEREGLQAMLQEVEAGRVATVITKDLSRLGRNYLKTGELIEIVFPENGVRYIAINDGVDTAREDNEFTPLRNWFNEFYARDTSKKIRAVKQAQAQKGERVNGEYPYGYIPDPNNRHHLIPDPETAPIVKQVFAMFVSGVRMCEIQKWLAENKVLTIGALRYQRTGQARYQRAMIAPYTWPDKTLYDILARQEYLGHTITAKTHKVSYKSKKTRKNEEEQRYFFPNTHEPLVDEETFELAQKRIATRHRPTKAAEIDIFSGLLFCAGCGHKMYYQQGVNIEPRKFSYSCGAWRNRARTGSECTSHYIRKNVLLDLVLEDMRRILRYVKEHEQDFICKATEYGDMEARKALAQQQKELSKAQARMTELDTLFRKLYEDNALGRLTDERFVFLTSGYEDEKKSLAARIDELQQQIATVTERKRDISRFIQIVGKYSDIQELTYENVHEFIDRILIHELDRETNTRKIEIHYSFVGQVDTEQEPTQVVNHDRRNMVDVKSIAI

SEQ ID NO: 8400 - protein, 502 aa, synthetic construct
MEFIREDCIYARQSVDRKDSISIESQIDFCKYELKGGSCRVFKDKGYSGKNTDRPEFQKLLGEIRKGKVRRVIVYKLDRISRSILDFATMMELFQEYDVEFVSSTEKFDTSTPMGRAMLNICIVFAQLERETIQKRVTDAYYSRCLKGFHMSGQAPYGYQLEPTVVEGIRTKKMVADPVAADHVRLMFEMYAEPETSFGDITRYFEEHDIKIYGKSMFRTFLSQLLRNPVYAQADLELYEFFKSQGAAIVNDASDFAGTNGCYLYQGRDVKEDKDRCLKDQILVIAPHEALISSDTWLKCRKKLMANTTFQQGRKPKNTWLAGKIKCGHCGYALKATHVPNSTGYFRCTKRTENKGCPGCGKIRKEEFEQFIFSAMQEKFKDFQILYGREEKVNPKLTAYQVELAQVEAEIEKLLDTLTGANATLLAYANKKIEELDTRRQTISKAIAELSVETISPQQIKKLSYYLDNWDSIDFDDKRKAADGLISTIKATSDRVQIEWKI

SEQ ID NO: 8401 - protein, 569 aa, synthetic construct
MKQSNNKKSRDVTAFLYERLSRDDNLEGESYSIGNQKKLLAKVAKEKGYTNLLHFLDDGISGVTMDRPGFVEMIRQLEQGKAAAVFVKDLSRLGRNYIEVGRLTEEFFPNHDIRLVAVSDNIDTAEGENELAPIRNLFNEWYARDISKKRRISNKIKGNAGEPMGQPPYGYIKDPNDPKHWIVDDEAAQVVRRVYSMTLEGFGTEQIAAQLEKDDVLTPRAYWLTKGIKRPGKGKQQPPTKWNSSTITKILSLQEYCGDILNFKTYSKSYKNKKRIDNDRENWVVFQDVHEAIIERAVYEQVQQKRGKIRKRRTNNGEHNMFSGLLVCADCGSNLHFHFNQGNPEIKYFNCSNYKGNRGTCTSTHYVRVDFLEEVVLGEIRRLTKFASLYENEFVKAVIGHSQQAEQTDRKLKEKELRTLLARDEELDGLFERIYEDNVSGKLSDDRFAKMSRRYEDEQKELSEKIKKLRSEIEKQSSRSMTTDMFIGLVRKYTRARKLAPRMLNELIEKIEVFNAEKIDGVWEQRLRIHYNCVGTIEIPTVLPLPIPEVSVNTRKGVVVNYAPCELAV

SEQ ID NO: 8402 - protein, 540 aa, synthetic construct
MKQPYNTTIYNTALYLRLSRDDELQGESGSIQTQRMMLRQYAAEHGLTVVDEYIDDGWSGTNFERPSFQRMIDDIEDGKINCVVTKDLSRLGRNYILTGQYTEIYFPSKGVRYIAINDNVDTINGESELAPFLNILNEMHARQTSKKVKAAMHTRFANGAHYGAYAPLGYVKDPDKKGHLLIDPETRWIVEKIFDLAVHGRGAASITRILVEEKVPTPGWLNYERYGTFANIYAGAPAEKAYAWTIAQVKSILKEETYIGHSVHNKQSNISFKNKKKVRKPQEEWYRVENTHEAIISEEVFQKVQELIASRRRKRRNGTTQIFAGLIKCADCGWSLAYGENKQNKNPYGYYHCSKNGQGLRQCSMHYIRYDVLYAYVLARLQYWSMMVQKDEDKLLKRLLNASDRERNSAKKKQAAELKKAEKRKAEVDGLFAKMYEDWSAGRITEYNFNMLSEKYQNEQKELDEKIQQLHEAMESAAQTAVDAEKWVGLMKQYVNPTELTAELLNTLIEKILVHEAVKGEDGSREQEVEIFYRFIGKID

SEQ ID NO: 8403 - protein, 447 aa, synthetic construct
MSITNVAIYVRVSTDRQAKKGDSIDEQLSTCKAYIASKENMVLAGTYIDDGISGRKIKRGDFEQLLDDVRLGRVNLIIFTKLDRWFRSLRHYLNTQAVLEANHCDWLAVDQPYFDTTTPHGRAFVAQSMTFAELEAENDSVRIRDVFDYKYRQGEVLSGKAPLGFSVENKHLVPNQDAEKVLHIFQFYAACNSLNQTITHLESDMGIVMTQSNLKTAILKNKKYIGVFRDNDHYCPAIIPLDLFERVQELLAINVKISQKYNYIFSGLLRCAHCGHSFSGATRKIKKKTGGFYKYPFYKCHGAYPSKRCSNRKVMFESCIERYLIANIKPLLQEHIAEYEITSAKVIDYDSRRAALLRKIDKLKDLYVNDIITMDELKRDKEKYIKELENLPHNQEQKDLAPIQKLLKMDLDSIYQTLEPAERRQLWRSVIKEIQIDDHKNLKVIFL

SEQ ID NO: 8404 - protein, 470 aa, synthetic construct
MARNITVIPPKKNSAAGKGKKTQRRKLRVAAYCRVSTDQEEQLLSYENQVRFYTESINSNPEYECAGIYADEGISGTNTKKREEFNRMIADCRAGKIDRIITKSISRFARNTLDCLNYVRELKALGVGITFEKENIDTLDAKGEVLLTILSSLAQDESRNISENSTWGIRKRFEVGQHKMSTARFLGYDTDESGKLVVNRKQAKIVQRLYMEFLHGKTTDYIKRIFEREGVVNWNGSTKWQATTLASMLENEKYKGDALLQKSYTADFLTKKRVMNEGEIQQFYIEDDHEAIIEPWIWECVQLEMERRKRYLEEHGTNSFSHNTEQNPFAAKIVCGECNKVFHRKGWQSSTGEIRRIWQCSERYKVKGVLGCSNRHIDENTVRKIYFMAWNKLLECRDELLPEWKEKAQGEDLLARFRAVDFMELTEHAQPIQELDIDLMLRTLDHIKVYESGVVVTVFLDGTEIEYKAE

SEQ ID NO: 8405 - protein, 502 aa, synthetic construct
MEFIREDCIYARQSVDRKDSISIESQIDFCKYELKGGSCRVFKDKGYSGKNTDRPEFQKLLGEIRKGKVRRVIVYKLDRISRSILDFATMMELFQEYDVEFVSSTEKFDTSTPMGRAMLNICIVFAQLERETIQKRVTDAYYSRCLKGFHMSGQAPYGYQLEPTVVEGIRTKKMVADPVAADHVRLMFEMYAEPETSFGDITRYFEEHDIKIYGKSMFRTFLSQLLRNPVYAQADLELYEFFKSQGAAIVNDASDFAGTNGCYLYQGRDVKEDKDRCLKDQILVIAPHEALISSDTWLKCRKKLMANTTFQQGRKPKNTWLAGKIKCGHCGYALKATHVPNSTGYFRCTKRTENKGCPGCGKIRKEEFEQFIFSAMQEKFKDFQILHGREEKVNPKLTAYQVELAQVESEIEKLLDTLTGANATLLAYANKKIEELDNRRQTISKAIAELSVETISPQQIKKLSYYLDNWDSIDFDDKRKAADGLISTIKATSDRVQIEWKI

SEQ ID NO: 8406 - protein, 561 aa, synthetic construct
MFYQSNTAAALQFPYAIMSAEEITALYCRLSQDDKLEGDSNSIINQKKILQKYALEHGYTYFRFYIDDGISGTTFNRPGFQEMISDIEAGIVKRVIIKDMSRFGRDYLQVGMYTEIMFPEHDVHFIAVNDGVDSAQGDNEFTPFRNIINEWYAKDTSKKIRAVMKVKGNAGEHLTSNPPYGYMKSPDDPKHWIKEDEPAQVMYEIGLYIMDGLGPSQIARKLKERKILTPAAYYESKGMKTNVKKQGDPYAWDSSTIADMMGRWREYLGHTVNFKTRKKSYKSKKTIQNPESEWAIFENTHEPIWTEAMADAARLARQTRRRPTKMGEMGMFSGMMYCADCGSIMYQCRATGFRRDQEYYICSGYRKGKDVCGETHSIRTVILEELILDNLREIVSFARQHKERFVQMVMDMDLKERNKGLAKKKRLLADAEKRIAELDNIFKRLYEDNISGKLTDERFRKLSQDYEGEQGGLKNQVLLLREEIEAVESKSANVDRFLSIVDRYTEIPELTPHILHEFVEKIVIYAATDPHSKVNRRQQVDIYYKGIGILEISKVFDTRHK

SEQ ID NO: 8407 - protein, 462 aa, synthetic construct
MSFFTPNPQLFGLRVVKYIRCSHDDQVLHGDTLEAQDLILEDFIKVNRMILVDTFIDEALTARKKFNKRKEFVRLLDGVKAHSFDLIIFTKLDRWFRNIGDYHKIQEILEANGVQWKAVTENYDTTTTNGRLHINIRLSVAQDECDRDSDRIKDVFAYKLKNKTYVSGSLPRGLKLDAEKHVIIDPEWNCFALDMFDRFEATCSKRDTQLFLQDKYNIRVCYDTVARYLKNPLFKGQYRDDPDFCPATISPERFERIQKLAIRNVRIRHTQQFYIFSGLLICSSCNHIMTGTVTYRKMADGTEKAYKSYRCNFKAQSKLCDRGKTYREEYVEEYMLNHIRPALSDYVAKYEVTAASAVQKNPVEEMSKIERKIKKLYDLFMDDLIDKDAYRSEYDKFKKQIEELQKCPAAPVRNLDSVRKLLNDDWEAVYNTFSNQEKNVFWKSFVESVLVHEDGSMDIHFL

SEQ ID NO: 8408 - protein, 514 aa, synthetic construct
MSTEYALYLRKSRADLEAEAHGEGDTLARHEHILMELAKSRALPIGAIYREIVSGERIANRPVMQQLLSEVEDGRWKGVLVTETSRLARGDTIDQGIVAQAFKFSGTLIVTPSKTYDPTQEADEEWMEFGLFMSRQEYRMIRRRQLAGTRASKKEGHYVPGRPPYGYERYKLDGRGWSLRPVEPQAGVIRTIYDMYLSGKGFSEIANELNAMKIRTPLDKKWVPATTRAILQNPHYAGFIPSAMKVNTKIVQKGKLITKRPVNKNCELYEGIHEAIIPRDVWYSVQQRMKDTVTPRVPRKYQQMNPLAGLVYCDQCGKLMSRHPYRREDKVRFGCENPSCSTVSSLFEDVESLVLQSLREFLHKIELSSPTLLDTKSEEIALQNIEKQLTDINHRLQRTYELLEDGVYSKETFLQRQSAISQDQTTLLNTKHEIERKLHNKQTDIEAQKNSAPLIRHVLDVYPTLEDPKEQNLLLKQVIRRIDYHKTVRVYGKAKSDLHLTIHPKIAIPQTSNI

SEQ ID NO: 8409 - protein, 527 aa, synthetic construct
MTPKRNVSAGQDAARPVTLDSYGRLSRVPETGELEKIDVQWADNRKVVERVGARLGQELQDGLSAWKRGVRRPGWEALLERVESGVVDGVVVWHTDRLFRQPRDLEKLIELGERGFKVYSAHGTRDLSDPDDRFILRIEVAHAARSSDDTARRIKRRFATFREQGKGTGGPRRFGFPGKDLTWTPGPGQTKDDQPLVSADQVARERQAIRDAAEAVLTGVSMCEIARQWNAAGLRTAAGRNWVQVTVRDTLKRPTLAGVIEHEGKPVGRLPGEPILSQRTFDRVRALIAGRKRGRVAGERYVGTGLLRCGKCFHKLSAHVQTGKTYKDGTKRFDYFCCKQHRGCGGVYADGGSVDRELRTFTINRLSDDRHAAAIAAARARVADRLAEVNDEIDDIERLHQALSARLGARQMTLDAFDAANEPLVADLARLTAEREALSGGNADGPTQAQSPEEVARQWDAGGFAEKRSLLTQALGRNWMMVEPFTQSGRKRFNPRRVHPVKPKSAAEVAARAAEVAAEMAARAAAQ

SEQ ID NO: 8410 - protein, 501 aa, synthetic construct
MTSSSQRPKRTEDIFPEALSGDRAYLVDGDMSRQPCVFYFRKSIGDDFATQVLRCLQYARGAGLRLDTSVGIEGVYYDDDKSGSKDIERPGYDHLMSDVMSGALSGRFIIVRDQDRLSRRESSVLEEYHVITELSKVRTFSSDGREIKDDLTTGIMAVLARSEAKIIGHRQRGRKEFRAIQGMPPASRVKRIGYTRGYTAIDWEEAKMLRRARAKVVAGRSLSGIVKEMKEQGIVKPNGKPYLVADLGRLLRNPAYAGLRVFTRDIEIEGKVIPKGEVVARGEWPRIFTEDEHYEVAAILAKNKSFSADHGPKYLLAGILVCAECGTRMSHGWKPSGKKRKDGSKVVIPNYHCQISRGGCGRVSRSARALESFFLDLTYRAIKRLPVVVEKVVDTTGDEIRRQQRKIDDAVKAFKDDAIDIVTLADIRQDAQAKIASLKKEQKVKPKPLPIDDADAFLNSKDVGKQRDTIRRFFPVVGVKPAGGNGVRFHPDQLVFPEDAK

SEQ ID NO: 8411 - protein, 530 aa, synthetic construct
MEQYLIYLRKSRSDIEAEAHGEGETLSRHEHTLLELAKRQHLNVTDIYREVVSGDTIAARPMMQRVLSEVEQGVWSGVLVMEVERLARGDTIDQGIIAQTFKFSGTKIITPIKTYDPDNEFDEEYFEFGLFMSRREYKIINRRLQRGRLASAKEGKWPSGLAPFGYRRVKLKNEKGCSLEPVEEQAAIVRMIFDLYTVGLQDEDGSARPLSLGSIATRLNDMHIPSPSGSQWARITIRGIIKNPTYIGMVRWGSRETKKKVVGGKVVSVRGPADPEKECVFKGIHPPLIPKETFELANDKLTRSENTSTHKEKVVRNPLAGLLVCSECGRQMMRMINPVHPDMPVVRCPRRGCPNCSSYLPIVEERVIQGLSEWMKGYELEWSSAAASSSVSSVGVREKALAGAEAELRKLQQQLERTHDFLEQGIYDTDTFLSRSRMLSDKIAAAKDSVARCSRELTEEKLRETSRRDIIPKVKNLLDVYPLLETAEEKNALLKEVLEKVVYQKLNEKRKKSPDGFTIEIYPRIPKSEK

SEQ ID NO: 8412 - protein, 502 aa, synthetic construct
MEFIREDCIYARQSVDRKDSISIESQIDFCKYELKGGSCRVFKDKGYSGKNTDRPEFQKLLGEIRKGKVRRVIVYKLDRISRSILDFATMMELFQEYDVEFVSSTEKFDTSTPMGRAMLNICIVFAQLERETIQKRVTDAYYSRCLKGFHMSGQAPYGYQLEPTVVEGIRTKKMVADPVAADHVRLMFEMYAEPETSFGDITRYFEEHDIKIYGKSMFRTFLSQLLRNPVYAQADLELYEFFKSQGAAIVNDASDFAGTNGCYLYQGRDVKEDKDRCLKDQILVIAPHEALISSDTWLKCRKKLMANTTFQQGRKPKNTWLAGKIKCGHCGYALKATHVPNSTGYFRCTKRTENKGCPGCGKIRKEEFEQFIFSAMQEKFKDFQILHGKEEKVNPKLTAYQVELAQVEAEIEKLLDTLTGANATLLAYANKKIEELDTRRQTISKAIAELSVETISPQQIKKLSYYLDNWESIDFDDKRKAADGLISTIKATSDRVQIEWKI

SEQ ID NO: 8413 - protein, 514 aa, synthetic construct
MSTEYAIYLRKSRADLEAEAHGEGDTLARHEHILMELAKSRALPIGAIYREIVSGERIANRPVMQQLLAEVEDGRWKGVLVTETSRLARGDTIDQGIVAQAFKFSGTLIVTPAKTYDPTQEADEEWMEFGLFMSRQEYRMIRRRQLAGTRASKKEGHYVPGRPPYGYERYKLDGRGWSLRPVEPQAGVIRTIYDMYLSGKGFSEIANELNAMKIRTPLDKKWVPATTRAILQNPHYAGFIPSAMKVNTKIVQKGKLITKRPVNKNCELYEGIHEAIIPRDVWYSVQQRMKDTVTPRVPRKYQQMNPLAGLVYCDQCGKLMSRHPYRREDKVRFGCENPSCSTVSSLFEDVESLVLQSLREFLHKIELSSPALLDTKSEENALQNIEKQLTDINRRLQRTYELLEDGFYSKETFLQRQSAISQDQTALLNIKHEIERKLHNKQTDIEAQKNSAPLIRHVLDVYPTLEDPKEQNLLLKQVIRRIDYHKTVRVYGKAKSDLHLTIHPKIAIPQTSNI

SEQ ID NO: 8414 - protein, 516 aa, synthetic construct
MDKKVSIIEPLSREEKIKTAAYARVSSKSDDQIHSFNSQVAYYSQYINQLQNTIIVDVYTDEGITGTVIEKRNGFKKMIQDCRDGLIDRIITKSIARFGRNFTETLKTLRELKCLGVSIYFEEEHIDTADSVSETSISTYMMSAELESRTISYNQRWGFRTRAEKGIYNQPHLPYGYYRIDGKILINESEAVIVRLLFDMYVNQDMSTVAITNYFSQNKIGGRTWSRSGIVLMLINERYCGDKLLQKKFTTDEFPFHLVMNKGELPQYYVYDSFPKIIERSLYEASYAKWERNRENLSDNQLSANKRYPYTSKIECAECHEKFKRRTYRGVEFWCCKKHLVDHDSCMNKQISKEELDEAFLKLYYKLKNSIDILESYGRNIVKLLMDDEKEKELMMLDKELHNLKAEKLRLLKENLEGKISDIEKISNLNEIQMYKSLYELEKKKVLNQVYESAEYRNNQRLVDVLRHSASIDTFDEVIFHEIVQKVMIGQNHIYFQLHNDLMIKSERKKYDGNYS

SEQ ID NO: 8415 - protein, 573 aa, synthetic construct
MGITLRKQDVQQKALVNANSEEPMKVRVIPARKKFLPVAQQESVKKRVAAYCRVSSESDEQELSFESQCRFYKNKIDSEPSYDLVDIYADEGITGTSTEKREDFMRLMKDCLDGKVDLVITKSITRFARNTLDSISWIRRLKEIGVDIFFELENLHSLTASEMVLTMLSSIAQESSQNKSESVRWGYERQFEKGKTYLGNLYGYRTKRDTYYIDEEEAKIVIEVFDMYLAGVTDQAIADELTRRGVPTRLGKKVWKKAVIQRMLQNVKYCGDSIQGLSYNQDCLNQKRQKNKGQRKMYYVENSHKGIISKEVFKAAQIERARRNSKVKIIEFEESMKQNPKGKIPKKNKCGMYSTQNALSNRIICADCGSYYRRAVWTKRDGKKQPVWRCINRLDNGVNMCPDSPTLKEELLFEEIAKIVNKILSKKDQIKLDLAQKASQYINPKDVTSKIKKTEKHITEIDLKISDLLNKGMILVSRGVQDENQYKEHLEGLYQTKRKLTEELENLNSRLKEIRAAREKKVLKNLNEINASVSCLSQEEIAIFIEEIIVYKDYIEILTKTENRKKILINKVK

SEQ ID NO: 8416 - protein, 516 aa, synthetic construct
MNRAVIYARYSSDMQREESVEAQIRACKYYAQQNGIDIIGIYADRAKSGMYHSEKREEFQALLNAAPRKEYDIVLVHKLNRFGRAGVKALNDRDYLERLGIEIISVTERLENTPEGRLMLYVITGMNEYYSRNLAGEVLKGLRENAYKGITTGGTPALGYNLGADKKLVINEQEAAAVRLIFKMYISGAGYGEIIDELNSRGFRTKRGAKFGKNSIYDILRNERYTGRFTYGKTKTVNGHRSQHKKEKEYISIEGGCPAIISADEWERVQRLMDVKKHDAASGKAKELYILSGKLFCGHCGARMVGNSRVSRGERYLYYDCNAKLRKKTCTKHAVKKNEIEQAVIQKLNQLAFSDDLIERFVDEAYKAQDNEMPDISGKIADIDKKISNLVTAIESGADIGPIKQRMADLSAQKDALLSSNVPKGDFLTRDEIRSRFKKFLNIADLPPAQQKFIISEYVTRIDVFDSDGGGHFCRITLSNNTSVDTDVLGSSAPKGSICGCCFFPKLRGTSSRFHM

SEQ ID NO: 8417 - protein, 517 aa, synthetic construct
MTAVIYARYSSDNQREESIEGQIRECTAYAEKNGITIVKHYIDRAISAKTDNRPEFQQMIKDSDKKLFDIVLVWKLDRFARNRYDSARYKTQLKKNGVKLMSATEIISEGPEGIILESVLEGYAEYYSADLAEKVVRGQTENILKGRCNGGRGTFGYTLDPERKFHIDPLTSPFVLESFKKYDEGSTMKEIRDWLNENGIKNPVGGAFTYNSVEHMLKNRRYIGELKFRDVVVPDAIPPIVPLELFDDVQEKIAKNKKAPARRKAEEDYLLTTKLYCGYCGALMFGESGTSRTGEVHRYYKCATAKKKKGCKKKTVRKQWLEDLVVNQTMQLVRDDAAMESIIAKVMELQDRENTNLPLYEKQLRDAESGIQNMLNAIQAGILTSSTKERLEQLEETKRELEARIAEEKLAKPKIKEEFIRFWLLRFRKLDMSLKDQRQALVDTFINAIYLYDDKVLITFNYKEGTQTVTFGEASEVASEGNGSDLDCIPAPKTSTHCVLVFLFVRGRRPRTTLFII

SEQ ID NO: 8418 - protein, 554 aa, synthetic construct
MAKKKKPAGGNAIIYARYSSHNQRDVSIEQQIEACRKHAAELGLTITDTYEDRAISGRTDNRPAFQRMMRDAEDGKFQYVLAWKSNRMGRNMMQAMVNESRLMDCGVKVFYAEEDFDDSAAGRFALRSMMNVNQFYSDNLAEDVRRGLMDNASKCMANGRQPLGYKRGEDGKVVVDEPAAAIVREIYTRIASGEMFMDIARDLNRRGIKTQSGSEWNKSSFKVLCRNERYRGIYIYGDTRIEGGIPPIVDDVLWYKVQEVLKVKKSKNRHHCPSDEDYLLTGKLRCGKCGGYMIGMSGRSKTGDVHHYYACQNRRVGHTCDKKNIRRDVVEPAVAQAIKQYCLTDDAIEWITDQTIAYWEDEDRKLQIDSIENDLSAVQSSISNVMKAIEMGVITETTRDRLIELERQQTDLKSKLALAKEEIVHVDRKDLISSLLAFRHGNVHDRAYQEKLFNAFLIAVYVYDDDHLKLVFNSFGKDDTVNIALDLGENDDNSGLSDVSKSSPILSNGQPKSHLVYAGWLFSFYIVIQKQRTVFATVRPFLCSYYRMLMRPAP

SEQ ID NO: 8419 - protein, 502 aa, synthetic construct
MDIIREDCIYARQSVDRKDSISIESQIDFCKYELKGGSCKVFKDKGYSGKNTDRPEFQKLLGEIRKGRVRRVIVYKLDRISRSILDFANMMELFQEYDVEFVSSTEKFDTSTPMGRAMLNICIVFAQLERETIQKRVTDAYYSRCLKGFHMSGQAPYGYQLEPTVVEGIRTKKMVADPVAADHVRLMFEMYAEPETSFGDITRYFEEQGIKIYEKSMVRSFLSQLLRNPVYAQADLELYEFFKSQGAAIVNDASDFAGTNGCYLYQGRDVKEDKDRCLKDQILVIAPHEALIPSDVWLKCRKKLMMNKTFQQGRKPKNTWLAGKVKCGRCGYALKATHVPNSPGYFRCTKRAENKGCPGCGKIRKTEFEEFIFNAMRKRFKNFQVRHDREEKVNPKLTAHQIELAQVEAEIEKLLDTLTGANATLLAYANKKIEELDTRRQTISKAIAELSVETMSPQKEQELSYFLDHWDSIDFEDKRKSADGLIISISATSDHVQVEWKI

SEQ ID NO: 8420 - protein, 576 aa, synthetic construct
MRKCFLYSRVSSDVQISGDGLGRQEDKLKQYLLQNALRLNLSVDDCEILVDSGVSGWKGSNMGDTAALGQLFRRVESGEIDGSVLIVESLDRFSRENPFRVAGYIAQLAEHSIDIIDVEQNLVIGTSNPWSSTIASIIANRAHEESTLKSKRIKAAWNSRRRKAEESGQYMIKNTPFWIDVLDDKYVANADASIVREIFDLYLQGYGSFTIAKKMNEAGKVIRNKRWSTPKICALLRNPRCNGDFISHSLERDYEKGTSTSVEHVIKGLYPKIVTDEEFALVLNRLDDGSKNKRVCNDRKVTILNGLLKCSICGGALTVRSAGAYRYVGCLKTIEKGGCYSKPIRYDALEKIVVNHIRNMDLGKVYESNDSQEVITKERIKSLMSHIEEYKAGITQLRERGKKPSFDMLTELQNSEDELELLKKELEQLSLSKIDLSEFAVSTELFDITQIALRTRLERTISSLLNKIKVYHTKDLSFSLIEMIYVNDVVKHVLVADKKGDVTGDVVIRRNGESTTYESCSVKIIKDECGVFSLDCNISEVILNDYLLLMNVVDFVDSEAKEFLNLHLNTVLQQDG

SEQ ID NO: 8421 - protein, 564 aa, synthetic construct
MESAYLYVRVSTDEQARKGFSLPEQEDRLLKYCEFGNIEVKGIYREDYSAKNFNRPEWKKLIATIKKDSGKKENNILFIKWDRFSRNIEYAYEMIGILRKYRATAMAIDQPIDFTVPESTVMLAVYLSIPEAENSRRALNTSNGMRRAKLLGRYPNKAPLGFTNCTGPDEKKYIIPAYPEADIIKWAFKQLAKNSFKIEVVRRMACAKGLVCSRSGFWKLVRNPVYCGFIPISTIGQAPELIKAVHEPLISETLFYEVQSIINTRRKVESKSDELGNAFFLRGFLICPACGKKLSGSFSRGSTRKYPYYHCFKGCPTRIRAELVNNSYNEKLQKMLLLDGVIGLFNLVLEDENIGSQRAEYLQDRRLLKKQLEEQQLLISKARKLFVTDRLKFDDFKELKLESQIICSNVGVELSSNASKLRLLRQQLEVDGRSINQIFYNFLKLNILDKKYIVSMIPPKTIDINTGTVSIQIGSILAKILSFKKSNSLIEVSDLDTRPNNFRERKVTIKSAISLMGRNGIQLEEGEAGVILDFLYHMARTYNFTNVKINHIPKWISNQQKPAW

SEQ ID NO: 8422 - protein, 482 aa, synthetic construct
MLRCLVGARVSVLTGPQKVSQLAQIETGARWVAQNDGEIVATFEDLGVSASVPPPDRPDLGPWLRDPEKINEYDAIVFSKMDRAFRSTQHCVDLARWAEENRKMLVFAEDGLKLDYREDRPETVDSMLAELFVYLGSFFAQLELNRFRTRALDSHRQIRQTTRWASGKPPFGYRICEHPSGKGKGLEHDPEQQEILHQMGADLIAGSSFTSLAVKYGWKTTTNVVEALTLPKTQGWKTTKKGREIVVDSEGEPIRLAPPTFDSDTWMQIQEAAARRRITRRRSATSNPMLGVGFCGRCGAGLAQQFHRYTLADGTPREKRYYRCARTPHNCPGTISADTLDALLEEQFLDEFGDEDVSVREWQPGSDTAEELQRVEDQIRRLRSEQDAGLVVSDDDHLEYIARMKRLVDRRGLLQESEPRKAGWVHRSTGETFRSVWLKLPEQNGAADAVGDRRRMLEESGVRLELMSTNPLEWRLRIEREA

SEQ ID NO: 8423 - protein, 467 aa, synthetic construct
MTNKIKRPQVKTVNTKLRVALYIRVSTQEQVDNSSIETQKEKLEAYCKAKDWVVYDTYIDPGYSGSNLNRPDLQRLLGDLKHIDAVMVYKLDRLSRSQKDTLELIEDYFLKNNVDFVSVTETLDTSTPFGKAMIGILSVFAQLEREMIAERMRDGLIDRAKKGYWVAGGNYEPAGFGVRHDGDLYEKEDEVKHIQAAYNYYEQLHSITKMQARLKEDGFPVWRFRRYNDVLRSRLNIGEVSFAGVYYKGRHKPIISKEQFDRVQALLERHKGKNWGKVKESLLSGLMTCGGCRESFVTYKTGITKRNKKSYRYYICRAKRFPSEYTHKCTNINWNATKLDSLIADEISNLLINKKTQPTKSKHIEYDKLIKNVDAKMKRILSLYAEGRVPVALLNDQMEELQTERLYLKKREELQEEKSSIVITEEDLKQFSIDLNAGDFPTRQAIVQKFIKEIIIHGDDIEIIWNF

SEQ ID NO: 8424 - protein, 561 aa, synthetic construct
MSSQRTVTKSAIIYCRISSLKQASDGDGLNSQEHRCRQYAAQKGYDVEAVFPDSITGGGDYLKRPGMVALLTYLDAQKDKNYVVIFDDLKRLARDTAAHIALRQELSSRGATVESLNFKFEESPEGKFIETIIAAQGQLEREQNSRQVVQKMKARLEKGFWVFHAPIGMKYVPAKGGGKVLVRDEPLASICAEALEGFASNRFASQTEVLRWLEAQPEFPKDKPNGSIRPQSVVRFLGKEVYAGLVSSKKWGVTLREGQHEGLISVATYERIQHKLKEGVYAPTRIDTREDFALRGALKCACCGYNLTGGWCKGKYKKYPYYFCVNRDCEQCSKTISRDKLEGEFANLLGQLEPARALVQVATAMLTDCWNQRLARAEERADGFRREAETCETQIGELVDRIIEATNPRVIQAYEDKIAEAEKRKLVLLEKAARTARPQMPLESLIELSLKYVSAPKTLWDSGVLELRRLVLRLTFSSHLRYSKKGGIELPETTAPFKLFNQINNVKGGKMTETPDFTSAEGMVPRGRIELPTSSLPMTRSTTELPRHLKRVREALSLCGE

SEQ ID NO: 8425 - protein, 690 aa, synthetic construct
MQSAFFFIPFFGSWRKGLFMAYVRNKKKILKFWSKKKAALYVRVSTRYQVDKDSLPFQRKKLKEYCKFLGIEDFVIFEDDGYSAKNTDRPHFQEMMSRVRDGEFSHLIVWKVDRVSRNLLDFAAMYQELKDHKVTFISMNEQFDTSTAIGEAMLKIILIFAELERNMTSERVTGIMLDRAEQGLWNGARMPVGYRWNPEIKFPEPDPEETKIVQFIFDEYERVRSTTKIARYLNHNQIASKRGGQWTSKLIRDIIRSPFYIGTYRYNLRESGRGPLKPESEWIVRENNHPAIITKEQFDRCNAIMDENGTSRDTSELRVRKYVHTFSGRLVCGKCGANMIASKDRARANGWRPSMYRCAQRSRMMDCDNSKTVNESYIGPFIFNYAANLARIQKNFKNIKTLEQLEKELLKGPEFENMKVSKESLRRTFDALAFQEVGKGAYLPDINLSDGDDDYTAAEQLSILKRELDKCKTAIDRLTDLYLYDPDSMTKEEFAKKKRDLVNKIAGYEKQIEVSQATGDKDDLADLADLEFIRKASAFLVAQRIVSKKHVDYIQMALDLDNEILKDFVDQVIDRIEILEGRVRSIRFVNGLVHEFTYSTPADLPVCQKCGGRIGSTCGCRTRAFDFAGKPYRRIKVGDPGDKFHGVTGAVCPECSAQAGRWHHWKCGIERCPICGEQLIACEHGPNGKD

SEQ ID NO: 8426 - protein, 452 aa, synthetic construct
MKGVIYARYSSDNQREESIEGQLRECKEYAERNDITILGTYIDRALSAKTDNRPEFQHMIKDSAKGLFDVVLVWKLDRFARNRYDSARYKNILKKNGVKVISARENISEGSEGIILEAMLEGYAEYYSAELSEKVIRGLTDNALKCKYNGGTVPMGYYIDEQQYYQIDPKTAPVVLEMFTKYSEGATMQELVNLLNSRGMRSIRGGKITLNIMNHLLKNRRYMGEYSYRDVVKEDGIPTIVPKELFERVQERLAKNKKAPARHKAEDDYLLTTKLYCGKCGSFMVGESGTSHTMKVHRYYRCVNTKKKKLCDKKAVKKDWIEDLVVNYTMKAIMNDEVMERLIDTLMELQKKESTDLPLLKKQLAETEKGINNMLNAIQAGIFTPSTKQRLDELEETKSQLEVSILQEEMHKPLLTREQIAFFIYRFRKFDVTKREQRQRLIDSFVNAVYLL

SEQ ID NO: 8427 - protein, 479 aa, synthetic construct
MVKAKPPAQRAGVRSAAIYARISADAEGTGLGVTRQLEDCRKLATDRGWPVGDEYVDNDVSAYSGKPRREYARMLEDLKSGTRDAVIVYNLDRLHRRPVELEDFVILCESVGVRDVATVTADIDLGNDDGLFMARIFAAFAAKESGRKSARIRRKMLQNAEQGLPHGPARPFGYENDKITLRPDEARIVREMVDRYLAGASIRSLTIWLNDTGVAPATSKSWQTTTVRHILASGRIAGLREHHGQVVGRGAWPAIITPAERDRILARIATRSLTKTRAPRTYLLSGMLRCGRCGNRLFSQARHNNPTNRVRRYVCLKGPDHGGCGRLTVVALPVEELLTDAVLTRLDSPQLAEALAGKSRVDADVATLAAQLEADQTRLDELAGLYAQGAVSAREWIAARDPITDRITRARRDIATATDTSAVVDLAGRGDLLRSQWDDLDIGRQQAIIKSVLDHAVIAPGTPGTRKLDINRVQPHWRT

SEQ ID NO: 8428 - protein, 503 aa, synthetic construct
MENQPKRALIVTRLSRVTEATTSPERQMEICQVLCDDRGYEVVGHAEDLDVSGSVDPFDRRRRPNIARWLANEAEPFDVIVVYRVDRLTRSLRHLQKLVHWAEDNDKLVVSATEPHFDMTTPFAPVLIALIGTVAQMELEAIRERNSSAARHNIRAGRWRGGQPPWGYVSSNASGEWRLVPCPEQVELINEVAARVLGGEPLQRIAHDLTSRGIPTPKGRTEWNVTPLKRSLTSEAMLGYVMSGDKPLRNDDGSPIIRAEPILSREVFDRVKVELESRSRRGEPTKRSSSLLLRVLYCGVCQLPAYQFNGGSHSKSPRYRCSSTGKSTKCENLTVRMDLADQAFTENLLDMFGDSERLERIWDTGSDHSAELADINEVLEDLTGLLGTGPYKAGTPQRSALDARIAALATRQAALSAEAVRPSGWAWKPTGEMFAEWWGNQDTESRNVWLRSMNIKVTYNNSSGAVTWGLDWGDLKKFEEQLKFGKSAQRAVRQLDKMAEQWE

SEQ ID NO: 8429 - protein, 554 aa, synthetic construct
MQKRLAYSYLRFSSPEQAKGDSVRRQMQKAADYAAAQGWELNTDLRDEGVSAYTGANLKGAFGGFLREIEAGRVPRGSILIVESLDRLSRAHPLDAQAQFHVLLKAGIEIVTLTDRRHYTWESVAAEPTLLLGSIMVMMRAHEESVTKAGRISDAWANKRAKLATSRDKPFTLKAPHWLKWNTATKKWDLVPERVAVLRRIFEMTADQGMGMAKVASILNAEGVPTFTGRTLSPGVTPGWQPATIGKILTARNVLGEFQPRRQVGPRKFKADSKTDVLTDYYPRVIGFDLWNRTQAVRAQNNRTGSGRKDGRVGNLFRGKVFCAACGSVTRTRYGKPLPNGTSYNYFICAANHRSAGTCTCKVWWDIDLIEQGVLAGIKYRQTFWETQAVENEQVKLLRKQIVGLADEHARKLRRFEMLGEMLADEESTSIRLAYRELSRELDTWDTRKAELEHQLAVARGTGTTGEIIAEAEALEALAKAADLPTRLTARNKLLVLMGNIIGRIELHDDRRAHVTLADGSLRFDVVKGEVQNVAHSVNGTWWHTMEDGQQAAE

SEQ ID NO: 8430 - protein, 563 aa, synthetic construct
MLILKGDERLTTEQIMGLIGKINAIIYVRVSTTDQAEKGYSLESQIERCKERALTKFKYKESELIALVEPGGMGDDPNRPALNHALYLLEKGLGKKFIVLHPDRLTRDNTLQGIVSRKIWGMGVDIEFIEFEVDPTNPESMLMYNIQGSIAQYNKAKINANSKRGRVAKAKKGEFPSFKRLFGYKFNKETDLPEYDEEERQVLLEMKDMLLNRDMSSNEIAKELSKRGVPAPDGDTWYQATVSRILKNEDYTGDFYYGKSKVVQINGESKQVPTPEEEWILIKIPPIWDHETRDQILSKLKENYKGRSRKTRDYLLKGKAKCGRCGSACGSGFTSKTKSGVYKYYSCRRKNAKAYQNGKKIIDCPGKNWRVDIVDDVFWKWFKKLLKNPTDFLEQFLSETSNEKKIEELQHKVKNLTKQIEEIDSEVSNYVILFGKGKINEDMFDKLTQPLEQKKEYIETELEIINSQINANKDVEDKNQKLKEYVSSFSEMVDKDLSMDEKRKFIDFFIEKVTLFDDDHMEIVWKGDGLNNNDDKVSLYNEGGAMKLNNSHKRLNHVQTYGR

SEQ ID NO: 8431 - protein, 506 aa, synthetic construct
MAEAEVRAVAYARYSSDNQREESIEAQLRAIKEYCEKNNIQLVKIYTDEAKSATTDDRPAFLQMIKDSSLGLFNAVIVHKLDRFARNRYDSAFYRRQLKKNGVKLISVLEQLDDSPESIILESVLEGMAEYYSKNLAREVMKGLKENAFQAKFNGGIPPLGYDIVNGEYVINEKEAEAVRLIFELYAQGYGYRYIIDELNLRGYKTKKGNSFSKNSIHEILKNEKYIGKYIFNKGTKKNHRIVKEDVIVIENAIPAIIDKDLFEQVQKKMEERKITRGANSAKRVYLLSGLVYCGLCGSKMVGCLSRGKYVTYRCSRKDRTKQCTNRDINKEKLETFVIEELNRRIFDPKVAPVLAKLLNEENQKLNKERVEEITLLKKRYKEIEEQMKNIVEAIAQGMFQPIMKEKMNELETLRNEIIYRLNELENKKETSFITPEMILKIFEKDREKINSSKNPQEIKEVLKNYIKKIIVTPDEIKCELYFWIGDDFRSLMVAASGFEPPTLRV

SEQ ID NO: 8432 - protein, 452 aa, synthetic construct
MKAAIYIRVSTQEQIENYSIQAQTEKLTALCRSKDWDVYDIFIDGGYSGSNMNRPALNEMLSKLHEIDAVVVYRLDRLSRSQRDTITLIEEYFLKNNVEFVSLSETLDTSSPFGRAMIGILSVFAQLERETIRDRMVMGKIKRIEAGLPLTTAKGRTFGYDVIDTKLYINEEEAKQLQMIYDIFEEEKSITSLQKRLKKLGFKVKSYSSYNNWLTNDLYCGYVSYADKVHTKGVHEPIISEEQFYRVQEIFSRMGKNPNMNRDSASLLNNLVVCGKCGFGFVHRRKDTVSRGKKYHYRYYSCKTYKHTHELEKCGNKIWRADKLEELIIDRVNNYSFASRNVDKEDELDSLNEKLKTEHAKKKRLFDLYISGSYEVSELDGMMADIDAQINYYEAQIEANEELKKNKKIQENLADLATVDFDSLEFREKQLYLKSLINKIYIDGEQVTIEWL

SEQ ID NO: 8433 - protein, 428 aa, synthetic construct
MSTDQDEQLSSYENQVSYYRDYILKHEDYELVDIYADEGISATNTKKREAFNRLIQDCREGKVDRILVKSISRFARNTLDCIKYVRELKELGIGVTFEKENIDSLDSKGEVLLTILSSLAQDESRSISENATWGIRKKFERGEVRVNTTKFMGYDKDENGKLVINPEQAEVVKHIYHQFLKGYSPESIAKELNTNGIKGWSGKANWYPSSILKMLQNEKYKGDALLQKTYTVDFLTKKRTENDGQVNQYYVTNNHEAIIDTEMWDTVQEELARRKDFREKHKLKTYIMQSDDNPFTTKVFCAECGSAFGRKNWTTSRGKRKVWQCNNRYKVKGQIGCQNNHIDEEMLEKAFMKAVELLQEHRADVVVKWQKLEKGTNLLHKHYAKQMYQLLDLEKFDGTIMNKVLDHISISEVGQIIVIFLEGTEVEL

SEQ ID NO: 8434 - protein, 413 aa, synthetic construct
MAVRLIKTKSNRKKQRVCAYTRVSTTNSSQLDSLENQKAYFENLYTNRVDVDFLGVYYDKGISGSKAERPSFQAMLEACRQGQIDLIHTKSISRFARNTMTVLEVSRELKVLGVGIYFEEQNINTLSNEGEVMLSVLASLAEEELQSMSDNQRWAFQRKFQRGEMVINTKRLMGYDVDDKGELVINEAEAQIVRRIFQLYLDGMGMHRIAKLLNQENVPTVTDAKWHDTTVRNILKNEKYKGTVLLQKYFHVGINGPKRLNQGQVEQYLIEDNHEPIVSKEVWQAVQDKLASKTWKQGVNKHYRFTSMLKCEYCGSTLKRQVTYKKQIVWCCSKYIKEGKASCRGMRVPEKAIEEWKLRTPVTVIERNEYGQKHYSYSSQESAADGHPSASNQNKSGSLLSGVHRPRRTAIKL

SEQ ID NO: 8435 - protein, 484 aa, synthetic construct
MNKVAIYVRVSTTMQAEEGYSIDEQIDKLTSYCKIKDWTVYDIYKDGGFSGGNIERPAMERLISDAERKKFDTVLVYKLDRLSRSQKDTLFLIEEVFGKNDISFLSLNESFDTSTAFGKAMIGILSVFAQLEREQIKERMLLGKIGRAKTGKAMMFSKVSFGYTYDKLKDELVVNQAESIIVRKIFEAYLGGLSLNKLRDYLNNNGIYRGDKPWNYQGLRRILSNPVYIGMIRYRGEIYPGNHQAIIDIDDYNKTQEEIKKRQITALEFSNNPRPFRAKYMLSGIAKCGYCGTPLRIILGSKRKDGSRNMRYQCINRFPRNTKGVTVYNDGKKCNSGFYEKADVEEFVINQIRDLQFNINKLDNLFDKHPSIDIKSIERQISSLDNKLKRLNDLYLNDMIDLEDLKKQTQLLRQQKTMLEDELLNNPAITQEKNKKYFKEFLATKDITKLDYETQKNIVNNLINKVFVKSGYIKIEWKIPFKKM

SEQ ID NO: 8436 - protein, 525 aa, synthetic construct
MVEKRVVTVIPASTNHNVGLTNNKVIKKKVAAYCRVSTDSEEQASSYDAQVEFYTNYINSRNDWEFAGIFADDGISGTNTKKRVEFNRMIQSCKDGKINMIITKSISRFARNTLDCLKYIRELKEYNVPVYFEKENINTMDSKGEVLLTIMASLAQQESESISKNVRMGIQYRYQKGEVRVNHSRFLGYTKDENKNLVIDHAEAEVVKRIFKEYLEGKSLNKIAKDLMKDNILTAANKPTWRGESIRKILLNEKYMGDALLQKTCTVDVLNKKRVVNNGLAPQYYVENSHEAIISKEMFQRVQQELKRRSKLHEQQKISRTAYNSKYALSSILECEKCGNYLRRVEHNSKGKHYVRWRCKTRITEGICKCNSESISEKELQNHIIRVINRMLGNRVNMLESLKNDIEEVIVLDSGSLSGIEKRIKDLQRELESCINQNTNYEHIILEIDELLSIKNNTQIQNNEQENFQNRLSEINDFIESQSTLIDEFDEDIVRKIITKVVVGDKSIEVVFKSGQSMKVKRLID

SEQ ID NO: 8437 - protein, 518 aa, synthetic construct
MKKIHPIKPLEIPLNHKVRVAAYARVSSNTEEQLSSLKAQKEHYERYINSNKDWEFVDVYFDEGISGTKLKNREGLNRLIDDCEKGLINLVLTKSISRFARNTVDCLKLVRKLLAYDVAVFFEKENIKTDDMDGELMLSILAELAANESKSISENEKWSIKNRFKNGTYIISYPPYGYCNNNGVMEIIPEEADVVKEIFSKTLMGFSTHSISADLNSRNIQTKRKKKWSAGTINGIIKNEKYTGDAIFQKTYTKDDFTRKHNKGEVDSYLVENHHEAIISKETYKKANEILEQRRLEKGNKAKGESANRYAMSGKIICGECKGTFKRRTHTKAKGRKYIAWCCGRHIEDKEQCSMKYVEEEAIKHAFIMMMNKLIFGRDYLLNPLKKQLAKLNSRSIDKQLEALQEKIVEKQIKLEETEKLFYGEYLDFKSYSRIKNQLLSDQERLNAQSNHLLSNDYNKKKSKMYLDKLIEFVQKSCYLAEFDDVVFSEFIENIEVINRTKVKFILKCGLALEERLD

SEQ ID NO: 8438 - protein, 509 aa, synthetic construct
MRRAISYIRFSSERQLKGDSVRRQSKLVTDWLDKNPEFYLDSSLSFKDLGKSAFSGKHLKGGLGDFLTAIEKGLVKAGDTLLIESLDRLSRQDIDIASELLRRILRAGVDVVTLSDGEHYTKESLKDPLSLIKSILIMQRAHEESLRKSERVQAAWNRKKELISEGIKISRRCPAWLKLNDDRRTFTIIPDKVEVVKRAFDLRLQGLSFWAITRTLNDEGHLSLNQYTPKQKGWSDTAVKKLLRNRAVIGCFTPAGREEVQGYYPAIISESLFYRVQQLNTGQYGRASVSSNPLSVNLFRGIIKCSECGATIVLGGYALKRFGMYRCPNRSANRCSAKAISRKQTDATILYMLALCDRFETENTDTIDSLKLQREDLQRKISKMAELAIELDDMTIITEKLRDMKNALSKLNHDIEEETKRIKAITTGSLKDIDRTTKEGMIETQLLIKGVLKEIVIDAAKRRCKVTFHNGKVIDLPITEDPSEDVTEAIQSLSEVTERGLIDVDEVII

SEQ ID NO: 8439 - protein, 508 aa, synthetic construct
MFFEEKNTEELIRYEDYPYAVYARVSSEKDSQTTSIQNQIDICHHWIEKNNYEWKDEAIQLDDGISGTILLDRKAMQLILNKAKNHKLKMVVFKSISRLARDLKDALDIKEVLLAHGVRVVTLEEGYDSLYEGKNSMKFEMFSMFAAQYPQTISVSASSALAAKARRGEHSGRVPYGYKKNGKFLEIYEEQAKVIRMIFDLYNNHGYGQKRVVHKLNEELLLGNIPKPQQNERWQLSTVQRILQNPIYCGVFIANRYTQVKIGGRKKFIRNPEEKWTIYKDWAPKIITLEDYEKANNKKHVLKKRRFNPKNELRGLMKCGVCGANMVILFSYRRRKKDGVKVEHNYVKCSAYRRGGKNMCISHPPIQYKDLREIVIEKLKEKGRKLKLNVKSDYEEKKKRRIRETKVQIEAAEKKHKRLLELFLEDQMISKAEFQAKRKEIEDQLEQLNDKLFLLEREEEESIDITNIKIAFSLLKKKDQDLYEAFHALIEKLVIHEDGTVDFHYKFQ

SEQ ID NO: 8440 - protein, 523 aa, synthetic construct
MKGENLQPAVIYARVSSVQQKTQGHGLESQETRCREFASYKGYRVVETFRDDASGSIVGRPGMIAMLAFLKKQKSPHVVIIDDISRLARSLEAHLQLRTAISSANGILQSPSIEFGEDSDSQLVENLLASVSQHQRQKNADQTKNRMRARVQGGYWCFPAPIGYRFERVSGHGKMLVRDEPLAGIVQEGLEGYASGRFQTQPEVMRFFQSRPEWPSKRRSTLTTERIREMLTRPTYAGYISIPEWGLNLVPARHEPLISFETFRAIERRMKAVANVPAKANLGEDFPLRGFITCGCCGHQLMSCWSTGRSAKYPYYLCMQKGCDAYGKSIKREQLEGDFAALLKELKPSVELMDLAAAMFRDLWDGRLAQAGQQAKSLESQLRKLDTSIEQLVDRVVETDSPALIKTYESRIQKMEAEKAELTEKVASCGRPLKSFDETFRTAMQFLANPCYLWESDRIEDKRAVLKLTFAERLAYTRGEGFRTAVTSSPFSFFLSLKGDEEGMVRPTGFEPVAFRLGIKRRR

SEQ ID NO: 8441 - protein, 543 aa, synthetic construct
MGKNGARVYSYLRFSDPRQATGSSADRQLAYASAWASKHGMELDATLTLRDEGLSAYHETHVKQGALGAFLRAVDEGRIPAGSVLIVEGLDRLSRAEPLLAQAQLGQIVNAGITVVTASDGREYNREGLKAEPMNLVYSLLVMIRAHEESDTKSKRVKAAVRRQCEAWVAGSYRGRIVSGKDPQWLAWDGDSWQFIPERVEAVRFALDAYRSGIGAARLVRLMHEKGMVLSDWGIAAQQVYRLVRLPALRGAKRISIDGEDFMLEDYYPRLLSDEEFSELETLVGQRYRRRGKDEIVGIVTGIGITRCGYCGTALVAQNLMQRVKADGSLEDGHRRLHCVSYSKNGGCNGGSCSSVPIERAVLAYCSDQMNLQRLLEPSSAGEDLRPRLVEAQKGVAEIERQLERVTDALLADDSGAAPLAFVRKARELEEDLERRRSAVRALEQELVAKSASAPAAGASKWAELAERAKSMADVDAREQARQLVMDTFETLVVYMRGVIPNPKGRYIDVMMKSRAGQTRWIRVDRRTGVWKEGADRPTTRRP

SEQ ID NO: 8442 - protein, 479 aa, synthetic construct
MKKVAIYCRVSTLNQAEDGYSIGEQQDKLSKYCDIMGWEVIETYTDAGFSGSNIERPAMKQLLKDAANHRFNTILVYKLDRLSRSTSDNLYLIKEIFKKNNIEFVSLNEKIDTSDAMGEFFFTLLAAVAEMERKTITERMVLGRIGRAKAGKTMSYQLPPFGYIRNKELDILEVVPHEAKIIKYIYSKYISGDSITKICHDLNDKGHIGKNVRWSHSSVKNALTNTVYIAKGKFKGEMYEQEHEKIIDENTFWIVQDEINKRQIRESQRTNNPRPFQAKYMLSGLMKCGYCGGHIRTVTGNKRLDGSKPVRYVCDRRSDYRKLMEPDEIKCKSGFYRRLDLEQYVIDYLADLPNDESELKEALSIGQTSEFDPTMLLTEIETINKKIDKENYLFRNDYIDEVELQRNVKNLVDTKKLLENQLQENNGDKINEQKRKRILDMLNTGNIREMNYEQQKKIVKSCISKILLTSEEITIEFNF

SEQ ID NO: 8443 - protein, 515 aa, synthetic construct
MKTAIYLRKSRADLEAEARGEGETLAKHRSTLLKIAKEMNLNVLSVREEIVSGESLVKRPEMLALLEEIEDNKYDVVLCMDMDRLGRGGMKEQGIILETFKRSNTKIMTPRKTYDLNDEWDEEYSEFEAFMARKELKIITRRMQRGRIASVEAGNYLGTHAPYGYDIHRLNKRERTLTINSEEASVVRMIFDWYANEDMGANAIRSKLNDLGYKSKLGNEWNPYSILDILKNNVYIGKVTWQKRKEVKQPDAVKRSCSRQDKSDWIIADGKHEPIIPESLFEQVQEKLNSRYHVPYNTNGIKNPLAGIIKCSKCGYSMVQRYPKNRKETMDCKHRGCENKSSYTELIEKRLLEALKEWYINYKADFEKHKQDDKLKETQVIQMNEAALRKLEKELVDVQKQKNNLHDLLERGVYTVDMFLERSNVVSDRITEITSTMENLKKEIKTEIKKEKVKKDTIPQVEHVLDLYFKTDDPKKKNSLLKSVLEKAVYKKEKWQRLDDFELVLYPKLPQDGDI

SEQ ID NO: 8444 - protein, 527 aa, synthetic construct
MPAVRAVTVIPPTINLHTHAPAVAAKKRRTAGYARVSTDSDEQFTSYEAQIDYYTRYIKSNQEWEFVSVYTDEGISGTNTKRRAGFNQMIADALAGKIDLIVTKSVSRFARNTVDSLITIRKLKEHGVEVYFEKENIWTFDSKGELLITIMSSLAQEESRSLSENITWGQRKRFSDGKVNLPYKQFLGYRKGPDGFPEVVEDDAKIVRRIYALFMEGKTSYAIAKALTADGIPTPSGKKKWGASVVESILTNEKYKGAALLQKCYTVDFLSKKRKVNEGEVQQYWIERSHQPIIQPHEFDVVQAEFARRKGMGLHYSGGGVFSSRLVCGDCGSYYGPKVWHSNSKYRRVVWQCNGKFSNEEKCRTPHLLEEDIKARFLAAFNQLLDGKDALLEDRRVMQDHLTNCSAIDAELDELLREIAVVTELTQRCIQENAGRAQSQEEYAERYNGYVARYEKAKARVDALQEQKKQRQTKVDLIGGFMFALHEREVGITEFENSLWLAVVQKATAYHDGRLVFTFQNGMEIEG

SEQ ID NO: 8445 - protein, 437 aa, synthetic construct
MERVIQKMGLKVPTQPKAERVAAYARVSSGKDAMLHSLSAQVSYYSSLIQNHPGWLYCGVYADEALTGTKENRENFQRLLAECRAGNIDLIITKSISRFARNTVVLLQTVRDLKSLGVDVYFEEQNIHSMSADGELMLTILASYAQEESLSASENQKWRIKKNFEEGMPWSGQVLGYKYVNGVYIVKPEEAEIVRSIFADYLSGMGVEAIMKKLNAQGKTSRNGHAWCRSSVRKVLGNYSYTGNLLLQTTFRENHITKKTLPNRGELPMYHAENTHEAIVSMEDYQAVQAEMARRSAKHNRTTRGPARYPFTSMIVCGTCGKGYRRKVTRTGPVWICSTFNIYGKAACSSKQIPEGTLEKVAAEVLVLDTFDAKALHDKITAIRAEGNNTLVFLFKDGTQIVKRWADRSRAESWTPEMRAAAREYARKGQVMRSCQQ

SEQ ID NO: 8446 - protein, 658 aa, synthetic construct
MNNRTAGDNRITALYERLSRDDELAGDSSSIANQKKMLEDYAKSNGYTNMVHFTDDGFSGGNFDRPGWKQMLSQIENGSIGTVIVKDMSRVGRDYLQVGFYTEVFFREKGVRFIAVSNGVDSTNNTSSEFAPFLNIMNEWYLRDCSRKITAVLRAKGKEGKPITSNPPYGYIKSPEDKNIWLVDEEAAEVVRKIFRLSIEGMGPWQIAKRLTEEKVEKPSYYQATRQRGNYQTMCDFETPYNWTGGSVARILERPEYMGDTVNFRSHKESYKDKKAVKNNSDEILVFQDTHEAVVDRRTWYMVQELRKTVRRIDTNGEGSLLTGKLYCADCGGKMHYRRGTTRAGRDWRGIPNGEVRHTSAGFNCSSYNSGRKQYKRICCSHSIKEDTIKQLILETIRYALKSVRMDEAAFIKNMRSASEIRDKSEVKKLKTDLSKKEKRFTDLDLLIKKVYEDNAMGKLPDRRYEMLSSDYEKEQQELEISMKEIREKLAQFEDDTDRTEEFLSLVHKYTDIQELTPAIVNEFVDRVLVHKIEEMDGDRMQEIEIFLNYIGRVELPAQELSEEEMAEEEKKRKRRQYRREYQKSYREKHRPEIRRVIEGAKEADRQKQIAAAEVSADGLMHTDGTEQVAAMVAGENKIIVESSLPTKEEARAKYGRK

SEQ ID NO: 8447 - protein, 572 aa, synthetic construct
MNEQKIVALYTRVSTGYQIDKDSLPFQKKELSAYCKHILHAEKMELFEDAGKSGKNTDRPAFLRMMKKIRAGEISHVVVYKIDRISRNLVDFSVMYDEFKKYRVTFISLNEQFDTSSAIGEAVLKIILVFAELERKLTSERVIGVMIDRAMSGKWNGARMPFGWKWNPETEFPEHDPIESENARTLYRVYDETHSTAKVRDYCYDNDIRTKRGGKWTTTTILNFLHNPMNKGDYRYNYRGSARGAKKPENEVIYIPGVFPPLVDPELWERVNAVIKENGAKSQTPHNPHIKKHVHVFAGGILKCSYCGASFQVSRLDKKRLNGFQPSLYVCTSRRTYRACDASGASDVIIGAFFFNYVRNLVQATKSRAKIGTPADLERILLSGDEFSRIRYIDPSDLDIIYQAIRGTIAPGSGVTYIPAPPDSDKKDVPELSGLRAEAARLSRALDRLKKAYLFDDDAMSEAEYLSTRSELTEQLTRINNKIADALTDESYSAAAELSFVNSASSFLLSYRLQGADHIVYSDFAASVDALVLKNFVNMIVDHITVKDGDPVEIVFKNGLRNRFVYQDDATV

SEQ ID NO: 8448 - protein, 557 aa, synthetic construct
MERTVAIYARVSTEHEAQLSALENQVQYYDDLLAKHPDWTLYERYIDEGITGTSVKKRQSFLRMMEDAEDRKFDLIITREVSRFARNTVDTLQQTRILKKYGVEVYFTEDNIWTMNDEDGELRLTIMATLAQNESKKTSIRVKAGQKVSFQNAVPYGTGNILGYDRVGKEFVINEEQAKTVRMIFDMYLDGMGLRQIQFALENAGRLTATGLKNWSCSTISRVLNNAFYCGTIVYRKEYVPDYLEQKKIKNHGEIENIVAEGTHTPIVTKEEYTRVRKKMDTKTQSVDNRGKRGKHASGDVWTKKLKCSCSGGSFNRRVWHRTSSGEPQYAYQCYRQISTGTIATRTKKGLSLEGICEAPMVPRWKLEVMAKVVFQNFWKDRTAVRLIAEEMLEKHIQDDRYINFEKEIKELKAKIAKTDKKYENLVDLRVNGEIDKAMFDLKKKELLEDKERLEKQLEGYQVDEDMSDEDYNRRLEVLKCGLENNFDFSVYDIPEEIIDDFVDEIIVYKDCFLWKLSMFGDETRMKLCVNKDKSVEIEKTPNVDTRCTGGNLKLMP

SEQ ID NO: 8449 - protein, 557 aa, synthetic construct
MLQPDKITALYCRLSQEDLQAGESGSIQNQKMILQKYAEEHHFLNTKFFIDDGVSGVSFEREGLQAMLHEVEAGHVGTVITKDLSRLGRNYLKTGELIEIIFPEYEVRYIAINDGVDTARDDNEFTPLRNWFNEFYARDTSKKIRAVKQAKAQKGERVNGECPYGYLIDPDDKNHLIPDPETAHVVKQIFALYVKGGRLCDIQKWLADNKVLTVGALRFQRTGQTRYHNASLIPYSWPDKTIYDMLARKEYLGHTITGKSYKVSYKSKKTKKNPEEKRYFFPNTHEALIDEETFELAQKRLATRHRPTKSEEIDLFSGLLFCGDCGYKMYLQQGVSIPERKHAYTCGNYRNRPRKMTQCSTHYIRKSVITELVLADMQRVLSFVKQHEKEFIKTATELGSQEALKTAAQEQKELSTAQTRLREIDTVFRKLYEDNALGKLSDEQFVFMTSGYEEEKKTLKEKIAVLDKQIQAAKEHNSDVKKFVQLVKRYTQIKELTYENVHEFIDRILIYELDRETNTRKIEIFYNFVGKVENTQEPIKNTSYFRQIGTDVDSIVV

SEQ ID NO: 8450 - protein, 695 aa, synthetic construct
MAQKKAALLIPAVIYARYSSSGQREESIEGQLRECHDFARRNGLTVVGEYVDKALTGRSDKRPDFQRMLRDCERGVFQAVICWKMDRFARNRYDSAMYKYKLKRNGVRIFYAKESIPEGPEGIILESVMEGYAEYYSENLSQNVKRGYYDSALELKTLGQTVLGLRKGPDGRFEIDPATAPIVRRIFEEYAAGERAKDIYTRLNDEGYRTSRGSLFNKNSLRRILQNEKYVGVYEFRDIRVENGIPAIVDRELFDRCQGMVEKHHRAPAADRATSFLLTAKLFCGHCGEPMTGDGGTGRSGRVYNYYTCNGRRVHKCQKERAQKEWIEQLVVDELVDLIHSDDFVNEVADRCMEFQQREKDQSALRALEARQKENEKAIQNMLAAIEAGIITPSTKSRLMELEAERGQIEKGIAQQLIAEPTLERDQVVYFLERFRDGDVTDEGYRAFLVDTFLNSVYLYDDDKLVLVLNYTGERCKVTLDLVEKAIEGDGLGGSCFAPSSALPDTVLFLLLTNHHSDRSEGCLPQNIGTLAKPFFVSALKEKIRELKNGAAEPKTDNHEGNSLEGFRLLAAEDNEINAEILSEILKMEGASYEIVENGQLAVERFEHSAEGEFHAILMDVQMPVMNGYQAAMAIRAMSRKDAAQIPIIAMTANAFAEDEKAALDAGMNAHVAKPLDIELAKKVIREYCMKGTTS

SEQ ID NO: 8451 - protein, 530 aa, synthetic construct
LYARLSQEDTLEGDSNSIVNQKALLSKYAADNGFSNPIFFIDDGVSGVTFDRPNFNRMIAEIEAGNVATVIVKDMSRLGRDYLKVGYYTEIFFVERDVRYIAINDGVDSAKGDNDFTPFRNLFNDFYAKDTSKKVRAIKRAQGQAGEHLTKPPYGYIVSPTDKKQWIVDEEAAAVVKRIFDLCIGGKGPMQIAKILKEDKVLTAKAHYAKKKGKAFSENPYDWRDSTIVGILERMDYCGHTVNFKSYSKSHKLKKRIPTTKEQQAIFFNTHEAIVEDAVFERVQELRANKRRPTKAERQGLFSGLVYCADCGSKLHFATCRSFNGSQDHYRCAKYKSNTGSCTAHFIREEVLKQIVWSRIFDVTALFFDDIMAFHEMMYAQRSAETEKEMKRRKREVGQAKKRIVELDRIFKRIYEDDISGAISHDRFLKLSAEYEAEQRELEEKVKADQQEVDTYEQNKSDFDSFAAIIRKYVGIKELTPTIVNEFIKKIIVHAPEKVDGKRVQKVDIVFNFVGELNFLSATQPRRQGA

SEQ ID NO: 8452 - protein, 593 aa, synthetic construct
MEVEIIKANNPFDESSKVRKVDRLRVAAYCRVSTDDEDQIKSYNSMVKYYTELIQNNAQWVFAGVYADKAITGTKVDKREDFQRLIQDCMDGKIDMVIAKSLPRFARNTLDTLKYVRMLKERKIAVYFEVEKINTLKDGEFLMTILSSVAQQEVENTSAYVKKGLKMKMKRGELVGFQGCLGYDYDVTTKSLSINEEGAETVRYIFDRYVAGAGSSMIARELNEQGTTTIRGNAWTSSSVMGIINNEKYKGDILLGKTFTVDPISKRRLENLGEEDRFYVKDHHEPIISAETFDRAQEIRERRNGGRKSVTPGKREKYSRQYAFSCLLECGFCGANLSRRRWHSSSKYKKTIWQCVKSTKDGKRFCPDSKGIPEQVIEEAFIESYKMLCADNKDVLDEFISRVEKTLSEDSAKDKLLKLQKSADNLQAKRKKLLENYLEGIVAQDIYEETDVGYERKLSDIKANLTVLERQMEDEVSLKRRIADFKKALSKNGVLEEFDRGIFESIIEKVIVGGYDEDGNKDPYKITFIYKTGFRNEIGNAKERFDKSKSIGDKAKELCSHIVDEVKDVCSYVSDNTCGDGSPIIPQKRYTED

SEQ ID NO: 8453 - protein, 671 aa, synthetic construct
MYDNMLSKRKGKKCVIYIRVSSERQVKGYSLDGQKNYLTQWAEFEGMEVVEIYVEEGRSGKSIEGRNAFQTMLHDIEIGNISIDYIIVFKLSRFGRNAKDILNSLTFIQRFGVNLLCKEDGLDSSSSMGKMMITILGAVAEMERENIIAQSMLGREEKAKQGGWNGGFAPYGYELIDGKLIPKEGEAEIITLIFDKFVNGNMGYSTIAGYLNKQGIERLPAKNSHGRKYTDWDSNQVKRILDNPLYTGRMAYGRRRTEKVDGTENEYRLVNKDEYILTESRSHEPLVDDDTYKKAREKRKATGKKGNPKIGREAVHLLSGILKCPKCGSSMFIDKSIWTDKNGKRKEILYYVCGHSKKSKHGNCTRNSVRADVIEREVLYYTKKLIKNPRFVEDIQSRIGTSIDISEIEKELQYYKKNLEKLERSKNNLSVDIDNIVESDKHAERKRLDMNKRLNKIYDDIYDVEESIIECEAKMDNIQREKLDRDGIYKMLLAFDDIFDTLNEADKRNLIKSMVSKIDVFSAEEAKERKYVLKSITYAFPMDREIVKSLTENEPHVETVVMLSHKKPDSVINVKVEFGEGEGKVPLDNIAKRAEAYKPKERVTYKMIKEYIEAKYGFKVHTAYIAEVKRDLGLPMYDAPNAVEELKQPRKHPTAEKAEAIKDALKHFEVI

SEQ ID NO: 8454 - protein, 552 aa, synthetic construct
MRYRDEDWLEMETDNTAGGRPRKAYSYIRFSTPEQGKGDSFRRQHELAKRYAQQHGLELDETLTFHDVGRSGYRGANYKAGRLAVFLEAVTAGHVEPGSVLLVEQLDRISRMDPLDAIDVLRDIVRHGVTVVTISDGREYTRESLKKDFTSLIMAVVLFMRANEESRTKSERGSAAWGNKMAQIGSKPLTSMTPAWIALDDATGKLELIEERAAVVRRIFEMAIGGTGVEAIANTFNAEGVDTWGRGKRKAKMWHRSYIARILKNPAAIGEITLHRTAHDEEGVMSRVPQETVRDYYPPVVSEEIFREANAAKAARGDRVRAPRALFPTQNLLAGLTACPKCGGSMVRVMKGKRSYPSLVCSMAKAGKACEYRSVRYALIEERLLRDLPARLRQREGLDATDGDLAVRIAETEDRLSHVSDDIGRLVDDLAAEDDENVRRILRQKLRQLAEARKDQSEELERLRKLNVAADHTIIAARVDRAIEALNKTNGEIDRAAANQALRTLFSRVIVNSPDGTLDFEWKAGGLCRITYAILFDVQASSNHESNSEQAS

SEQ ID NO: 8455 - protein, 529 aa, synthetic construct
MKTADLYIRVSTDEQADKGYSQRDQEERLKRYCHYSGIQVRHVIFEDFSAKSFKRPAWQNLLITLKKQPNKTQFVLFTKWDRFSRNAGDAYQMINILKHLNVEPQAIEQPLDLSIPENKIMLAVYLASPEVENDRRALNTFNGMRRAVKEGRLMGCAPKGYLNKITEDGRKYIAVDQTLAPIIKAAFEEIARGRYTVSDIWRKAVDDGLNCAQNSFWKMIHNPVYCGRILVKAYKDEPEQIVEGKHEAIVSVTTFNKIQELINGKSASRTTFVASDEIPLRGFLICPLCGRHLTASASKSKTGRRYHYYHCYKKCTFRHRADHTNELFVQQLSRYIVNTSAAEVFRKKVEREFAKPSAGNHKSEIQTLSAQVAEANEKIKKARESYLSGAFDEVDFKEVKLSNEKKVLHLEDRIFELLRNRETVDHNKMIDNILRLFNRLVEYYKFMGSEGKRDLLSSMYPEKIVFDGAEVRTPRINEVVARMYQINSGLDVKKERLSEKKSRQPLKVTPQGLLTQTKAKKGKIKNIDL

SEQ ID NO: 8456 - protein, 539 aa, synthetic construct
MAKIGARVYSYLRFSDPRQGSGGSADRQLLYAQRWAADKGLELDESLSMRDEGLSAYHQRHVTQGALGVFLRAIEDGRIASGSVLVVEGLDRLSRAEPIQAQAQLAQIINAGITVVTASDGKEYNRAGLKAQPMDLVYSLLVMIRAHEESDTKSKRVKASILRLCQAWQSGTYRGLIRNGKDPQWLRWTGSAWEMIPERVLAVRRALALYQEGMGAARATKILHAEGLDYSASGISKQQIYRLIKLQALRGAKCLSVDGEDFILEDYYPRLLSESEWADLQHLAGQRLRRRGHGEIPGIITGIGLTYCGYCGTALVGQNMMTRQRADGTIADGHRRLHCVSYGVNGGCTAGGSCSVVPVERALLTFCSDQLNLQRLLKVGDDGQGIREQLAVARSTVEKLSVQLGRITAALLADDSGAAPTAFIRRARELEAEQADAHKKVQQLEYELATVSGSGKPAQAERWVELADLVRSGDYSAREKVRQLVMDTFERIVVFMRGMSAEDRSGKFIDVQLLSRTGQQRLLQINRRTGAWVASEDWD

SEQ ID NO: 8457 - protein, 539 aa, synthetic construct
MAKIGARVYSYLRFSDPRQGSGSSADRQLQYAQRWAADKGLALDESLSLRDEGLSAYHQRHVTQGALGVFLRAIEDGRIASGSILVVEGLDRLSRAEPIQAQAQLAQIINAGITVVTASDGREYNRAGLKAQPMDLVYSLLVMIRAHEESDTKSKRVKASILRLCQAWQSGTYRGLIRNGKDPQWLKWTGSAWEMLPDRVLTVRRALALYQEGLGAARAVRVLHEEGLDYSDAGITKQQIYRLIKLQALRGAKCLSVDGEDFVLEDYYPRLISESEWADLQHLAGQRLRRRGHGEIPGIITGIGLTYCGYCGTALVGQNMMTRQKADGTIADGHRRLHCVSYGVNGGCKAGGSCSVVPIERALLNFCSDQLNLQRLLKVGDDGQGLRHQLVIARSAVEKFSVQLGKITDALLADDSGTAPTAFIRRARELESQQADAQKKVLQLEYELAAVSGSGRPAQAERWVELADLVRAGDYPAREKVRQLVMDTFERIVVFMRGMGAEDRSNKFIDVQLLSRTGQHRLLQINRKTGAWVASEDWD

SEQ ID NO: 8458 - protein, 556 aa, synthetic construct
MSGNVYSYMRWSTDRQSDGSTEERQRASQEAFCKHFGMTLVEELTDPGMSSYRGKNAHEGKLREVINRAKAGDIPPGSLLLFENADRMTRMALAHAVPLFFEILGAGLRIGIADRLQIYTPGTLDLGGLMTVLVDMERANKESMRKSDFARNGWKKNHARMELGEIVTDKCPQWLDVLKRQFVVREDIADQIRALFHASLQYGVAESCRRVNEQFGSSWKVHQVQYLLKNRRLIGEHTITNFNEAAGKNVATDRVLTDYYPIIVEKNLFTEVQAIVAKRKPFAGKQDSSNLNIYRGLVKCKACGGSVRFMFKTGKEYFHCTASMTNSCTEPGIRSIRGEYLRRLLFKFEHWTNLKNYFMEASEDLKTLRRERDALLTQVGKIATRTSQTQQRLMDEDDTDRQSVLLDVLTKAKGDDRDTRAKLATAENALSELEDAFSIGGLEVGDRMEWLLNDRSEPAALERARINRYLSNIFEKLVIDFTGRTLTTEVKPAFKGKVTEFQAGISSPPDRRMKVPAGAKMIIGTPRGAPSPITEDVPPPSGLVWIAPSELLPTKG

SEQ ID NO: 8459 - protein, 652 aa, synthetic construct
MAVECIETQPETDVTALIYCRVSSVKQRVEGSGLQSQEQRCRKFAEENGWDVEMVFPDDVSGGGDFMDRPGMRAMLAYLDAKKGQPYVVIFDDLKRFARDTEFHLKLRRELATRGARVKCLNFEFQDTPEGRFFEVMMAAAGQMEREQIARQNSQKSRARVELGYWVFRAPVGYKYVPDKERGGKRLVPDEPLASVVRQALEGYASGHFGSQAEVQRFLEADPYFPKDKKDGTLRPMTVTRLLKKVVYAGYVEAPKWGISVRKGKHEGLISFETHQQILDTIEGKKRRPAARKDFNQDFPLRGHVLCDCCGNAMTAAWSKGKYKHYPYYFCVTRGCEAKSKTVPRTKIEDGFAEIMKKLQPASSLFKVAKAMLCDAWDMRLAEAKAAKDELGRQLKAIEAQIDQLLDRVIEATNPSVVKRYESKIDELERQRIILNERRDKILPPKGRLEDCIELTLRFLSSPWYLYENGSYALRQTVLRLAFAEPLRYSPEGVYRTPTFTFPFKVLAGINSPKSEMVRSARLELARELPHSDLNAARLPIPPRAHVISGRPRLNTRGIRGCEGQKSAIDHVVPPRRFRPIIARVTIVRTPSTTTAPPTSGVSGKTTRLIRRPGSNVKSPAIPNDCQYSSRIVRLCLAGSRRRAACTPRQSV

SEQ ID NO: 8460 - protein, 462 aa, synthetic construct
MKRAGIYIRVSTQEQANEGYSIGAQTDRLTKYVEAKEYKLYKKYVDAGYSGSKIDRPAMKELIEDVCNNTLDVIIVYKLDRLSRSQKDTMYLIEDIFRPNNVELISMQESFDTSTAFGNATVGMLSVFAQLERKSISERMITGRVERAKKGMYHTGGQSRPPAGYEFQNKKLVVNEYEAAAIRDLFRLFNEGLGRRSISDYLQKNYPGRNKWLPCSIDRMLKNNLYIGKVKFSGESFEGIHKPIIDDVTFFKTQKEIKKRKANNSQKYDYVALLGGLCECGICGAKMANRRSVGRKGKVYRYYRCYSKKGSPKHMMKISDCPSSAQQQDFIDEAVITKLKTLDIDSEIKKRTTPKVNNESIEKQIENINNQINKLIELFQVDSIPMEVLTKKIDKLNLEKESMKALIDKSQTVNINEFRSRLKVLENFDWDNSEKSEKRKIIEMLIHKVIVYETHIEIILIE

SEQ ID NO: 8461 - protein, 565 aa, synthetic construct
MNTSNNLELFQQWSKRPVLQYRKTTTTKQCVVYTRVSSKEQYDTNLSLDWQRKAIEEYANRNDFQVVSYFGGTFESAKTDGRKEFQSMMEFIRKNKEKITHILVYLLDRFSRTGDGAMRLAKELREKYGVTIIAVTQPIDTSNPGGVFQQNLQFLFSQYDNELRRQRAMAGIRENLERGIWCKRPPMGYTIVKEGKERKIIVNAIGKKLRKAFEWKISGMKNDEILSKLQAMGLKMYKQKLSAVFSNPFYCGILADKMLNGKLVEGQQEKLISHETFLLVNNIRAAAKGKYGVTHKKENEEYPLKVFMQCDGCGRGYTGYVVKKKNKRNEREYHFHYYKCRSRGCCCNRQTQLVNDQFKAYLEGYMIKPEMIAPILYQMNYAFDQYFDNQEKNLQTLEDRIGEVDKKIANLEDEHYIEKKIPEATFHRLLTKLEEEKKQIREEMVPANFDSSNLKKYFEVGLKLSTKLAPTWHSSPVAIKEKIQKAIFPKGIVYNFKKGTFLTNEVNPVFACIADLAAITADPKNKQGSISAALSRLVGWTGFEPATPCTPYKCATGLRHHPNDD

SEQ ID NO: 8462 - protein, 557 aa, synthetic construct
MQKKAVLYTRISTNKIEQKKSLVNQEERYTEYCKAMGYELTDIYADEGLTGTNARRVKFKEMLLDAGLTYTRNDMGYDYFTPDKKAIPKFSVIICKDVSRFSRGSIQGQMIVKLLKDKGVDIIFENSGMSTFDDNWEFNLGILFQIAQSESANMSKRIKFAKQHNARSGKYAPARLAFGYMRNEENEIVIDEEQAETVKYIYERYLDVGGSIISQELNEKGILSQTGKRWTDDKVTRVIHNRIYTGTAVVGKSFKKSVTDTQRSKTTSDKYIEIPNAVEPIISLGKYEGANLIREQRMNINKKLGRKPARNDIYNEKLYCSCGSRFVRHTGNGGKITYICQNRRKRLGCMVRGISITNLNKRLAEVELKYLSNAMGDSFYYKELLNLLDKQKLQLANTKNDINKRIENLNEEIEKITDQYISLDESNKIKARLIKRVNDKENEINQFNKQLEKLNIESIEHIQIRVEEKKEMINLITTSKSLVAEDKLKLLHKVEIGDYDLNFHFAVPSFEEEVDLYNKLFPMNPISLTIPFKPFSESFRRDHKAAKEYWDLSNEKR

SEQ ID NO: 8463 - protein, 644 aa, synthetic construct
MLRPICYERVSSIQQIEGGGGLDDQRSALEGYLDRNSDKFSNDRIFIQNRGVSAFKNSNISSESQLGIFLQDVQNRKYGEGDALIVMSLDRISRRSSWAEDTIRFIVNSGIEVHDISASTVLRKDDPHSKLIMELIQMRSHNESLMKSVRAKAAWDRKIIEAVQNGTVISNKMPMWLKNVDNRYQVIQEKADLIIRCFEWYRDGFSTGEIVKRIADPKWQMVTVSRLVRDRRLLGEHKRYNDEIIHNVYPKVIDDDLFLTANRMMDRVMLEKNKPAEDLLLESDVVQEIFQLYESGLGSGAIVKRLPKGWSTVNVLRVLRDKNVVTQKIIDNLTFERVNQKLSMNGVANRIRKDITIAQDDYITNLFPKILKCGCCGGNIAIHYNHVRTKYVICRNREERKICDAKSIQYIRIEKNILKCVKNVDFQKLMIESTGSETSVLDGLREELSSLRREESSYNDKINERKLAGKRVGIHLNDGLTEVQDRIEEIEKEIISAQTVREIPKFDFDMDEVLDPMNIELRAKVRKQLRLVLKAVKYWMFDKRIFIQLEYFNDVLSHMLVIDNKRGGGEVMYEMSIEEKKGERIYTVHENGYAVFIASVTIGTELWSLALSRTRTIDSVGNYLSLLAREGFEIFVNEDQIDWF

SEQ ID NO: 8464 - protein, 534 aa, synthetic construct
MTEEKKRFAVTYQRFSSERQVGNSSLDRQTDSQREWLRQNPDVTVIDSFVDEAMSGWSGKHLEDGSLGQLMKAIEDGIIQPDTLILVEHFSRLTRQNIDNAEELIKRIWKAGITVVTVRDNTEYTPSAVNDMALRIRLIVEMEQAFKESEWRSAKVKASYKRREKLAREEGKVPKIRKPFWLNPDGTLNHLHYAVKDMFNWYMNGLGQQRIVVKLREKYPDSAIQKINPSTVMRWIQADIVRGYWRGNRVYEAAIDDQLFFDVQHIHSSRLYKNVNPDRKWPLSGLMQCGVCGRGMSIQKSGDSNPVVRCSSKQRDRSCNRKTTFPYFIVHMYMMFCILPKALRRHTSKTSNLELQLELSKVERDLTKAKNKYKTETEFYDKCDAEGKSTLMILEMMNKSHQTILDLEEKHKQINHSLKHQSENMISEASSDLVITGENFNLEMHKLGFKIIVNETTLSASGFEDNVEKMTYLGYCRKTHNYKFKYLDQNNIVEYPSKSVTQDFLMMKDFIQTFGSKERYQEMIMNTNDPDYGD

SEQ ID NO: 8465 - protein, 452 aa, synthetic construct
MKAAIYIRVSTQEQIENYSIQAQTEKLTALCRSKDWDVYDIFIDGGYSGSNMKRPALNEMLSKLHEIDAVVVYRLDRLSRSQRDTITLIEEYFLKNNVEFVSLSETLDTSSPFGRAMIGILSVFAQLERETIRDRMVMGKIKRIESGLPLTTAKGRTFGYDVVDTKLYINEEEAKQLQMIYDIFEEEKSITFLQKRLKKLGFKVKSYSSYNNWLTNDLYCGYVSYKDKVHTKGIHEPIISEEQFYRVQEIFSRMGKNPNMNKESASLLNNLVVCSKCGLSFVHRRKDTVSRGKKYHYRYYSCKTYKHTHELEKCGNKIWRADKLEELIIDRVNNYSFASRNVDKEDELDNLNEKLKTEHTKKKRLFDLYISGSYEVSELDAMMADIDAQINYYEAQIEANEELKKNKQIQENLADLATVDFDSLEFREKQLYLKSLINKIYIDGEQVTIEWL

SEQ ID NO: 8466 - protein, 558 aa, synthetic construct
MNREGKKCVLYPRVSTEMQVDGYSLEGQKNSLKRFADREEMEVVGIYEDAGKSGKSIEGRPAFKKMLSDIKNGLEIEYILVYKLSRFGRNAADILNSLEFVQSYGINLICIEEGIDSSQTSGKLLISVLSAVAEIERENIIEQTMNGRREKARQGGWNGGFAPYGYYLKDNHLLIEEKEAEAIRIIFDKFGNSDIGLGGVAKYLNLQGIKKIPRQNGKLETWSNHLIRQILDNPVYCGKIAYGRRTREKVKGTKNEYKQVHTDDYILEDGQHEGIVSEELWQKVHAKRLATGIKQPSRIGKERSHLLTGVLKCPLCGSSMYTNKHAWTNKDGTYKEVYYYICGRNKQERGRHCDYKASLRKIDIEPLVVEAVKELVSDAYFAKEIEKRIGVQTDTSVVDKELANYENKLKEVDLNKARLENEIDNLPVDARFRERKIHDMTLRLDALYDTMVELEERIEDAKLRKSSIEMEAITLDNVYKIMQNFGKLYAIMSDEEKKSFITYLIKEIQIYPSGESKMPLKSIEFNFPIYIDGKEVRKVLWERGNTVETVCLMSRKEK

SEQ ID NO: 8467 - protein, 543 aa, synthetic construct
MLSVGLRKNGARVYSYLRFSDPRQAIGSSADRQLQYAQKWAADRGLVLDESLSLRDEGLSAYHQQHVKQGALGAFLKAVDEGRIPSGSVLIVEGLDRLSRAEPIQAQAQLAQIINAGITVVTASDGREYNRAGLKAQPMDLVYSLLVMIRAHEESDTKSKRVKASIRRLCEGWKAGTYRGLIRNGRDPQWLSWDGEAWQLVPERVEAVRFALDLYRQGEGATRAVRKMAERGYELTALGLAGQQIYRLVKQPALRGAKRISVDGEDYLLEDYYPALLTDDEFHQLQASTEQRRGRRGGSDIVGLVTGLGITWCGYCGTAVVAQNLLSRARADGTLADGHRRLHCTSDSNGTGCKAASCSVVPVEKALLAYCSDQMNLTRLMEPTDDGQQLRQRLNVCLQRQGEVERQLARVTEALLADDQGAAPLAFVRKARELEAELQQLHAEAEQLEREQAVQGKGQTPAAAEQWAQLAAESQDIYSPAREQLRQLVLDTFNRIVVYMRGVVPDPKSKTIAVLLVSRAGQRVMLEVDRRTGAWKASRARRD

SEQ ID NO: 8468 - protein, 540 aa, synthetic construct
MRKAAIYARFSTELQSPRSIDDQIALCSKFAQANGFQVVGTYNDKAKSGSSMLERDGLLRLLNDAKNGQFDAVIVEALDRVSRDQEDMAAIYKRLKFLGIDIIAVHDGKADTIQIGIRGLIGAIYLEDLKHKVRRGMSGRVRDGLSAGGKAYGYKPVLGKPGELVIDEEEAVVVRRVFREYADGKNPREIALGLNRDGFKPPRGLVWNPSTLIGSKKRTNGILRNPLYGGVLIWNRVTMVRDPETGKRVSRNNPESEWQRKDVPELRIVDEETAAMVAARVEERTFETTIERSPKRPRMLSGLLKCGKCGGGMTLDGYNNGKPRIRCVRTRETGTCDHTRKYQVEAIEFSVVEAMREQLSDPDLLKAYIDSYIQERRRLATEINRNRATIERNLAKAQGELDRMLTLCIKGLMTDEEFGERRGVLDEEIAHLKADLLVAPTVDNVELHPAAIENYKKDMDELSARLAEFQKEPHSALVSSLRKVVAEVTVYPSPSNMTPIIEVKGWLASLIGEDVENGYRPKWANKVVAEEGFEPPTQGL

SEQ ID NO: 8469 - protein, 509 aa, synthetic construct
MKKAIAYMRFSSAVQEKGDSLRRQRKLIDDWLSQNQEFTLDTTTYEDLGLSAFKGKHAQSGAFGEFIDAIDNGLIMPGTVLLVESLDRLSREKIGEATERLKYILKSGVDVITLSDSTHYSEESLDDPYALIKAILISQRANEESEIKSSRVKLSWQKKREDAELTGKIMTRACPRWLKVSADYSRFEVIESRVKVIKKIFALRKANKSLTAIAKYLNDKSVENLSGRRGEWCPSVIEKLLGNKALIGICMPTHRGRAKGVKEIPGYYPKVLSDEEFYSVQEVRLSPFGFTSHSDNPYLINLLRTVMKCRHCGNTMVITSVSETIKGYYVCPMRRLHRCTTPAVRRELVDAIIIDEILVNLDRLQIETNQMSYLSTLEKSCIDLQLQINQLVQALAIAPDVKILADKIRDLDCQLRKNETAIKVLRNKARLDKGCDIKNLDLTLKEDRELCRRLAFKAFREINIDTLTQQCDIYFSNGLIFKNFPTGKKNHIENVISALKYIDKNTVYF

SEQ ID NO: 8470 - protein, 542 aa, synthetic construct
MNAQVYSYQRFSSPLQEKGTSLKRQTDYAIEVADRHGLRLNKDLVMTDKGLSAFHAEHVAKGALGIFIKAVEKGIVKAGSILIVESLDRLSRQTPWQAQTQFNELIGKGITIITANDDQVYNMKTLSKDPSKMFISIGVMMRAHEESLSKQKRSVKYIHKKIDDFEKNGKGDIAGSVPFWITRTKSGFELNKSSNTVKKIIEMYLNNTGLNLIARDLTLSKVKTPTEKNNSWGVTTIRKILDSKALYGCNSFKLSYLIDGSKISENHELKNYYPPIISEEYYNLIQERKKKKASSRESYKNSVYLLTSYGKGRSICAVCGQALGSQLQKQMNRKKEYTKSVLRLHCTKNKETSDCCSSVKSDELELHFIHAVMTNVENQLFESPRDNKDSIEAVQATIDKQEEKISALMSEFGESNISSIRKIAQKQIIEASKILEIKEKELENLKRKNSHEKIDEEQQKKIQSLAMKAQDFKNTNERSKLKQILMQSIKRIRIDLKTLELEAIFFNGRVLSILRKDGKFISNVYINDKNDNNIYRKLNNIE

SEQ ID NO: 8471 - protein, 507 aa, synthetic construct
MKRVISYIRFSSEKQAKGDSLRRQSKMVNDWLKAHPEYYLDQDLSFRDLGVSGFTGKHLKGGLGDFLTAIEKGLVKAGDTLLIESLDRLSRQAVDRASELLRNILRSGVDVVTLSDGEHYTRESLKDPLSLIKSILIMQRAHEESLRKAERIQAAWDAKKEAAKAGIKISRRCPAWLKLNDDRKSFSVIPEKVETVKRCFQLRLEGKSIWEIVRTLNAEGHQSMSQYKPGKFGQTSVQDLLKNRSVIGYFTPKGCEEISGYYPAIIDETTFYKVQQLSYARYGRKPASDKPMAVNLFKGVIRCSECGHALIITGFSDTRNGIYRCPLRNENRCSAKGLSRKQTDGTLLALLSRLDRFDSDMTNVIDTLKLHREHISSNIEKLVQLSLEIEDLSAITSKLRQLKNELSQVDADIEKETQRLKSIDAGCLSDCDLTTKAGRIEAQLIIKSAVKEVVLNTAKRRCKVTFHNGKIIDLPITENPSEDVTEAIQSLSEVTERGLIDVDVVEI

SEQ ID NO: 8472 - protein, 688 aa, synthetic construct
MNPKITPQHLSKPAYIYIRQSTQAQVLHHQESTERQYALKDKALALGWTETAIRTLDRDLGHSGAQMTGREDFKTLVADVSMGQVGAVFALEVSRLARSNLDWHRLLELCALTHTLVIDSDGCYDPGDFNDGLLLGLKGTMAQAELHFLRGRLQGGKLNKAQKGELRFPLPVGLCYDDEGRIVLDPDDEVRGAVQLVFRLFRETGSAYAVVKRFAEDGLRFPKRAYGGAWAGKLIWGQLSHGRVLGLIRNPSYAGVYVFGRYQYRQRITPQGEVLKRVQPVPKADWRVHLPGHHEGYITPEELEQNQARLARNRTNGEGTVLSGPAREGLALLQGLLVCARCGRAITVRYQSHGGIRPIYLCSRQRQQGLATKDCVHVRGDLLDNAIGEAVLTALRPAELKLAVTALKELEQRDLAIMRQWHMRIERAEYEAALAERRYQECDPANRLVAGTLERRWNDALLRLESISTEATQFQSQKARVVTAEQKAQVLALARDLPRLWRAPTTPAKERKRMLRLLIKDITVEKLLDQRQLVLHVRWQGGACTDITVDLPRPAPEAIRCPAELVEQVRRLSQQLSDLQIVAHLNQEGLRSPHGKPFTLAMIKWIRYKYAIPATCLMRPDELTVQQLAARLRVSMHVVYYWIERRIVEARKLDDRRGWWIALDITKEQELRDRVRTSGHLKPQHSNI

SEQ ID NO: 8473 - protein, 689 aa, synthetic construct
MSDKIRVQHLARKAVLYVRQSSAYQVSHNLESQKLQYAMQDRLRQLGWKEVEVIDEDLGCSAAGTQTRTGFERMVAEVCLGRVGAVAAREVSRFARNSREWQKLVEVCRVVDTVLIDQETIYAPRLSNDRLLLGLKGSLNEYELDLLRQRSLEARREKARRGELVIIAPVGYRKTEDQRLEKDPDLRVQEAIRSVFRQFLAIGSVRQTLLWFLEHGLQLPAYTPRGEIHWKRPYYGTVYQILTNPVYGGAYAYGKTECTVHYEAGEPRKRDRRKPRDQWLALIPNAHDGYVDWDEFERIQRAIHANVRLGGHAGAPKNGEALVAGLLRCRRCASKLTLHYTGNRHDALRYTCHRAWLDKGQPRCIAFGGTRVDAAIAQAVLRVVQPAAIEAAIVAREEEIHKHDEVLSALQRDLQAARYTAQRAQKQYDAADPENRLVADELERRWNDALMRVEELESRIEQHSHASGQIPPVQHDEFNNLAAALELIWPQADARLKKRIVRTLIHEVVVDLDDATSEIVLVIHWKGGVHTEIRVPRRRRGQCATQTSPEAVDAVRLLARICPDLVIASVLNRNGLRTGRGNFWTQERVTALRSHHRIPVYSSERRAAEGWMNLSEASALIGVSPKTLRLAVERGEIAAEHPLSLGPWIFNRDSLNTSAVAEFVARTRARRAHPTIPTTQQGSLDLSTT

SEQ ID NO: 8474 - protein, 484 aa, synthetic construct
MKATARARRAGLYIRISDDREGAGLGVKRQSDDCHELAERLGWKIVETYDDNDMSATNRRKKRKGYARLLADIESGHVDAVLAWHPDRLYRQPRELEDLIDLIEANEVDIKTYTAGDLDLSTPTGRMHARMLGAVAKYETEHKAERIKRKVKELVESGAIHNGGHRPFGYERIFEGTGPRRKVIEDRINEAEAKYIRDWARRALEGESLYSLVTDANSRGITTSTGGAWSYQGMKFLLSSGRIAGLKEHKRQVVGKAVWPAIIDEEDHKALRTLLSDRAEQAKANGAQQSSTALKYPLSGLVRCTCTEDGIRMKTSPSSNRKGPVYRCPPKGDGGCGGRTIRIEDLERLMEKLLFAKLEEIEPLDEADPDDPRPALEAKVVKWERRVAELKEELLDGDRPAREIQEAIDTLNSRIAQAHRESAEYGIKGRVLEVSAEELRKAWEDYLPARKQSVYRSLVKEIRIHPATPPKNVWNPGRAEVFWR

SEQ ID NO: 8475 - protein, 647 aa, synthetic construct
MLRPICYERVSSLQQVSAGGGLDDQRSSLEAYLDNNSDKFSPERIFIQDMGLSAFRNSNISPESQLGVFLQDVQNRKYGQGDALIVMSLDRISRRSSWSEDTIRFIVNSGVEVHDISASTVLRKDDAHSKLIMELIQMRSHNESLMKSLRARAAWERKITEAIRSGDVISSRMPVWLKNDNGKYGINEEKVELIRSCFRMYANGMSTGEIVKHHKEHKLQMVTVSAWVRDRRLLGEHKRENGDVFAGVYPVVIDEELFLTANRMMNRVGMEKKKPREDLLLEPEIVRKIFRLYEEGTGTGAIVKDLEAGWSTVNVLRVLRDKKVVQEKIIDNLTFERVNQKLSLNGVANRIRKDISIAQDDFITNLFPKILKCGFCGGNIAIHYNHVRTKYVICRNREEKKSCDSKSIQYLKIEKNILETVRNVDFQKLMLESTGNDTSPIDVLREELSELRTEEVRFTQMIEERKAKGLRIQYQHTEGLTGVQDRIDEVESELAQLMEVREIPKLDFDMEAVLDPMNVELRAKVRKELRLVLKEVKYWVYGQNILVKLQYFNNVNSHILVINNKRQRSEVIFEAVVEEKGKERIYSVSDDMGVVFIAEVTISTSLWSLKLRKGEEPYSDKIQGYIGFLSKECIDPGINEDQIEWFD

SEQ ID NO: 8476 - protein, 523 aa, synthetic construct
MSDYLMYLRKSRADRDFVEEDVMKTLTRHKERLDAFCRDQHIAVSKVFYEIVSADSIAARPEMLKLLQLVEAGKYEGVIVIEMDRLCRGDSIDQGIVINTFKYSATKIITPYKTYDFANEFDEEYAEYGLMMGRSEYRKIKRRLWNGRLDSVHEGKYVGGNPPYGYETYKLPKQKGFSLKIIPDQADVVRLIFDMYVNGFLENGVFRESGSYVIAKKLNEMGYVDQFNLPWNQSHVTKILTDETYTGKVVFMRRREQKEVRNGELITIQVNNSPDKLVVNGLHEAIISEELFQMAKEKRALNRIPHLRRAAEMQNPLCHIVKCGLCGKNLRLRSADSTGQRGLFCANVNCLCKGSYLGLVEDRLISVLNHWTKDYLIENKNTEADDIIPIKSLEKTITVLKKEMEVAQKQLANIYDLFEKGIYNLEIFSERSSILNSTISSLKERYEASQKEYKKFQEYKIAKRTLVPKIQTVIEKYNSIETAGEKNILLKEILEKIVYVKEKGGKTHADNFTLQVFPKIPKL

SEQ ID NO: 8477 - protein, 435 aa, synthetic construct
MAAYCRVSTDQDEQLSSYENQVRYYKEYIQQNPLYELVDIYADEGISGTNTKKRTEFNRLIADCRKGKVDRIIVKSISRFSRNTLDCLKYVRELKELGIGVTFEKENIDSLDAKGEVLLTILSSLAQDESRSISENATWGIRKKFERGEIRVNTTKFVGYDKGENGNLIINEEQAKIVRRIFQDFLQGETPESIARSLKEEGVPGWNGKVNWYPTTIQRMLQNEKYMGDALLQKTYTVDFLTKKRSENQGQVNQYYIEGNHEAIINKEDWDLVQLEVERRNQYRQDNHINFYIIQCKQNPFTCKVFCKECGGLFGRKNWTTSRGKRPVWQCNNRYKVKGIQGCTNRHIDEETLQQAFLRAIEILHEKKEQLLEKWNSLNEEQKLEKYHAAQLKGLLDSKQEVFDGRKMCQVLEKIMLGEDGSITVKFLEGTEVIL

SEQ ID NO: 8478 - protein, 407 aa, synthetic construct
MKSGKIRVCAYARVSTMTEKQQDSLTNQQAYYSHLYQNKKDVDFIGVYYDQGISGKLAKRPGFQQMLEDCMAGKIDVIHTKSISRFARNTELLLEVSRELKAIQVDIFFEEQNLHTLSNEGEVMLTVLASYAEEELRNMSENQRWAFQKKFQRGELMINTKRFLGYDKDENGELIINPEEAKIVKRIYNLYLSGMGVHVIAKLFNEEKVSTVDGGKWYSSTITNILKNEKYKGDAILQKYYFAEIKAKQRLNQGQVQQYLITDNHEAIVSREDWEAVQKLLRQNSKRDARIDYNRRYPLSGLLKCEHCGSTLKRQKYYKGKVVWVCSKYIREGKFACIGMRVPDSAVQDWSIHEPTVVKEENIGGKKYYSYSSQEKDTSRAEATHSENPDGSLLPSVHRPRRTAIKL

SEQ ID NO: 8479 - protein, 407 aa, synthetic construct
MKPGKIRVCAYARVSTMTEKQQDSLTNQQSYYNHFYQNKNDVEFIGVYYDQGISGKLAKRPGFQQMLEDCRAGKIDVIHTKSISRFARNTELLLAVSRELKTIQVDIFFEEQNLHTLSNEGEVMLTVLASYAEEELRNMSENQRWAFQNKFQRGELVINTKRFLGYDKDENGELIINPEEAKIVKRIYNLYLSGMGVHVIAKLFNEEKVSTVDGGKWYSSTITNILKNEKYKGDAILQKYYFAEIKAKQRLNQGQVQQYLITDNHEAIVSREDWEAVKKRLKQNRKAKLSIDYNRRYPLSGLLKCEHCGSTLKRQKYYKGKVVWVCSKYIREGKVACIGMRVPDSVVQDWSIHEPTVVKEENIGGKKYYSYSSKENDTSRAEATHSENPNGGLLPSIHRPRRTAIKL

SEQ ID NO: 8480 - protein, 435 aa, synthetic construct
MAAYCRVSTDQDEQLSSYENQVRYYKEYIQQNPLYELVDIYADEGISGTNTKKRTEFNRLIADCRKGKVDRIIVKSISRFSRNTLDCLKYVRELKELGIGITFEKENIDSLDAKGEVLLTILSSLAQDESRSISENATWGIRKKFERGEIRVNTTKFVGYDKGENGNLIINEEQAKIVRRIFRDFLQGETPESIARSLKEEGVPGWNGKANWYPTTIQRMLQNEKYMGDALLQKTYTVDFLTKKRSENQGQVNQYYIEGNHEAIINKEEWDLVQLEVERRNQYRQDNHVNFYIIQCEQNPFTCKVFCKECGGLFGRKNWTTSRGKRPVWQCNNRYKVKGIQGCTNRHIDEETLQQAFLRAIEVLHEKKEQLLEKWNSLNEEQKLEKYHAAQLKGLLDSEQEVFDGRKMCQVLEKIMLGEDGSITVKFLEGTEVNL

SEQ ID NO: 8481 - protein, 521 aa, synthetic construct
MKNVITIEANAPRNSELASISLPKKRRVAGYARVSTDHEDQTTSYESQMRYYAEYISTRSDWEFVKMYSDEGISGTNTKLRVGFKSMIEDALAGKIDLIITKSVSRFARNTVDSLTTVRKLKEVGVEIYFEKENIWTLDSKGELLITIMSSLAQEESRSISENVTWGLRKQFAEGKVHFPYTNVMGFEKGENGEIVVNQEEAKTVRYIFQQALLGKTPYSIAKDLTQQGILSPSGKNHWSSVTIKRMLRNEKYKGDALLQKTYTIDFLSKKKNINKGELPQYYVENNHEAIVDKETFDAVQASLDRKEKGKGSTTLFSSKLVCGDCGHYFGSKVWHSTSKYRRVIYQCNEKYKGEKKCTTPHVTEDEIKDWFVSAINKVISNKDEIISNLETLLEISGTADLEQRMKELETEVEVVSQMISKLVTDNAVMPQNQDVYQEKYRNLVDRYDALIVELESVEKEHLDKAKRNKELQAFLKTLKSQECLVTEFDDLLWETAVERIIIKENRNIEFIFKNGEVTVH

SEQ ID NO: 8482 - protein, 582 aa, synthetic construct
MTNPASRPKAYSYIRMSSAIQIKGDSFRRQAEASAKYAAEHDLDLIDDYKLADLGVSAFKSDNLTTGALGRFVAECEAGEIEAGSFLLIESLDRLSRDKILDAFSLFARILKTGVKIVTLSDGQVYDGSSDQVGSIYYAISVMIRSNDESKIKSTRGLANWSQKRKLAAEHGVKMSSQCPAWLKLSVDRKSYLIDKERAKIVQRIFEASASGKGANLITKELNRDKVPTFGRGALWAEAFVSKTLRNRAVLGEFQPGQYVSGKRQPAGDPIPGYFPPVIEEELFDIVQASLRGRLLAGGRRGEGQSNIFTHVAFCGYCGSKMRHRSKGSRVKGNPPHRYLTCFNRFNGPGCDCKPLPYAAFERSFLTFVRDVDLRGLLEGAKRKSEAKTIADRITVNEEKVRKADERIRDYLIKIEGAPDLAEIFMERIRELKAEKDDLVRSIEESNDALSKIKSDNVTDEELASLISTFQNPCGENRIRLADRIKSIIERIDVYPNGEIRKDDPAIDLVRASGDPDAEKIIAAMNAGSRLKDDPYFIVTFRNGAVQTVVPNPSNPDDIRVSVYAGEKTRRVEGSAYEYESD

SEQ ID NO: 8483 - protein, 554 aa, synthetic construct
MGINSFKSTGLVYSYLRFSDPRQSVGSSSDRQLAYAAKWATEHGLQLDSSLSLRDEGLSAYHQHHVKTGALGVFLKAVEEGRVPQDSVLIVEGLDRLSRAEPIQAQAQLAQIVNAGITVVTASDGKAYSRERLKANPMDLVYSLLVMIRAHEESDTKSKRVKASIRRLCDGWMAGTFRGRIRQGKDPHWVRETETGWEIDPARAPAVLRILHLYQSGWGGTRICEQLNAEGLLLFGTGTENHSQQIYRLIKQRGLTGHKAIELDGEQYLLPDYYPALLSEAEWDELQRVASEHGRRRVKGELPHVITGIGITVCGYCGRPMAGQNLASKKRLPDGRIRDSYRRLLCASAASYGGGCAVSGSVSVAPVERAIMSYCSDIVNLQALYGADRSEAPRMRVAAAREKVDVINRQLERLTDAMLAAAGEGTPLTFARRARQLEVDLEAAQKALTEAERDLASMARQDLTGADEAWGRLAAGVDAQEVEARLQARQLVADTFERIIVYHRGVRPNEDDPDPILDIVLVARGGTARLLRVDRTGRWISAESLESEEQLASG

SEQ ID NO: 8484 - protein, 522 aa, synthetic construct
MNKKSVTVIPARVRIGNNVKTEEKPKLRVAAYCRVSTDSDEQASSYEVQIEHYTNFIQNNHEWELAGIFADDGITGTNTKKRDEFNRMIEECMEGKIDMVITKSISRFARNTLDCLKYIRQLKDKNIPVFFEKENINSMDSKGEVMLTIMASLAQQESQSLSQNVKLGIQYRYQQGEIQINHNRFLGYTKDENKRLIIVPEEAEVVKRIYLEYLEGASLLQIARGLEADGILTAAKKQRWRPETVKKILQNEKYIGDALLQKTYTVDFLSKKRVVNNGIVPQYYVENSHEPIIPREIFMQVQEEMVRRANLHTGKSGKKRVYSSKYALSSIVFCGGCGEIYRRVHWNNRGCGSIVWRCVSRLEEKGSDCNSPTINEEVLQAAVVKAINEVLANKSTFLTTLQANIETVLNEENDKATDDIDAKLDDLQNELLRLATTKADYNEVADEIYRLRELKQNTLIDNAEREGKRQRIMDMASYLNEQSSAMGEYDEQLVKRLIDKVTIFDDKLTVKFKSSVEIEIEL

SEQ ID NO: 8485 - protein, 519 aa, synthetic construct
MKKVTKISANSIAVNPKLRVAAYCRVSTDSDEQMVSLEAQKAHYEAYIKANVEWEFVGIYYDEGLTGTKKEKRTELLRLISDCENKKIDFIVTKSISRFARNTTDCLEIVRKLTDLGIFIYFEKENINTGTMDSELMLTILSSLAESESISISENNKWAIHKRFRSGTYKLSSPPYGYDYVDGHIAINKEQAQIVKRIFREALSGKGTQKIADSLNEDGIPAKRGKDWNASSIRGILGNERYIGNAILQKTYTDEHFNRHHNYGEREQYLIENNHEAIISKEEFRAVEEVLYQRSKEKGIKKGSSKYLNRYPLSGRIKCSECGSTFKRRIHGGINNKYIAWCCSKHIYNITACSMRFIREDAIYQAFVTMINKLIYGHKFILKPMLQSLRDVNYSDNLSQIQKLETMIEENAERSQVLMSLMAKGYLEPALFNAQKNELRKEATILREQKEVLSRSVNGGMTVITEVELLLKFTARSVQIDSFDEELFKRFVENIIVYSQEEIGFKIKCGITLKERLVI

SEQ ID NO: 8486 - protein, 559 aa, synthetic construct
MKTKLYSYIRFSSMRQNDGSSYERQIRMAREIAVKYDLELVNDYQDLGVSAFKGANSKTGALSRFLDAIGRSVPVGSWLFIENLDRLSRADIVSAQELFLSIIRRGITIVTGMDNKIYSLDTVTANPMDLMFSILLFIRGNEESQTKRNRTNSSALIKIKAHQENPQNPAVAIEEIGKNMWWTDTTSGYVLPHPVFFPIVQEVVELRRNGRSTAEILDHLNATYTPPPAASHKRHSNWSRAMIERLFHTRALIGIKEISVDGVKYELKDYYPRVLDDAEFYHLKKSIGVRACNFGDKEEAKPIPLLSGVGLLKCEHCGSAMVKVKGTNRRPNQYRYSCDAMRSSRIECVHTNWSFRGDQLEKAVLQLLADKIWIAEDKANPVPALKVQIDEISRKIDNLITLSAMTGATKELADQITTLNSERETLYNQLKMAEEEMYSVDSQGWEKLAEFDLEDVYNEDRIKVRFKIKQALKRIGCSRIDKYKNLFVLEYIDSKTQRVVIENSRGPRKGRIFVDLKTINDRQILESNGLVLHPCLDMLTDKNWKPEEEIPGPLQEFGI

SEQ ID NO: 8487 - protein, 455 aa, synthetic construct
MANEIKQVALYIRVSTDQQAKHGDSLDEQQHTLNEYVKQQGNMRVFKTYIDDGISGQKLYRDEFQKLLDDVKKGRIDTILFTKLDRWFRNLRHYLNIQEILDKNNVTWLAVTQPFFNTETAMGRSFVNQSMGFAELEAQMTSERIRAVFDNKIRKGEVVSGKVPLGYDIKDKHLVPNEKAEIVKEIFQYYLETGSIRATVRHLENHFSMTRDYQSVRQMLTNRKYIGELRDNKNFCEPIIDRDVFERVQLQLSKNIRMNKKRDYMFTGLLVCSECGCNYSATAVISRYVRKDGTTNPNERHLYRCTKNRNNVKKCSNKKGIYETTLENFLLENIEKQAEELSVRMQKEPEVKKTKNTNDKIKKKIDRLKKAYLNEVITLEEYKKDREELEALLIPEQDNKIAKIDLNSLHNYSTAEFRDGYKQLTISEKSSLWRQVIKNIVVYPDGNLKINFLGY

SEQ ID NO: 8488 - protein, 520 aa, synthetic construct
MKKITKIDELTQGQLPTTKLRVAAYARVSTDSDEQLESLKAQREHYERYIKSNPEWEFAGLYYDEGISGTKMEKRTELLRMIRDCKQGRIDFIITKSISRFARNTVDCLELVRKLIDIGVYIYFEKENLNTGDMESELMLSILSGFAAEESASISQNSTWSIQKRFQNGSYVGTPPYGYTNIDGEMVIVPEEAEIIKRIFAECLSGKGGGTIARGLNKDKIPARRGNHWSAGTVIDMLRNEKYMGDVLLQKTYTDSNYNRHPNTGEKDQYYYKDNHEAIISREDFAKTQDLIDERAKMKCKGMKKNVYLNRYALSGKIVCGECGRNFRRKTNYSAGRSYIAWSCIGHIEDKESCSMLFLRDGEIKATFTTMMNKLAFSNKLILEPLFKSISQIDEESDRERMDAIDKRMEQLMEERNTLITLMAKGFLEPALFNQERNVLDSEMKNLSTEKTNLVSNSASGILRANEIKDLIDYVSANNFNGDYTEELFEEFVENIIVNSRDELTFNLKCGLSLKEKVVR

SEQ ID NO: 8489 - protein, 520 aa, synthetic construct
MTEKNIMVIPARKRVGSTAAKEKIKKLRVAAYCRVSTETEEQNSSYEVQVAHYTEFIKKNTEWEFAGIFADDGISGTNTKKRDEFNRMIAECMDGNIDMVITKSISRFARNTLDCLQYIRQLKDKNISVYFEKENINTTDAKGEVLLTIMASLAQQESQSLSQNVKLGLQYRYQQGKVQVNHKRFMGYTKDEDGNLIIVSEEAEIIKRIYREYLEGQSLVGIGRALEKDGILTAAGKPRWRPESVKKILQNEKYIGDALLQKTVTVDFLTKKRVKNEGHLPQYYVENSHEAIIPKELFLQVQEEVHRRSNIYTGEGKNKRIYSSKYALSAITFCGDCGDIYRRTYWNIHGRKEFVWRCVTRIEQGPEVCKNRTVKEDELYGAVMTAINKLLAGGNNMIKTLEENIHAVIGETTEYQIAEINNLLEEKQKDLIKLANKSQDYEHLADEIDELRDKRQLLLVEDASLSGENERINELIEFIRKNKFRTLEYDDKLVRKIIQSVTVYEEHFVIAFKSGIEMEI

SEQ ID NO: 8490 - protein, 518 aa, synthetic construct
MVKSVTTIPAKINKKTAMPIDSPRKRRVAAYARVSTDSEEQATSYEAQVDYYTNYIKNRKDWEFVRVYADEGITGTNTKDRVEFKAMINDALDGKIDLIITKSVSRFARNTVDTLTTVRKLKEKNIEVWFEKENIQTLDSKGELLITIMSSLAQEESRSISENCTWGQRKRFADGKVTVPFSRFLGYDRGEDGNLVVNPEEAKSVKLLYALFLEGRSCYGVAKELTARGIKTPGGKDKWSARSVKSILTNEKYKGDALLQKSFTVDFLTKKKKKNEGEIPQYYVKNNHEAIIEPETWDFVQTLLEHDYRKSKNSVSIFSGKLKCEDCGDWYGSKVWHSTSKYKRTIWQCNSKFKEKCQTPHFTEDEIKEAFMNAVNILMKDREQIQANFQAIETIAYSTKELEIERDKLYAEMESISNLMEQAIQNNARVALDQEKYNQEFDEMTERFNGVKKKYDAINEKIEDKKTRHIQAGRFIKTLLSEDEMATFSPLLWQSLLDYTRVSRDGNLTFIFRNGMEI

SEQ ID NO: 8491 - protein, 586 aa, synthetic construct
MTKIIQKVNAVKMEPPRKRKVAAYARISIEKGRTPHSLSAQISYYSKFIQGNADWEYAGVYADKAVSGLTTDRPEFQRMLSDARDGKIDIILTKSISRFARNTVDLLETVRELKDLGIEVRFQKEKIHTLSEDGELMLSLLASFAQEESRSISENVKWGIRKNFQKGIGNSFHIYGYRWTGKEFVIVEEEAKIVRLIYDNYLKGISAEKTEKQLEEMGVKSYTGGHFGNNSIRQILKQERYTGNTLFQKTYIEDGKTKYNNGELPQYYARNTHPVIISEETFNKVQEIRQKKRELGAFANPHIKTSALTSKIKCTHCNRSFQRAGKKNKTGHTRCWMCATRKAGQGNPCGTGDINEEQLKKIISEVLDIDEFDDEVFLEKVDHIDVTGKDHLEFFMTDGSLIHRTYASTARKDAWTPEYKERYKRIKRSKDTNGLKNPATPYTGFIRCARCGNSFSGQRRTLKDGTTEYYLRCRTKISECPSNTIQESTLNALVCDVLDLDEYSEEAMDKAMDYCEIADNTVSFHFRDGHFEERQYEEKKRGTPWSKERRKKALKGMKEYWSDPEHRKEASDRMKKIRKEKKWSSQ

SEQ ID NO: 8492 - protein, 547 aa, synthetic construct
MKLLVTYIRWSTKEQDSGDSLRRQTNLIDAFYAKHKDDYYLLPAHRYVDKGKSGFHQQHKAQGSDFRRMFENVMSGVIPEGSLIVVENFDRFSRADIDTAIDDVRQILRKGVSILTLGDGELYDKSALTDPVKLIKHIIIAERAHQESLVKQKRIAQVWNHKTQLARELKKPMGKQAPGWLELSDDGSHYIVDEDKASLVNIIYDKRLSGMSMFAICKWLNEQGYPTINQRKVRISKTKKPDGNWSALSVKHILTSRSVLGYLPAKISSEDRKTVLREEIEGFYPQIVTDSKFYAVQQLLEETGKGKTSSGEHWLYVNILKGLIRCKCGLVMTPTGIRKPVYQGTYRCNGNKESRCNYGTVSRKLLDTQLCSRLFSKLSQLHDEATDTAKLDELQRRLNTVDSELEKLTETLIQLPNITQIQEALRVKQEEKDELIVQLSREKARVKSVSSLDLSGLDMESVEGRTEAQIIIKRLVKEIVVSGNEKLVDIYLHNGNMIRGFPLDGKDDHTLTLEEATDEMQSLDDMLIFGEPVTRIYPAGDMEEVDA

SEQ ID NO: 8493 - protein, 508 aa, synthetic construct
MKKAIAYMRFSSPGQMSDDSLNRQRRLITEWLKVNSDYYLDTVTYEDLGLSAFNGKHAQSGAFSEFLDAIEHGYILPGTTLLVESLDRLSREKVGEAIERLKLILNHGIDVITLCDNTVYNIDSLNEPYSLIKAILIAQRANEESEIKSSRVKLSWKKKRQDALESGTIMTASCPRWLSLDDKRTAFVPDPDRVKTIELIFKLRMERRSLNAIAKYLNDHAVKNFSGKESAWGPSVIEKLLANKALIGICVPSYRARGKGISEIAGYYPRVISDDLFYAVQEIRLAPFGISNSSKNPMLINLLRTVMKCEACGNTMIVHAISGSLHGYYVCPMRRLHRCDRPSIKRDLVDYNIINELLFNCSKIQPVENKKDANETLELKIIELQMKINNLIAALSVAPEVTAIAEKIRVLDKELRRASVSLKTLKSKAVSSLGDFHAIDLTSKNGRELCRTLAYKTFEKIIINTDNKTCDIYFMNGIVFKHYPLMKTISAQQAISTLKYMVDGEVYF

SEQ ID NO: 8494 - protein, 481 aa, synthetic construct
MITTNKVAIYIRVSTTSQVEEGYSIDEQKAKLSSYCDIKDWNVYKIYTDGGFSGSNTDRPALEQLIKDAKRKKFDTVLVYKLDRLSRSQKDTLYLIEDIFIKNNIAFLSLQENFDTSTPFGKAMIGLLSVFAQLEREQIKERMQLGKIGRAKTGKSMMWAKTSYGYDYHRETGTITINPAQALAIKFIFESYLRGRSITKLRDDLNEQYPKHVPWSYRSVRAILDNPVYCGFNQFKGEVYPGNHEPIITEEVYNKTKEELKIRQRTAAENVNPRPFQAKYILSGIAQCGYCGAPLKIMLGVKRKDGSRLKKYECHQRHPRTLRGVTTYNDNKKCDSGFYYKDKLEAYVLEEISKLQDNADYLDKIFSGDNAETIDRESYKKQIEELSKKLSRLNDLYIDDRITLEELQSKSAEFISMRGTLEAELENDPALRKDKRKADMRELLNAEKVFSMDYENQKVLVRGLINKVQVTAEDIVINWKI

SEQ ID NO: 8495 - protein, 553 aa, synthetic construct
MSTITKINSYQSDVTQLRVAAYCRVSTDNIDQLESLENQRVHYREYISNHPNWQLAKIYYDEGISGTKLTKRDALKELLADCHNHRIDLMVTKSISRLSRNTTDCLRIVRELQQLNIPIIFEKERINTGAMTSELFLSILSSIAQDESHSTAGNLRWAIRQRFASGEFRVSSAPYGYSIEDGNLIINSAEARIVREIFQKFLHGTSASKIAKNLNRYHVATKRGGQWRSNTVINILRNSNYTGDMLCQKTYRDDQYHRHFNQGELTHYLIEDHHPSLINHETFNKVQDLLKEAIKKRHIETGSHKYQQHYLFSGKISCGNCGTTFKRQTRPNKICWACQRHLSSASQCPIKAVPEASLEVAFCNMMNKLIYSRKFLLQPLLENLQAQINFDTHGRLNALTERIKANDHKAETLAELMQSGLLDKAIYVNQTAQLEQDTYQCCKKIKQINSTNTDSANNFEDVKVLLRWCQKDQQLAQFDDELFQEFVQQIVVNKPSEVIFKLKCGLALTEKLTKATTIENHFYRGIIRQRFNEPIKQAQYLYSIIKSEGDLIG

SEQ ID NO: 8496 - protein, 525 aa, synthetic construct
MGKVRIIPAHQQKGNRVHQHSSKQPFEQLRVAAYCRVSTDYDEQASSYETQVSHYKELIGKEPSWQFAGIYADDGISGTNTKKREQFNKMIAACKAGKIDLIVTKSISRFARNTIDCLKYIRDLKAINVAIFFEKENINTMDAKGEVLITIMASLAQQESESLSQNVKMGIQYRYQQGKVFVNHNHFLGYTKDAQGNLIIEPEEAKVIKRIFYSYLNGMSMQQIANSLKADGILTGGKTKNWQSGGVAQILKNEKYMGDALLQKTYTVDFLNKKRVKNEGIMPQYYVENDHPAIISKSVFMQVQQIIKKRRNGITTPNGKHRRLNGKYCFSQKVFCGKCGDILQRNMWYRPEKVAVWRCASRIKRSKTGRRCMIRNVKEPLLKEATVEAFNQLIKGHELASKQIKANIMKVIKNSKGPTLDQLDKQLEEMQLKLIQAANQHQDCDDLTQQIMDLRKQKEKVQSRETNQQVKLHNLDEINKLVDLHKYGLVDFDEQLVRRLVEKITIYQRYMEFTFKDGEVIRVNM

SEQ ID NO: 8497 - protein, 508 aa, synthetic construct
MKKAIAYMRFSSPSQMSGDSLNRQRRLITEWLKVNSDYYLDTVTYEDLGLSAFNGKHAQSGAFSEFLDAIEHGYILPGTTLLVESLDRLSREKVGEAIERLKLILNHGIDVITLCDNTVYNIDSLNEPYSLIKAILIAQRANEESEIKSSRVKLSWKKKRQDALESGTIMTASCPRWLSLDDKRTAFVPDPDRVKTIELIFKLRMERRSLNAIAKYLNDHAVKNFSGKESAWGPSVIEKLLANKALIGICVPSYRARGKGISEIAGYYPRVISDDLFYAVQEIRLAPFGISNSSKNPMLINLLRTVMKCEACGNTMIVHAVSGSLHGYYVCPMRRLHRCDRPSIKRDLVDYNIINELLFNCSKIQPVENKKDANETLELKIIELHMKINNLIAALSVAPEVTAIAEKIRVLDKELRRASVSLKTLKSKAVSSLGDFHAIDLTSKNGRELCRTLAYKTFEKIIINTDNKTCDIYFMNGIVFKHYPLMKTISAQQAISTLKYMVDGEVYF

SEQ ID NO: 8498 - protein, 506 aa, synthetic construct
MRTVITYLRFSSATQGAEGADSTRRQNELFKQWLRKNSDAQVVASFNDEGLSGYKGKHLSGQFGDMLSRIESGEFPEGTILLVEAIDRIGRLEHLETEALMNRIIAHGIEIHTLQDGLIYTRDALSDDLGISIIQRVKSYLAHQESKQKSFRVSQKWEQRAKLALAGEQRLTKMVPGWIDPETFKLNEHAETVRLIFKLLLDGESLHNIARHLQANNISSFSRRKDANGFSVHSVRTILRSETTIGTLPASQRNDRPAIPNYYEAAIDAATFNKAQEILDKNRKGRTPASDNPLTINIFKGLFRCQCGASVHPTGTKNKYAGVYRCNNHLDGRCDVPPLKRKPFDKWMIDNFLGMIDVGNDGEAEGKIASLQHEVEIVTARIKKATALLLEMDDIDELKIQIKELNQRRTELQTTIDNMRRKASLTDKELPQLKDIDLTTKAGRVECQLILSKHLKGLTLGKDTVTVTLQNDTEITIPTDPLPLNDGTSIFEIAEKNLLNIDAYQL

SEQ ID NO: 8499 - protein, 508 aa, synthetic construct
MKKAIAYMRFSSPGQMSGDSLNRQRRLITEWLKVNSDYYLDTVTYEDLGLSAFNGKHAQSGAFSEFLDAIEHGYILPGTTLLVESLDRLSREKVGEAIERLKLILNHGIDIITLCDNTVYNIDSLNEPYSLIKAILIAQRANEESEIKSSRVKLSWKKKRQDALESGTIMTASCPRWLSLDDKRTAFVPDPDRVKTIELIFKLRMERRSLNAIAKYLNDHAVKNFSGKESAWGPSVIEKLLANKALIGICVPSYRARGKGISEIAGYYPRVISDDLFYAVQEIRLAPFGISNSSKNPMLINLLRTVMKCEACGNTMIVHAVSGSLHGYYVCPMRRLHRCDRPSIKRDLVDYNIINELLFNCSKIQPVENKKDANETLELKIIELQMKINNLIAALSVAPEVTAIAEKIRVLDKELRRASVSLKTLKSKAVSSLGDFHAIDLTSKNGRELCRTLAYKTFEKIIINTDNKTCDIYFMNGIVFKHYPLMKTISAQQAISTLKYMVDGEVYF

SEQ ID NO: 8500 - protein, 506 aa, synthetic construct
MRSVITYLRYSSAIQGAEGADSTRRQNDLFKQWLKKNSDAQVVASFSDEGLSGYKGKHLTGQFGDMLARIESGEFSKGTILLVESIDRIGRLEHLETEALMNRILGNGLEIHTLQDGLIYTKDALADDLGISIIQRVKSYLAHQESKQKSFRVSEKWKQRAKLALAGEQRLTKMVPGWIDPETFKLNEHAETVRLIFKLLLDGESLHNIARHLQANNISSFSRRKDANGFSVHSVRTILRSETTIGTLPASQRNDRPAIPNYYEAAIDAATFNKAQEILGKNRIGRTPASDNPLTINIFKGLFRCQCGASVHPTGTKNKYQGVYRCNNHLDGRCDVPPLKRKPFDKWMIDNFLGMIDVGNDGEAEGKIASLQHEVEIVTTRIKKATALLLEMDDIDELKIQLKELNQKRTELQTTIDNMRRKASLTDKELPQLKDIDLTTKAGRVECQLILSKHLKGLTLGKDTVTVTLQNDTEITIPTDPLPLNDGTSIFEIAEKNLLNIDTFQL

SEQ ID NO: 8501 - protein, 508 aa, synthetic construct
MKKAIAYMRFSSPGQMSGDSLNRQRRLITEWLKVNSDYYLDTVTYEDLGLSAFNGKHAQSGAFSEFLDAIEHGYILPGTTLLVESLDRLSREKVGEAIERLKLILNHGIDVITLCDNTVYNIDSLNEPYSLIKAILIAQRANEESEIKSSRVKLSWKKKRQDALESGTIMTASCPRWLSLDDKRTAFVPDPDRVKTIELIFKLRMERRSLNAIAKYLNDHAVKNFSGKESAWGPSVIEKLLANKALIGICVPSYRARGKGISEIAGYYPRVISDDLFYAVQEIRLAPFGISNSSKNPMLINLLRTVMKCEACGNTMIVHAVSGSLHGYYVCPMRRLHRCDRPSIKRDLVDYNIINELLFNCSKIQPVENKKDANETLELKIIELQMKINNLIAALSVAPEVTAIAEKIRVLDKELRRASVSLKTLKSKAVSSLGDFHAINLTSKNGRELCRTLAYKTFEKIIINTDNKTCDIYFMNGIVFKHYPLMKTISAQQAISTLKYMVDGEVYF

SEQ ID NO: 8502 - protein, 507 aa, synthetic construct
MKRVISYIRFSSEKQAKGDSLRRQSKMVTDWLKAHPEYYLDQDLSFRDLGVSGFTGKHLKGGLGDFLTAIEKGLVKAGDTLLIESLDRLSRQDIDIASELLRRILRAGVDVVTLSDGEHYTKESLKDPLSLIKSILIMQRAHEESLRKSERIQAAWNRKKELISEGIKVSRRCPAWLRLNDDRKSFSVIPDKVETVKRCFQLRLEGKSIWEIVRTLNAEGHRSMNQYKPGKFGQTSVQDLLKNRSVIGYFTPKGCEEIAGYYPSVIDETTFYKVQQLSHSRYGRRSVSGKPLSVNLFRGVIRCSECGHALIITGFSDTRSGIYRCPLRNENRCSAKGLSRKQTDGTLLALLSRLDRFDSDTTNTIDTLKLHREHISSNIEKLVQLSLEIEDLNAITSKLKQLKNELSQVDADIEKETQRLKSIDVGCLSDCDLTTKAGRIEAQLIIKSAVKEVVLNTAKRRCKVTFHNGKSITLPITENPSEDVTEAIQSLSEVIERGLIDADVVEI

SEQ ID NO: 8503 - protein, 507 aa, synthetic construct
MKRVISYIRFSSERQAKGDSLRRQSKMVNDWLKAHPEYYLDQDLSFRDLGVSGFTGKHLKGGLGDFLTAIEKGLVKAGDTLLIESLDRLSRQDVDQASELLRNILRSGVDVVTLSDGEHYTRESLKDPLALIKSILIMQRSHEESLRKSERIQAAWDAKKEAAKAGIKISRRCPAWLKLNDDRKSFSVIPEKVETVRRCFQLRLEGKSIWEIVRILNDEGHQTLNQYKAGKFGQTSVQDLLKNRSVIGYFTPKGCEEIAGYFPPIIPETDFYKVQQLSYSRYGRKPASDKPLSVNLFKGVIRCSECGHALIITGFSDTRSGIYRCPSRNENRCNAKGLSRKQTDGTLLALLSRIDRFDSDMTNTIDTLKLHREHISSNIEKLVQLSLEIEDLSAITSKLKQLKGELSQVDADIEKETQRLKSIDVGCLSDCDLTTKAGRIEAQLIIKSAVKEVVLNTAKRRCKVTFHNGKVIDLPITENPSEDVTEAIQSLSEVTERGLLDVDEVII

SEQ ID NO: 8504 - protein, 506 aa, synthetic construct
MRHVITYLRYSSATQGAEGADSTRRQNELFKQWLRKNSDAQVVASFSDEGLSGYKGKHLTGQFGDMLARIEAGEFPEGTILLVESIDRIGRLEHLETEALMNRILGNGIEIHTLQDGLIYTKDALADDLGISIIQRVKAYIAHQESKQKSFRVSQKWGQRAKLALAGKQRLTKMVPGWIDPDTFKLNEHAETVRLIFKLLLDGESLHNIARHLQSNGIKSFSRRKDANGFSVHSVRTVLRSESVIGTLPASQRNDRPAIPNYYEAAIDAATFNKAQEILDKNRKGRTPASDNPLTINIFKGLFRCQCGASVHPTGTKNKYQGVYRCNSHLDGRCDVPPLKRKPFDRWMIDNFLGMIDVGNDGEAEKEIASLQHEVETVTARIKKATALLLEMDDITELKTQVKELNQKRTELQTTIDNMRRKASLTDKELPQLKDIDLTTKVGRVECQLILSKHLKGLTLGKDSVTVTLQNDTEITIPTNPLPLNDGTSIFEIADKELLDIDAYQL

SEQ ID NO: 8505 - protein, 533 aa, synthetic construct
MKRAAIYARYSTDLQNDQSVEDQFRLCKAHAERLGLNVVGEFSDRAKSGASMFGRPGLANLIQAADRAEFDVLVSEAPDRISRDIADLAHIHKTLKFHGIEMNCVNGGAMDTVQIGMYGVIGQMQREEGAKKVRRGMVGVVRSGRNPGGKAYGYRPIFGRKGELEIVEDEAATVRRIYELYAGGMAPRSIAAILNEENVPAPRGERWNASTINGSGQRGNGILRNPIYAGRIVWNRIQMVKDPSTGRRISRVNPESEHEEVAAPHLQIVDSGLFEIVQQRKEATGGADRAKGPRSKRILSGLLRCGACGGGMALVGPDRSGNRIQCSTFRESGTCNNSRRYYVERIETEVVDGLRRQFADTSIIEAYVAAYQAEQKRLRGDAQRARANAQRALQEAKDGITKIVEKISKGLIEDDEAAALLAPLRAERDRQKAIMETTEEPPNVIEIQPKAVKRFRENIESLAQIVREKDGEASPEIAAPFRQLVAAVVINPTEKGQPYEINIKGYLSSLIDSELSVIKMVAEEGFEPPTQGL

SEQ ID NO: 8506 - protein, 543 aa, synthetic construct
MKHGRGSRGDARLRAYMYLRLSVDKEDGKAQSIEAQRTAIHDYARRNSIEIVEEFADTGLSGQSANRPAFNRMIEQATDTPSPVDIVLIYRIARLARNMRLFFNSLDGLADAGVEVISITENFGEGRRTKRLGQTISAMVAEQQAIDASIYTSKSRRENARQGFYNGGPVPFGYETYVARKDGDKERMKLRVVPSEASVLREIFDWADMGRGGRWIVQTLNARGTTLRGAKFSNGNLAGILGRITYTGVYYDKTVDDDGNVPDPEDWIAVSCPVIIEQAQFDRVNALRASRNPRRTAPHIAAGTTMLTGIAKCGMPGCACAMTIRSGKAGQYHYYVCANRVNKGQACAGPSMRREVLDGLVLDAVEKQLLAPERLETLLSDVLNLSDQKRIQREEELLHARAEQTRLRTAIERLLILVETGQMGPRDPIFAKRMDENRSALATATSRIDTLETQLTKGSRKITPTSIKRFGELLSARLRDDDSTLRKAYLRMLVSNVTVSKEQIVISGPKAVLENGVCNGAPRLEGMVPIFDREWCRLQDSNL

SEQ ID NO: 8507 - protein, 538 aa, synthetic construct
MAKANRSRTRAFAYMRLSVDKEGGAPQSIDAQRSAILAYAAKHDIMIVEEFADAGFSGQTDKRPEFQRLVQRATAPDHPVDLVLMFMFSRMARNMRLFFDVVGKLDDAGVEVRSITEDFGQGRGQRIGRTITAMMNEEQARDAAILTRKSRRENARQGFYNGGPVPFGYQTYVARQDGEKERRKLAIVEAEAAIVRQIFDWADVGRGGRWIVKQLNEAGRTLRGARFANSNVAGILAREVYTGVYHDRTADDDGITPDVEDAIAVTCPPIIARDQFDRVAAMRATRNPKRMAPHVAAGTTLLTGVARCGMPGCSSGMTIRTGKGGRYTYYVCNDKVNRGGTCTCPSIRREKLDGMVLDAIEAKLLARDRLRTLLAGVLDISQSRQAEREADLTRSRSERTRLNTAISNLLILIEEGTMSARDPAFVDRMATNRAALAAVSSRIDVLEAQLAKGKRRIDEQTIDRFGDMLRKKMRSDDSTLRSSYLKMFVSNVSVSDHEIVISGPMSSLENGVSVGLPVKEGAVPIFDREWCRLQDSNL

SEQ ID NO: 8508 - protein, 609 aa, synthetic construct
MKKAYSYIRYSSPQQAKGDSFRRQFSATQAYCEKNGYELDTELAVYQELGVSGVDGDQENLKRFIDDCETGKVKKGSLLIVENLDRLSRKKINKAMRQFLHLLDFVDIYTLQDQKLYSQNDDVDSETQLLDVMTSLIVMSRAYEESATKKKRLKESWDSKRKNIDNKKLTSLIPHWLELSEDRTEFHLKKDKVEIVKYIYQKSIDGMGVSQLIRHLNENLTQYPTPTHKSKLWARTSLSRILTDRSVLGEYQPHIGKHNGIGEHKRKPLGDPIPDYYPQIIDEETFLKAQIARKSRAIGRGKVNRNKFSNLYRNILRCAHCDGKVEYVDKGDGSRGGKYLTCSNAKRGGDCTHNKHYKYLPLELMLLHLTTENGFMPKPEAPTELNLRLSKLQDLNEKAESKLSFLLEEDFSIPTIREKTRELSKEIERYRSEIEDLENKILTFKPDYTYSELYQNVILEKDSVLLSSNRMTYNSYLSKKIESAYLFNDYSHFILFKMKDQHVHTVIIDEQYNFGGCSLPNDNMTHKRLNGEKTPIDEMIWQIQQNFLILIESCKGLNDKKLDNYLKRISKLISKIIVNQEIELFNQVLFQIEKAHTILEIIQTKNKTL

SEQ ID NO: 8509 - protein, 507 aa, synthetic construct
MKRVISYIRFSSERQAKGDSLRRQSKMVNDWLKAHPEYYLDQDLSFRDLGVSGFTGKHLKGGLGDFLTAIEKGLVKAGDTLLIESLDRLSRQDVDQASELLRNILRSGVDVVTLSDGEHYTKESLRDPLSLIKSILIMQRAHEESLRKAERIQAAWDAKKEAAKAGIKISRRCPAWLKLNDDRKSFSVIPEKVETVKRCFQLRLEGKSIWEIVRTLNAEGHQTLNQYKAGKFGQTSVQDLLKNRSVIGYFTPKGCEEISGYYPAIIDETTFYKVQQLSYARYGRKPASDKPMAVNLFKGVIRCSECGHALIITGFSDTRNGIYRCPLRNENRCSAKGLSRKQTDGTLLALLSRLDRFDSDMTNTIDTLKLHREHISSNIEKLVQLSLEIEDLSAITSKLRQLKNELSQVDADIEKETQRLKSIDVGCLSDCDLTTKAGRIEAQLIIKSAVKEVVLNTAKRRCKVTFHNGKTITLPITENPSDNVTEAIQSLSEVTERGLIDVDEVII

SEQ ID NO: 8510 - protein, 506 aa, synthetic construct
MRTVITYLRFSSATQGAEGADSTRRQNELFKQWLRKNSDAQVVASFSDEGLSGYKGKHLTGQFGDMLARIESGEFSEGTVLLVEAIDRIGRLEHLETEALMNRIIAHGIEIHTLQDGLIYTRDALSDDLGISIIQRVKSYVAHQESKQKSFRVSQKWKQRAKLALAGEQRLTKMVPGWIDPDTLKLNEHAETVRLIFKLLLDGESLHNIARHLQANNISSFSRRKDANGFSVHSVRTILRSETTIGTLPASQRNDRPAIPNYYEAAIDVSTFNKAQEILDKNRKGRTPASDNPLTINIFKGLFRCQCGASVHPTGTKNKYQGVYRCNNHLDGRCDVQPLKRKPFDRWMIDNFLGMIDVGNDGESERKIAALQHEVEIVTARIKKATALLLEMDDIDELKIQLKELNQKRTELQTTIDNMRRKASLTDKELPQLKDIDLTTKAGRVECQLILSKHLKGLTLGKDSVTVTLQNDTEITIPTNPLPLNDGTSIFEIADKELLDIDAYQL

SEQ ID NO: 8511 - protein, 478 aa, synthetic construct
MPKVKVGIYIRVSTQEQATEGYSIDAQTDRLTNYCKSRDWSIYNTYIDGGFSGSNTNRPALHQLMQDIKDKKLNCVLVYKLDRLSRSQKDTLYLIEDVFLKNKIDFVSLNENFDTSSPFGRAMIGILSVFAQLEREQIKERSLMGRIERAKNGLWHGGGFEPFGYNYINGQLIVNEYEANIVQEAFELFLQKLPIHRINRIISEKYGKDFHETVLRSILSTRLYTGKISYLGGIYDGQHQAIISEDTFKAAEMLLAYRKKKFSNSNPFKATKLLGGILYCAHCGARYLAKGNYSGHGDKKVYRPYYTCYSRAKSTKKYIVDPNCKNPSYAVVVLDEIIINEIRKLFIDKEYLYSAKNATATSNTVNKQKSILKQIDSIQSQISRLLDLYQIDGISIDDIQDRIKKLQHEKDVLEETLSNLKTSQKKKLTTNEVLSMEASFNEIMENGTDMEKQTIVRTLIDKIIVHEELNSFEIIWNF

SEQ ID NO: 8512 - protein, 546 aa, synthetic construct
MLRLGIYARVSSDDQAERGTIENQLEFARKYADLHQLEIVKWYKDDGVTGTIPLEARPAGCELLQDAKNGIIDLLLIYRLDRLGRSARIILNSVHELETDGVKIRSMTEPFDTGDPSGRFLLTILAGVADLERETILERLWYGANRAARSGKWLGGIVPYGYRVDSEGYLEICEDLLPQSDMTEAGVVRLIFHMLANQGHSCIKVSDYLNALGVPTAYAKDDRKVTRGKRKENTAGIWRPSRVRGIITNTSYKGVHFYGKRSTRKRDVIEREVPAIVDVDTWEKAQKVLRSNQIEAMRNAKNQYLLRSLLKCQCCGLTYVGIHYPGSKRALKGFYVCTGKQAYKGPMQGKCNSKNLPQDWIEDLVWRDCLAFINQPGEALQEIAAAREVKQTEKVDLESEIALIQKSIDDKEVERQSILDLFRKSIITFTDLEKQIQKINQEKEILELRLKDIRTSLQVDRDYSTKVMNAFQLLTSLRNKLDDNPSFETRREIVKTLVQRIQVHTTPSEGSKRPRASVTVQYCFAKDIIYTDKDCTNRLTEIERGR

SEQ ID NO: 8513 - protein, 520 aa, synthetic construct
MKKITKIEGNLANSFIKPKTRVVAYCRVSTDSNEQLVSLQAQKAHYETYIKANPEWVYAGLYYDEGISGTKKENRSDLLRMLSDCETGRIDLIITKSISRFARNTTDCLEMVRKLIDLGVHIYFEKENINTGSMESELMLSILSGLAESESISISENTKWAIQRRFQNGTFKISYPPYGYQNIDGQMIVNLKQAEVVKYIFAEVLLGKGTQKVANDLNQKGIPSKRGGRWTATTIRGILTNEKYTGDVILQKTYTDSHFNRHTNYGEKNMYLVENHHEAIISHEDFEAVDAVLNQRAKEKGIEKRNCKYLNRYAFSSKIICSECGSTFKRRIHSSGRKYIAWCCSKHISNITECSMQFIRDEDIKTAFVTMMNKLIFGQKFILRPLLNGLRNQNNVASFRRIEELETKIENNMEQSQMLTGLMAKGYLEPALFNKEKNSLEAERENLLAEKEQLTYSVNGNFAKVEEVECLLKFATKSKMLTAYEDELFESYVEKIIVFSREEVGFELKCGITLKERLVN

SEQ ID NO: 8514 - protein, 491 aa, synthetic construct
MAVSRNVTVIPAIQRIGNNKNGESKPKIRVAAYCRVSTDSEEQASSYDIQIEHYTNYIKKNKKWELAGIFADDGITGTNTKKRDEFNRMIEECMAGNIDMIITKSISRFARNTLDCLKYIRQLKDKNIAVFFEKENINTMDSKGEVLLTIMASLAQQESQSLSQNVKLGIQYRYQQGEVQVNHKRFLGYTKDENKQLVIDPEGAEVVKRIYREYLEGASLLQIARGLEADDILTAAGKSKWRPETLKKILQNEKYIGDALLQKTYTVDFLSKKRVKNNGIVPQYYVENSHEPIIPRDLFMQVQEEMVRRANLRGGKGGKKRVYSSKYALSSIVYCGHCGDIYRRVHWNNRGYKSIVWRCVSRLEEKGSECTASTINEEILQTAVVKAINELLANKEPFLSTLQKNIATVLNEENDNATVDIDGKLEELQQQLLIQAKSKNDYEDVADEIYRLRELKQNALVENAEREGKRQRIAEMTDFLNEQSCELEEYD

SEQ ID NO: 8515 - protein, 533 aa, synthetic construct
MKRAAIYARFSTDLQNDKSVDDQITLCSEYAVRIGCSVVACYSDKARSGASMFGRPGLADLIESAQEGGFDVLISEAPDRISRDMEDLAGIHKRLSFRGIEINCVNGGKQDSLQIGMHGIVGQMQREEGARKVKRGLMGVIDDGRNAGGKAYGYSPVLGKPGELNIVPAEAETVLRIFKAYAAGQSPRDIAGMLNRDGIPAPRGTRWSAPTINGNGKRGNGILRNPLYSGRIVWNRVRMVKDPATGKRVSRPNDSSEFRQADVPHLRIVDQALFDTVQARKETVGGEHASHAPRNKRVLSGLLKCGACGGGLVMIGHDRSGPRVQCSTHRESWSCSNSARYYIEKVEIHVIDALRLQFSDPTIIAEYVKAYRDERRRIESDARRNRSTTSQKLADTQSKLDRLIGKIAADLISDEEAKPLLATLRAEKERLTGDLATAGEATNVIELHPQAVERFRENIENLAAILSQGNVAPDSELIGSFRELVAEVIVMPRQKGEKYTIQIKGYLSSLLGADLSAVTMVAKEGFEPPTQGL

SEQ ID NO: 8516 - protein, 507 aa, synthetic construct
MKRVISYIRFSSERQAKGDSLRRQSKMVTDWLKAHPEYYLDQDLSFRDLGVSGFTGKHLKGGLGDFLTAIEKGLVKAGDTLLIESLDRLSRQDVDQASELLRNILRSGVDVVTLSDGEHYTSESLKDPLALIKSILIMQRAHEESLRKSERIQAAWDAKKEAAKAGIKVSKRCPAWLKLNDDRKSFSVIPEKVATVKRCFQLRLEGKSIWEIVRTLNDEGHQTLNQYKPGKFGQTSVQDLLKNRSVIGYFTPKGREEIAGYFPPIIPETDFYKVQQLSYSRYGRKPASDKPLSVNLFKGVIRCSECGHALIITGFSDTRNGIYRCPLRNENRCNAKGLSRKQTDGTLLALLSRLDRFDSDTTNTIDTLKLHREHLSSNIEKLVQLSLEIEDLSAITSKLKQLKNELSQVDADIEKETQRLKSIDVGCLSDCDLTTKAGRIEAQLIIKSAVKEVVLNTAKRRCKVTFHNGKAITLPITETPSDNVTEAIQSLSEVTERGLIDVDEVII

SEQ ID NO: 8517 - protein, 415 aa, synthetic construct
MTGNKLAALYCRLSLDDGNEGESMSIQSQKAILENYARNAGIINYEFYVDDGYSGTNFNRPSFQKMISDIEDGKIECVITKDLSRLGRNYLESGAYIEVFFPKHKVRYIAVNDGVDSMSAAGLDITPFKNILNEFYSRDISKKVKTGKHIRAASGKYMCTHAPFGYIKDPEDRNHLLIDEQTAPIVRRIFELALEGMGNNRISKILKKERLPRPAFFKQEYFEKYFDNIEGYYDWTQSIITRILRNPLYKGDMWLHVTSKSTFNSKSRGYIGTHEREVIQNTHEGIVSRGVWDTVQEIMNRHSKVRPSNSGYENLFWGILKCPDCGRSLLLHTDTRKKCEARLASFFQCSTYRMKGRSACDQHRIEAVDLEKAVLEDIQKNAKKAMKNPESFIRKILSGMASQSTENADKLEKTH

SEQ ID NO: 8518 - protein, 558 aa, synthetic construct
MTKLYSYIRFSSMRQSDGSSYERQIRMAKEIADRYNLELVNDYQDLGVSAFKGANSKTGALSRFLDEIGRSIPVGSWLFIENLDRLSRQDIISAQELFLSIIRRGITIVTGMDNKIYSIETVTANPMDLMFSILLFIRGNEESQTKRNRTNSSALLKIKAHQQNPQSPAVAIEEIGKNMWWTDTTSGRVLPHPVYFPVLQKIVQLRQEGHSAGVILDYLNEHHEPPAPTSNKKHGKWSRAMVSRLFATKALIGVKTVNVDGVEYELRDYYPRVLSDSEFYFLRKNIIKKAWDYSHDKEKVIPLLSGIGVLRCVHCGATMVKQTAANGKREQYRYCCDGRKSGRTDCPYPNWGFRAVTLEGAVLQLLADKIWIAEDKTNPIPEIQVKIDEISRKIDNLINLSAMMGATKELANQITDLNSQREALHEEIRLFEREMYSVDSQGWDKLAQFDLSDVQNEERLKVRMKIKGALHEIECSRIDSKKNLFVLVYLDGLRQRLVIENNRGLKKGQIFVDLKTINDRQILESAGMVLHPCIEMIIDADWKAPEEIPGLLSEEFGI

SEQ ID NO: 8519 - protein, 559 aa, synthetic construct
MKTKLYSYIRFSSMKQADGSSYERQKRTAAEIAAKYDLELVTSYQDFGVSAFKGANSRTGALSRFLDEIGRSIPVGSWLVVENLDRISRQSIIEAQELFLSIIRRGITIVTGMDGKVYSKESVNANPIDLLLSVMLFARANEESQTKRNRTNSSALIKIKAHQENPQNPAVAIEEIGKNMWWTDTTSGYVCPDPVFFPIVQEVVELRRNGRSTAEILDHLNATYTPPPAASHKRHSNWSRAMIERLFHTRALIGIKEISVDGVKYELKDYYPRVLDDAEFYHLKKSIGVRACNYGDKEEAKPIPLLSGVNLLKCEHCGSAMVKVKGTNKRPNQYRYSCDAMRSSRIACVHTNWSFRGDQLEKAVLQLLADKIWIAEDKANPVPALKVQVDEISRKIDNLIALSAMTGATKELADQITTLNSERETLYNQIKMAEEEMYSVDSQGWEKLAEFDLEDVYNEDRIKVRFKIKQALKRIGCSRIDKYKNLFVLEYIDGKTQRVVIENSRGPRKGRIFVDLKTINDRQILESNGLVLHPCLDMLTDKDWKPEEEIPGPLQEFGI

SEQ ID NO: 8520 - protein, 506 aa, synthetic construct
MRTVITYLRFSSATQGAEGADSTRRQNDLFKQWLKKNSDAQVVASFSDEGLSGYKGKHLTGQFGDMLARIEAGEFPGGTILLVESIDRIGRLEHLETEALMNRIIAHGIEIHTLQDGLIYTRDALSDDLGISIIQRVKSYLAHQESKQKSFRVSEKWKQRAKLALAGKQRLTKMVPGWIDPDTLKLNEHAETVRLIFKLLLSGESLHNIARHLQSNGIKSFSRRKDANGFSVHSVRTILRSETTIGTLPASQRNDRPAIPNYYEAAIDAATFNKAQEILDKNRKGRTPASDNPLTINIFKGLFRCQCGASVHPTGTKNKYAGVYRCNNHLDGRCDVPPLKRKPFDKWMIDNFLGMIDVGNDGEAEGKIASLQHEVEIVTARIKKATALLLEMDDIDELKIQIKELNQRRTELQTTIDSMRRKASLTDKELPQLKDIDLTTKAGRVECQLILSKHLKGLTLGKGSVTITLQNDTEITIPTNPLPLNDGSPIFEIADKELLDIDAYQL

SEQ ID NO: 8521 - protein, 507 aa, synthetic construct
MKRAISYIRFSSEKQSRGDSLRRQSKMVTDWLKAHPEYYLDQDFSFRDLGVSGFTGKHLKGGLGDFLTAIEKGLVKAGDTLLIESLDRLSRQNVDRASELLRNILRSGVDVVTLSDGEHYTRESLKDPLALIKSILIMQRSHEESLRKSERIQAAWNRKKELISEGIKISKRCPAWLRLNDDRKSFSVIPEKVETVKRCFQLRLEGKSIWEIVRTLNAEGHQTLNQYKAGKFGQTSVQDLLKNRSVIGYFTPKGCCEIAGYYPSIIPESDFYKVQQLSHSRHGRKPVSDKPLSVNLFKGVIRCSECGHALIITGFSDTRNGIYRCPLRNENRCSAKGLSRKQTDGTLLTLLSRLDRFDSDTTNTIDMLRLHREHISSNIEKLVQLSLEIEDLSAITIKLKQLKGELSQVDADIEKETQRLKSIDTGSLSDCDLSTKAGRIEAQLIIKSAVKEVVLNTAKRRCKVTFHNGRSINLPITENPSEDVTEAIQSLSEVTERGLIAVDVVEI

SEQ ID NO: 8522 - protein, 507 aa, synthetic construct
MKRAISYIRFSSEKQSRGDSLRRQSKMVNDWLKAHPDYYLDQDLSFRDLGVSGFTGKHLKGGLGDFLTAIEKGLVKAGDTLLIESLDRLSRQAVDRASELLRNILRSGVDIVTLSDGEHYTSESLKDPLALIKSILIMQRAHEESLRKSERIQAAWDAKKEAAKAGIKVSKRCPAWLRLNDDRKSFSVIPEKVETVKRCFQLRLEGKSIWEIVRTLNAEGHRSMNQYKPGKFGQTSVQDLLKNRSVIGYFTPKGCEEISGYYPAIIDETTFYKVQQLSYARHGRKPASAKPLSVNLFKGVIRCSECGHALIITGFSDTRNGIYRCPLRNENRCSAKGLSRKQTDGTLLTLLSRLDRFDSDTTNIIDTLKLHREHISSNIEKLVQLSLEIEDLSAITSKLKQLKGELSQVDADIEKETQRLKSIDVGCLSDCDLTTKAGRIEAQLIIKSAVKEVVLNTAKRRCKVTFHNGKSITLPITENPSEDVTEAIQSLSEVTERGLIDVDVVEI

SEQ ID NO: 8523 - protein, 547 aa, synthetic construct
MRLRACGYVRVSTDDQAQHGISLPSQISKIEEFCAARGWELVDVLQEPGMSGKDEGRPVFRKMMSLAQSALRPFDVIVVFALSRFARKLSLQSNSYEQLQAVGVGLASVTETFGKGPNGNLMRSMVGAFNQHVSDQSSVNTIRTMNENAAQGFWNGGPIPFGYQSITVERRKDKEKKKLAIREDEAAVVRQMFRLARYGDGKGPLGARGIAQWLNSRGYTLRGARFKNSNVAGILNRTHYVGYYLDGKKNEFKEPLPEDQWITVPCPSIISEEEFLEVAALRAKRSPRVTPPRVTNGTTLLPATIAKCGQPGCGAGLTVRTGKSGAYHYYCCSARVNEGAAACNLPSTQRDELEGAVIGALQERLFAPSRLPVLLSHLLDRSADADKRRRRDLALARTELTSVSKAITNLMILVERDVSRLDEPEFAERMAHNRARKSMLEADVKALEAQLAKAKVRITKEMIDTFGKRMKTALREGDHQFRSAYVRLFVDQVTVTPEEIVIRGSKAALERTLVKVGDPAREPVPIFDREWCPGEDSNLHALASAST

SEQ ID NO: 8524 - protein, 563 aa, synthetic construct
MPQPQAARRRKTAANMDQVLIYARYSTTLQREASIEDQVRICREAAEREGWAVTGIHTDYAISGGVRDRPGLNGLLEAVGRGAGTVILAESIDRLSRDQEDIAAIFKRVAFAGARIFTLSEGWVGELHVGLKGTMSALFRKDLADKTRRGQTGRVLAGFNPGGRAYGYQRVARFDERGEPIHGLREIDPDEAAIVRRIYAEFVDGRSPREIARRLNGEGVAAPAGGKWSAASINGDRVRGNGILQNDIYRGVLVFNRTRRFQDPDTRKKRIRPRPPEEWTVRPAPELQIVSDELWEAVSARRARFDGTRAEQQRRPKRLLSGLVRCASCGGRYVVIGAEKWGCGNRRERGDCGNGRTIQTHLLEARVLAGLQEQLLDPDLVAEVVREYRRAAQERAGTEAKERARAERRRDKAKRDVDRLIRAVTDGGAEFGEIRSALEKSRADLAAAELAIADVGAGAVIALHPGVADDYRRRITNLRELLTGPEDASRAAAQQVRALIDHVTVAPAEGRTGTVITIEGRLTALLDLAAGRAVNSVDVCQRWCPTDDRSGHSNHWTISVSRS

SEQ ID NO: 8525 - protein, 543 aa, synthetic construct
MKVADLYIRVSTDEQAEKGYSQRSQEEMLRRYCDVNKISIRKVIFEDHSAKTFDRPEWKRYLADLRRNKGHSDFVLFLKWDRFSRNAGDAYQMISTLKKLGVEPQAVEQPLDLSVPENKMMLAFYLAAPEVENDRRSLNVTNGMRRAMKEGRYMGFAPFGYVNKNDDAGKKFIAPTEPMASVVRWVFETISEGEFNSEQVLKMARERGYTRSKNSFWNMLRNPVYCGLIAVPKQREEEASLRNGIHEPLISQELFYDVQDVLDGRKRAPAKLKVSSDESLPLRGYLICPCCGRTLTGSASKGRKKYYAYYHCLKGCPTRFKAEVVNDKVFDLLATVIPRPEMLPLFELALKEAWYTKTDFRDADRKSALAQVKEYETRISNIREMLSLKQIDPAEFREMKTEYSQKLERLEAKLAAEENNKFDLERLLEQAIPNLRNLRKAYELGTVEKKRNIIGSLYPGKLIYDGTGVRTARLNEVISAILALDKAFGKIKMDQNNKSAVLVHQVIPLGSLKILAKSTMKAEIPLSKFDRSPNWSPVCLIAF

SEQ ID NO: 8526 - protein, 493 aa, synthetic construct
MNHRIAVYRRVSTEEQTTNHSLESQASILRAFADQQGYTVARDYVDGGWSGSSRERPALEQLLADAKEGLFETVLIYRLDRLARSTYLAYSLIQELADLGVGVRSYSEPQIDSSTPMGKVSLGVTAIFAELERDTFMQRSRDGTRKAVKEGRYVGGITAYGYQAEDKQLVVYEPEAEIVRMIFSWVGEQGWSTTKVAQELTRLNIPTKYRRDGRGIRGKDTATYWRAGGVLRLLKNTTYRGEYRYGKRNTKGPNGKDVISVPCPAIVTPELWDAAQATLQRNALTATRNAKHTYMLKSLIKCGGCGCTYIGTRGKKWQGYACSGRSERSGKEQAARCRNPGLAMRDIEGEIWQHICELLSAPERHLEQRPLTLIPAELPLARTALAESRESRKRLTDLYLDPNGPLSKAEYLERLAGLDTQIAELESRISQLSDTAAQEQAYQQQAEELRALAQRYQGELDTADDGLRQTLAHHLVQRITVGADGGVDVEWVI

SEQ ID NO: 8527 - protein, 604 aa, synthetic construct
MKKVFVYHRVSSDQQLDGSGIARQAELLEGYLERTGICAEMDDPAPVVLSDQGVSAFKGLNISEGELGAWMEQVRNGMWDSSILVVESIDRFSRQNPFDVMGYINALMAHNVAIHDVMANIVISRSNSKDLPFVMMNAQRAYDESKYKSDRIRKGWAKKREQAFNKGTIVTNKRPQWIEVENDKYVLNHKAAVVKEIFALYQTGMGCPTIAKQLQTKEGEQYKFNRPWTGELVHKILTNRRVTGKIFISEIIRNHDDIENPVTQKKYDMDVYPVVINEEEFELVQELLKSRRPNAGRVTVKKDGQEEVLIKSNLFSGIARCTECGGPMYHNVVRAKRTPKKGDPKIEEYRYIRCLNERDGLCENKAMTYETVEHFVVEHLLGMDLNTVIKEQEFNPEIEVIRIQIDQVKDQITNYENGIERRKSAGKAVSFEMREELDDAKLELEQLLARQASLATVQVDLPVLQDVNVTELYNVNNVDIRTRYENELNKIVSNIRLKRNGNFYTIDIIYKQNELKRHVLFIENKKKEQKLISEVIIENVDGAKFYYTPSFVISVKDGEIRFQQTKEDLTIIDYSLLLNYVDAVDRCDAVGVWMRNNMSFLFTK

SEQ ID NO: 8528 - protein, 600 aa, synthetic construct
MAQKLYSYQRWSSAVQADGTTKARQTKAAEEYAQKNGLEIEEIVDAGVSGFKSANSDESGALGQFLRAVDEGLIARNAVLFVESLDRITRDEIDTALELFLGILRRGITIVTGMDNKVYTREAIKGNPVDLLTSILMFSRAHEESKTKQNRTNGNALALIDRFLKQGLPVNIKSVGSHPWWIDDSGSMYEAVKPHPVLWACAQLAMDNFMEGISVFKVTQMLNERFPHYYKGKAWAMANVRKLRLNKAVYGVREISVGGKTYVLPDYYPALISEGQFLRLQQIRTTTKYIGKAGEGRVVTDAEGNSKVIAERNNINLLSGMKLFRCGHCGGTMMAMRHGDTIRYLCEKGRGYHHDCKTWSLPGILVEHTLMLVTTIAYIELQQKGQGAKADYTQQINAMESTINGYSTQINKATKLAIALDDVDVDELAETIKELKAKRDNAIIELEVLQRKQLLANDSTFETIMMDFFTYAQYGVLQDPVHEYRSKLRDVVYSAISDVRAWKHDRRLFISFQIKGNDEYYNFSAGNTPYEWGCYVGALPFSQQELEVADGDVPEEVLERVRERYAVLHAANMMMLHQAKELLSHVGYPELDSKMFWPRK

SEQ ID NO: 8529 - protein, 604 aa, synthetic construct
MKKVFVYHRVSSDQQLDGSGIARQAELLEGYLERTGICAEMDDPAPVVLSDQGVSAFKGLNISEGELGAWMEQVRNGMWDSSILVVESIDRFSRQNPFDVMGYINALMAHNVAIHDVMANIVISRSNSKDLPFVMMNAQRAYDESKYKSDRIRKGWAKKREQAFNKGTIVTNKRPQWIEVENDKYVLNHKAAVVKEIFALYQTGMGCPTIAKQLQTKEGEQYKFNRPWTGELVHKILTNRRVTGKIFISEIIRNHDDIENPVTQKKYDMDVYPVVISEDEFELVQELLKSRRPNAGRVTVKKDGQEEVLIKSNLFSGIARCTECGGPMYHNVVRAKRTPKKGDPKIEEYRYIRCLNERDGLCENKAMTYETVEHFVVEHLLGMDLNTVIKEQEFNPEIEVIRIQIDQVKDQITNYENGIERRKSAGKAVSFEMREELDDAKLELEQLLARQASLATVQVDLPVLQDVNVTELYNVNNVDIRTRYENELNKIVSNIRLKRNGNFYTIDIIYKQNELKRHVLFIENKKKEQKLISEVIIENVDGAKFYYTPSFVISVKDAEIRFQQTKEDLTIIDYSLLLNYVDAVDRCDAVGVWMRNNMSFLFTK

SEQ ID NO: 8530 - protein, 482 aa, synthetic construct
MKAAIYVRVSTMEQAEEGYSLDEQVDKLKKYCEIKGWNIYKIYRDGGFSGANTDRPGLSEMINDAKLRAFDTVLVYKLDRLSRSQKDTLYLIEDILAANDIAFVSLNENFDTSTAFGKAMIGILAVFAQLEREQIRDRLLMGKIGRAKSGKAMAWGIPPLGYVLPESNREKYEIVPVEAEIVKKIYHDYIAGKLVAKICDELNAEGHIGKREPWVHANMKRTLTNPVYAGFIRYRGEVFEANHEPIVSKETFDLVQEQIELRQTRAYQKFNNPRPFQAKYLLSGLIKCGICGARFEVIQYKPRADGSRIRYYKCVSYSPKNHAPSMWKNSDGCTSPKYYLDDLEKELLSELEKLRDDPSLITSYVSKTNQIDVSGLKKRLKTLNNQLKKLVTLFIDNDFPKDVIESKKKIIMDEKKLILDKINEAESIKPEVSTNEVIDELGQIKISMFDLDYEEQKRIARKLIKEIILYPDKMEIHWAFAI

SEQ ID NO: 8531 - protein, 502 aa, synthetic construct
MEFIKKSASNEGIILKDDDFYEDKDTATSIVEREDVQRMIEDAKRGKISSIWFASLSRFSRDVIDAISLKRMLVNALKIRVVSIEDAYDSAKEDNELLFNIKAAINQNTSGDISRSSRRGIEQSAEKGNYIGSIPPFGYKKVTVDDPRMKSGKRKTLEVIPDKAEIIRKIFDLYVNHGMGEKSIVNYLNGDNENGEPIPSYKGGVWGLTSVQRILQNEVYTGYSVYGRHTNEVKHNIDNLMDRRRKLVQKHKSEWKKTKFQTHEAIISKELFDAAQDMRLKRGGGERGGRREFVNAFAKMIFCAECGSAMVTMKSKSRNGTDEYRYLLCSKRRRSGDAGCKNGKWIPYYSMRDELVGEILRRLKSRLSLIDSNDINAALPISGDNDKEKKQLEKRITDNRKLLFEIRRQNMQGELNKAQYEFEREEYEKEIEAAEKRLAVISANERRVIDLERIKKEVRTAIKKLSDMSSYDDTEKLRPLLMDCVQRIDVHADGVIDIKSYI

SEQ ID NO: 8532 - protein, 524 aa, synthetic construct
MTEGESYQTQQSAVIYCRVSSAKQKLAGGGLDSQEHRCRQYALSNNMDVAAVFPDDASGGGDFMKRPGMVALLSFLDAQPDRKYVVIFDDLKRFARDTQFHIMLRQEFARRGAAVECLNFKFEDTPEGRFAETIFAAQGELEREQNRRQTIQKMKARVEKGYYVFQAPVGYRYRRDARHGNMLVRDEPVASILAEALEGYALGRFQTQVEMKRFLESQPAYPKDLPNGEIRNQRIQDLLTRPVYAGMVAAPSWHVSPRKGHHEPLISVETFQRIQERLAGPAKAPIRKDINADFPLRGFVMCTDCGKPLTACWSTSKTGKRHAYYWCKTRGCASHRKSIRRDDLHGAVEEELKALQPTQSFAKLVGVMFRDAWTARLDQAATNVERAKAQAQTIERQIAKLLDRIVDAGSDSVIAAYEKRIADLEQEKLVLDERASRRGKPVHAYEEMFELAVRFLSNPWDIWAKGDLNWRRTVLRLAFARPITYSRKTGVRTPDLALPFKALRGFEMPKNGMARWGGFEPPTP

SEQ ID NO: 8533 - protein, 577 aa, synthetic construct
MSTDIQLKGDSLRRQEQASKLYAEQNDLQLVEDFKLEDIGVSAFKGANVVSGALGKFLTLIKNGGVPKGSYLLVESLDRISRQQVMDSLTVFFDIIRNGVSVVTLADSHVYRAGEAEITDILYSLIILSRAYEESATKSLRVGEAWRNKRDNASRKKLTKMAPAWVVLREDRSTFDLIPERAEVVRQIFQMADAGHGSFAIARRLNHTKVPTFTKSNGWHESYVTKILRSRAALGEFQPHRYDDKGNRIPYGDPVPDYFPRIVDEDQFLRIQSSRRRRLVDGAGRKGPEYRNLFTKIAKCHYCGEPMRFVHKGRPPKGSQALKCTNAVRNLGCDSTSWKYSDFETSFLFFVKEIDLTATLRAASDSSERATIEQKIAANDEKLHQLRAKQEATFDLVSMPGPSSGFLKSKLDQIADEIIETEQQLAQLKADLAETQFLPSISASELRSQIDSLQDMSAADIFDRRAVVANRLRSIVTSLRIAAKGSKPRLKKIADALEDEDVNEDYRRKLLAHIDDANSLTQSHNRTFTVTLADGVQRLVVVKGDDPTDFVSEVLIDADGKTSGSILGNAFNFLPTA

SEQ ID NO: 8534 - protein, 555 aa, synthetic construct
MRVVLYARYSSDTQRDASIEDQLRICRTYAEQQGWTIVDSYSDRAISGASLIRPGIQDLITDATAGRFEILLTEAMDRLSRDQEDIAGLFKRMTFAGVKIVTLSEGGEITPLHIGLTGTMNALYLKELANKTRRGLRGRVEQGKSGGGLCYGYDVVRQRDTRGEAICGERAINGEQANIVRRIFRDYADGKSPKAIALSLNAEGHHGPLSGAWSPSTINGNRERGTGILNNELYIGRLVWNRLRYIKNPNTGKRVSRLNPESEWTLHDVPELRIIEQDLWDAVKARQSKTTWSQKSRGTGVHPLNALQRPTHLLTGLIKCGCCGGGFSMISKHHLGCSTARNKGTCENRLTIRRDVLEKSVLNGLQTQMMDPALFKEFCDEFTREINRLRMEKGADLATLKSELPKIERELDKAVQAILDGFASSALKTRMEQLEARKAEIEARLAEAPSPPPLLHPNMAELYRQKIAMLQDSLQNEATGMRAKEAIRSLITRIRLIPENGTLGIFLEGDLAAMLGFATNKKNATHHPDAGVLNKFLVQDSMVAGAGFEPAAFRL

SEQ ID NO: 8535 - protein, 515 aa, synthetic construct
MKTAIYLRKSRADLEAEARGEGETLAKHRTTLLKIAKEMNLNVLSVREEIVSGESLVKRPEMLSLLEEIEDNKYDVVLCMDMDRLGRGGMKEQGIILETFKRSNTKIMTPRKTYDLNDEWDEEYSEFEAFMARKELKIITRRMQRGRVASVEAGNYLGTHAPFGYDIHRLNKRERTLTINPEEASVVRMIFDWYANEDMGANAIRSKLNDLGYKSKLGNEWNPYSILDILKNNVYIGKVTWQKRKEVKRPDAVKRSCARQDKSDWIIADGKHEPIIPESLFEQVQEKLNSRYHIPYNTNGIKNPLAGIIKCAKCGYSMVQRYPKNRKETMDCKHRGCENKSSYTELIEKRLLEALKEWYINYKADFEKHKQDDKLKETQVIQMNEAALRKLEKELVDVQKQKNNLHDLLERGVYTVDMFLERSNLVSDRITEITSTMENLKKEIKTEIKKEKVKKDTIPQVEHVLDLYFKTDDPQKKNSLLKSVLEKAVYKKEKWQRLDDFELVLYPKLPQDGDI

SEQ ID NO: 8536 - protein, 523 aa, synthetic construct
MNPVISYRRFSDKQQRKGDSLRRQTQAAQDYCLEHGLTLSDMSFEDLGVSAYHSDHTRGDKGFAKLLDALAESKIHTPCTLLVENLDRLSRANINVALRQLMSIVDYGVDVITLTDNRKYTSDMQMEDYIYCIITMQRAFDESDLKSKRLKAAHKRKREQPFESKRSKRCPFWLTTNALKTEHIFNDFAPLVREAFELSAQGVGAYTIAKRFNEKGWLTPKGKEWESSVIIRFLSNRQCIGEHQPCRMEGRKQIPEGEPIPDYFPRVVSDDVFFASLGQLRKRHKTQTHGSTLSHLNLLKDVGKCADCGSNLVLKTQDARKYLMCKNSAYGRCNAPKFNIAYLRDWLRECWLTPAFFKHWSNASNSKSDTRKLDTLRGELRSQETALESLLEGLTDTTNAVVIAHINKRTEAIKQLSDDVKSLEVELMSKPSAHKVDFKHCLALIDAAFIEGNAEEQLTARNRLQRLMERLPLFTVKSDKENGLEFVVAGNGEYTFTFKAIKNAYIFNKKVNAVWSMTGIIHH

SEQ ID NO: 8537 - protein, 506 aa, synthetic construct
MRHVITYLRYSSAIQGAEGADSTRRQNNLFKQWLKKNSDAQVVASFSDEGLSGYKGKHLTGQFGDMLARIESGEFPAGTILLVESIDRIGRLEHLETEALMNRILGNGIEIHTLQDGLIYTKDALADDLGISIIQRVKAYIAHQESKQKSFRVSQKWEQRAKLALAGEQRLTKMVPGWIDPDTFKCNEHAETVRLIFKLLLDGESLHNIARHLQANNISSFSRRKDANGFSVHSVRTILRSVTTIGTLPASQRNDRPAIPNYYEAAIDAATFNKAQEVLDKNRKGRTPASDNPLTINIFKGLFRCQCGASVHPTGTKNKYAGVYRCNNHLDGRCDVPPLKRKPFDRWMIDNFLGMIDVGNDGEAEGKIAALQHEVEIVTARIKKATALLLEMDDITELKTQVKGLNQKRTELQTTIDNMRRKASLTDKELPQLKDIDLTTKAGRVECQLILSKHLKGLTLGKDSVTVTLQNDTEITIPTDPLPLNDGTSIFEIAEKNLLNIDTFQL

SEQ ID NO: 8538 - protein, 507 aa, synthetic construct
MKRVISYIRFSSEKQAKGDSLRRQSKMVTDWLKAHPEYYLDQDLSFRDLGVSGFTGKHLKGGLGDFLTAIEKGLVKAGDTLLIESLDRLSRQAVDRASELLRNILRSGVDVVTLSDGEHYTRESLRDPLSLIKSILIMQRSHEESLRKSERIQAAWDAKKEAAKAGIKVSKRCPAWLRLNDDRKSFSVIPDKVETVKRCFQLRLEGKSIWEIVRTLNAEGHRSMNQYKPGKFGQTSVQDLLKNRSVIGYFTPKGCEEIAGYYPSVIDETTFYKVQQLSHSHYGRKPASAKPLSVNLFKGVIRCSECGHALIITGFSDTRNGIYRCPLRNENRCSAKGLSRKQTDGTLLTLLSRLDRFDSDMTNTIDTLKLHREHISSNIEKLVQLSLEIEDLNAITNKLKQLKNELSQVDADIEKETQRLKSIDTGSLSDCDLSTKAGRIEAQLIIKSAVKEVVLNTAKRRCKVTFHNGKSITLPITENPSEDVTEAIQSLSEVTERGLIDVDVVEI

SEQ ID NO: 8539 - protein, 484 aa, synthetic construct
MNKVAIYVRVSTTMQAEEGYSIDEQIDKLTSYCKIKDWTVYDIYKDGGFSGGNIERPAMERLISDANRKRFDTVLVYKLDRLSRSQKDTLYLIEEIFGKNDISFLSLNESFDTSTPFGKAMIGILSVFAQLEREQIKERMLLGKIGRAKSGKSMMVSKVSFGYTYDKLKGELIVNQAEALVVRKIFDEYLGGRSLIKLRDYLNSNGIYRGDKYWNYRGLLLILSNPVYIGMIRYRGEIYPGNHQPIIDTEVFNKTQEEIKKRQIEALEFSNNPRPFRAKYMLSGLAKCGYCGTPLKIILGYKRKDGSRSMRYQCINRFPRNTKGITIYNDNKKCDSGFYEKADIEEFVIAQIRGLQLNSYKLDNMFDKQPIIDVEGIEKQITSLDNKLKRLNDLYLNDMIELDDLKKQTQSLRKQKTMLEDELINNPAIMQDKNKNHFKEILGTKDITTLDYETQKSIVNNLVNKVFVKAGHIKIEWKIPFKKV

SEQ ID NO: 8540 - protein, 526 aa, synthetic construct
MIAVYCRVSTEDQHERGTIENQIEFAKKYCDLHELPIFKIYKEDGISGTIPLEDRPCGKELLQDAENKKIDTLLLYKLDRLGRSARITLNSIHLLEQLNVQIKSMTEPFDTSSPSGRFMITMLAGVADLERSTILERMWLGTNRAAREGKWLGGIVPYGYYVDNKKYLQINNNKLPNLDLSEADVIKLIFSLSVDKGYSSIQISDYLNSLGIPTSYMKDNRRFAKGKRKVSVAGTWGPSTVLRILRNKTYMGIHEYGKRSKKKNREIITRKIPSIVSEDTWYKAQETIEDNKIEANRNRKRQYLLRGLIKCSICGRTYVGANHGKNKYYYICNGKITYRDSCKSKNLNGKYIEELVWNDIVEFINNPKDSINVLKENLNSKNNDKLLEHKKCLEQNLKTKDTEKQSILDLFRKNLIDYSDVEIQLNKINEEYNNIILAIDYIEKDIKSCNDINNIDTINELLNNMKKKINGQLNFEDKRNIVKMLVDKITVETKKDNAGTKKAILHINYVFKVSSHTDKDLMKQLT

SEQ ID NO: 8541 - protein, 520 aa, synthetic construct
MTEKNIMVIPARKRVGSTAAKEKIKKLRVAAYCRVSTETEEQNSSYEVQVAHYTEFIKKNNEWEFAGIFADDGISGTNTKKRDEFNRMIAECMDGNIDMVITKSISRFARNTLDCLQYIRQLKDKNISVYFEKENINTMDAKGEVLLTIMASLAQQESQSLSQNVKLGLQYRYQQGKVQVNHKRFMGYTKDEDGNLIIVPEEAEIIKRIYREYLEGQSLVGIGRGLEKDGILTAAGKRRWRPESVKKILQNEKYIGDALLQKTVTVDFLTKKRVKNEGHVPQYYVENSHEAIIPKELYLQVQEEIHRRSNIYTGAGKNKRIYSSKYALSAITFCGECGDIYRRTYWNIHGRKEFVWRCVTRIEQGPEVCKNRTVKEDKLYGAVMTAINKLLAGGNNMIKTLEENIHAVIGETTEYQISEINNLLEEKQKELIKLANKGQDYDHLADEIDGLRDKRQLLLVEDASLSGENERINELIEFIRKNKFRTLEYDDKLVRKIIQSVTVYEEHFVISFKSGIEIEI

SEQ ID NO: 8542 - protein, 520 aa, synthetic construct
MKKITKIDELPQGQLPNTKLRVAAYARVSTDSDEQLESLKAQREHYERYIKSNPEWEFAGLYYDEGISGTKMEKRTELLRMIRDCKQGRIDFIITKSISRFARNTIDCLELIRKLIDIGVYIYFEKENLNTGDMESELMLSILSGFAAEESASISQNSTWSIQKRFQNGSYVGTPPYGYTNIDGDMVIVPEEAEIIKRIFAECLSGKGGGTIARGLNKDKIPARRGNHWSAGTVIDMLRNEKYMGDVLLQKTYTDSNYNRHSNTGEKDQYYYKDNHEPIISREDFAKAQDLIDERAKMKCKGVKKNVYLNRYALSGKIVCGECGRNFRRKTNYSAGRSYIAWSCIGHIEDKESCSMLFLRDGEIKATFTTMMNKLAFSHKLILEPLFKSISQIDEESDRERMDAIDKRMEQLMEERNTLITLMAKGFLEPVLFNQERNVLDSEMKNLSTEKTNLVSNSTSGVLRANDIKDLIDYVAADNFNGEYTEELFEEFVENIIVNSRDELTFNLKCGLSLKEKVVR

SEQ ID NO: 8543 - protein, 523 aa, synthetic construct
MAVNKNVMIIPAIKRVGNNRKEDETPKLRVAAYCRVSTDSDEQASSYEVQIEHYTEFIKKNSEWEFAGIFADDGISGTNTKNRDEFNRMIDECMAGKIDMVITKSISRFARNTLDCLQYIRKLKDKNVAVYFEKENINTLDAKGEIMLTIMASLAQQESQSLSQNVKLGYQYRYQQGEVMVNCSRFLGYTKDENKRLVIVPEEAEIVKRIYREYLEGSSMDKIKKGLEADGILTGAGKKRWHTSTIRKILSNEKYIGDALLQKTYTVDFLTKKRVVNNGIVPQYYVENNHEAIIPREIFMQVQEELVRRSRGHISTSGKKRNFSSNHVFSQIIFCGECGEIYRRVHWNNRGKKSIVWRCVSRLENTGLTCHSRTVLEDMIGLATVDVINKLIGQKDGFLTILKENIETVISETDNNIVAEIDKKLEELQKDLLRLANSKEDYNDIADEIYRLREERHKALAEEAGKKGSKQRLEDMEKFLNEQSTFLEEYDEQLVRRLIEKITVYDDKLTIEFKSGVEIDIEK

SEQ ID NO: 8544 - protein, 519 aa, synthetic construct
MKKITKIEGNKVASIIKPKLRVAAYCRVSTGSDEQLVSLQAQKSHYETYIKANPEWEYVGLYYDEGISGTKKENRTELLRMLSDCENKKIDLIITKSISRFARNTTDCLEMVRKLLDLGIYIYFEKENINTQSMESELMLTILSGLAESESISISENNKWAIQRRFQNGTFKISYPPYGYDNIDGQMVVNPEQVEIVKYIFAEVLSGKGTQKIADDLNQKGIPSKRGGRWTATTIRGILKNEKYTGDVILQKTYTDSRFNKRTNYGEKNRYLIENHHEAIISHEVFEAVEAALNQRAKEKGIEKRNDKYQNRYSFSGKIICSECGSTFKRRIHSSGTRKYVAWCCSKHLKQITECSMQFIRDEDIKTAFVTMINKLIFGRKLILQPLLDALRGMSNSDNLSRIQELEKQIEKNAEQRELLVKLMAKGYLEPALFNRENNELQMEADNYMGQKEALIHALNGELSKVQEVSNLIKFTNKAEMINTFSEQIFNDYVEKIIVFSRVEIGFVLKCGITLRERM

SEQ ID NO: 8545 - protein, 554 aa, synthetic construct
MKSPAKHDKPDNANGEQATLRAALYLRVSTGRQAESDLSIPDQRRQAMNFCAARGWQVVIEFVDAGLSGTDDKRPELQRLLDMATSGGAPFDVVIVHSFSRFARDHFALEYHVRRLRKAGVRLVSITQDLGDDPMSVMVRQVFALFDEYQSKENAKHVLRAMQENARQGFWNGAAAPYGYAIIAAEQRGSKTKKRLAIDPVEAEIVRLMFRLLAEGDGVNGPLGVKAATSWLNERGHRTRRGARWGIGQLHKLLTSTTYKGEYRFNRKVWKTKEDKPETEQVAVPVDPIIEPALFDAVQARLKARNPKTTPPRVVTGPILLTGIATCASCGGGMTLRTGKSGRYRYYTCGTCAQQGKTACKGRSIPMDKLDTLVTERLSETLFTPDRVRTILGGLLERQASRSEDHTHRMTALQNKVADTENRLSRLYQAIENGIADFSDPTLKDRLATLKADRDQAKASLDRAFAELRPETRITEEKITAFASLMRENVTNGPIPFRRAYLRAVIDQVEVDDTEIRIHGRKSILERLVMGGGAAPEGVPSFVRKWRTRQDSNL

SEQ ID NO: 8546 - protein, 533 aa, synthetic construct
MKRAVVYARYSTDLQNDKSVEDQLRLCEAHAERLGVRIVRAFHDRAKSGASMFGRTGLTEMMQAAERNEFDILISEHTDRISRDIADLAHIHKLLKFRNIEINCVNGGAIDTVQVGMYGVIGQMQREEGAKKTKRGMVGVIRSGRSAGGKAYGYEPVPGRPGELQIIAEEANVVRRIFRLYAAGVSPRNIAGGLNADEIAPPRGSHWNASTLNGSGARSYGILRNPMYNGQIVWNRVHMVKDPSTGRRISRTNEASEVITMDAPHLRIVDEALFLSVQKHKREREGDKGRSAPRGKRLLSGLLRCRNCGGSLSAIGADRSGPRVACSVHRESGTCNNTGRYYVERIEMKVLDTLRQQFADTAVIGAYVKEYEEERRRAASELRRNRASIERQLDETKKAISRVVEKLAMGLIEDEDAQGILPGLRSTRDKLSADLAGMEKPTNVVELFPLALKKFKDDLERLADILSLNSDTPDPDMVAAFRTVVASVIVDPRAPGEDYRIEIKGYLASLIKPEMSSEVLVAGEGLEPPTRGL

SEQ ID NO: 8547 - protein, 533 aa, synthetic construct
MKRAVIYARYSTDLQNDKSVEDQISLCKAYAERQGFKLVKDYFDRAKSGASMFGRPGLADLMQAAERGIFDVLVAESPDRISRDIADLAHVHKTLRFRGITMNCVNGGEMDTIQIGMHGIVGQMQREEGAKKVKRGMTGVVRSGRNAGGKAYGYRPVYGKKGELEIIQEEASIVRRIFDLYSAGVGPRSIAAMLNDEGVTAPRGRQWNASTINGNDKRGYGILRNPLYVGKIVWNRVHMVKDPSTGRRVSRTNDEAAVETIDAPHLRIIDDSLFEAVRKRKEAVGGKHAHTAPKNKRLLSGLLKCAACGGGLSIIGADRSGPRVVCSTWKESKSCSNNARYYVEKIERDVIDRLRIIFADTSVIDAYVEEYKAESKRIAQERRNSRGSKENALADIQAKITRVIERVAAGTIDEEDVLAVLPGLKAERSRLKAELEAEEPPTNIIELKPKAVEKFREDVEQIAEIVNAPGAEPMIELGKAFREVVSSVVVHPRAPGEKYQYEIKGWLSAIAGEELSAVLMVAEEGFEPPTQGL

SEQ ID NO: 8548 - protein, 520 aa, synthetic construct
MSSQRAAIYARFSTDLQSERSVDDQIAICREFAVRNGYVVSKAYFDKARSGASILGRDGLLSLMDDARAGNFNVIIVEALDRLSRDQEDLPHLYKRLTHHGVEIIAVHDGRADPIQVGIRGLVSTLFLADLKNKIRRGMTGVVRDGRHAGGRAYGYRPTPGQPGVLQIYEPEAAVVRRIFAEILAGRLPREIANGLNRDGIQPPRGVSWNASTINGSAQRGNGIIRNPLYAGKIVWNRVRMVRDPETGKRISRINDVDEHREADAPHLALIESHVFEAAIEMVESRARRAKGGEYVRRPKRLLSGLLRCSHCGGGMSMHDRQGDAIRIRCSRSIESGTCENKRRYRLDKIEAAVVAGLRTQMLHPDLLTEYVRVYREERRDEAAKAARERSSLERRLSDVSSQMDRLLQAMARGILPIEAVEAQFKPLEAEKAQLAAELAVVPQSTAIELHPHAVTQYRKAVEDLSGRLSDLDQHADAEALASFRALVDRVVIHDTPTGGVEAEVISRLSALIGNVVRHQ

SEQ ID NO: 8549 - protein, 512 aa, synthetic construct
MNLTTKAQVAAVYARFSSELQLDRSIDDQLALCRSFAARQGFQVVEEFADRARSGASIFGRDGLLSMLERAKARAFDVVIVEALDRLSRDQEDLAAIFKRLQFIGVDIVAVHDGRADAVQIGIRGLVGSLYLTDLANKVRRGLAGRVKEGLSAGGKAYGYRPILGKPGELEIDPAEAAVVLRIFREFADGVSPRVIAASLNKDGILPPRGAVWNASTINGSATRQNGILRNSIYGGKLVWNRLRMIRDPETGKRVSRMNPESEWQKADVPHLRIVDEETMSIVTERVNGRRSRSGSYTPRNKRILSGLLVCGACGGGMTLDGKTNNHPRIRCSRSKESGSCDHHRKYPLKVIEDGVINALKGRLDTQSAQEDFIKEYVAERLRLSRRSMRDSGTIERQIAKRKQEIERLIDAYVEGVIEIRQLSERRSTIDAEISRMENELAATPVVEPGALVADARIAFDRDTDQIADLIAVAVPNEAIVAPLRRFIDRVIIHPSPPFQDIQITLAGKLEI

SEQ ID NO: 8550 - protein, 638 aa, synthetic construct
MKITVRPKAYSYIRMSTERQLSGDSLRRQLQDTRDYAAKNNLDLDESLRDIGVSAYTGENVENGALGRFLQLVKSNQIAQGSYLIIESLDRLSRKNVLEALPPFLAILQAGIIIVTLADKQVYSAQSIGDNPYQLMGSLVVMIRANEESATKSKRIKEAMSKMREAALRGEGRYNINLPTWIDVTKGPNGTVTYSLNEHAETVRLIYELAAEGVGQMEICRILHRREIPTFSKKAKGWHQSAVSHILSYPAVIGTYAKKDNLRGRYVVVGPEQRGFFPAAVDEDLYLRAQKAKRAPAHKGRKGNDFSNLFVGMITCRTCGGPMSLYYGRTHEYKYLRCYNRMRTFKRYGEQKKQFQCTNGVGISYPALEIAILDHVPEFKLHEVFRSQSGAVDLNAIAKNLIAIETDLQNLEAKNSSLIEELSATPKNLRHLFHQQLQRNSELQEQLEKQKDTYEAQRINALAADEASNDIERQVREERDSWPALAGEELYRSRSRIHTAFKHFIDGMSFDPDTKELLVYIANGFRAYKFKEGKLVATFDAVTMGHASDKPGAMRPEHFATDVRLQRDDEKSLLPESVNDLTAKMQVVTSLFDAKANRNIPNPVNPHLNDPDVIALKAKRQAAKEAAQREKASTNNAD

SEQ ID NO: 8551 - protein, 533 aa, synthetic construct
MKRAVIYARYSTDLQNDKSVEDQISLCKAYAERQGFKLVKDYFDRAKSGASMFGRPGLADLMQAAERGIFDVLVAESPDRISRDIADLAHVHKTLRFRGITMNCVNGGEMDTIQIGMHGIVGQMQREEGAKKVKRGMTGVVRSGRNAGGKAYGYRPVYGKKGELEIIQEEASIVRRIFDLYSAGVGPRSIAAMLNDEGVTAPRGRQWNASTINGNDRRGYGILRNPLYVGKIVWNRVHMVKDPSTGRRVSRTNDEVAVETIDAPHLRIIDDSLFEAVRRRKEAVGGKHAHTAPKNKRLLSGLLKCAACGGGLSIVGADRSGPRVVCSTWKESKSCSNNARYYIEKIERDVIDRLRVMFADTSVIDAYVEEYKAESKRIAQERRNSRGSKENALADVQSRIARVIEQVSRGTIDEDDVLAILSDLKAERRRLKAELEAEEPPTNIIELKPKAVEKFREDVEQIAEIVNAPGAEPTIELGKAFREVVSSVIVHPRVPGEKYQYEIKGWLSAIAGEELSAVLVVAEEGFEPPTQGL

SEQ ID NO: 8552 - protein, 547 aa, synthetic construct
MKLLVTYIRWSTKEQDSGDSLRRQTNLIDAFYSKHKNDYYLLPAHRYVDKGKSGFHQQHKNQGSDFRRMFENVMSEAIPEGSLIVVENFDRFSRADIDTAIDDVRQILRKGVSILTLGDGELYDKSALTDPVKLIKHIIIAERAHQESLVKQKRIAQVWNHKTQLARELKKPMGKQAPGWLELSEDGSHYIVDEDKASLVNIIYDKRLSGMSMFAICKWLNEQGYPTINQRKVRISKTKKPDGNWSALSVKHILTSRSVLGYLPAKISTEDRKTVLREEIESFYPQIVTDSKFYAVQQLLEETGKGKTSSGEHWLYVNILKGLIRCKCGLVMTPTGIRKPVYQGTYRCNGNKESRCNYGTVSRKLLDTQLCSRLFSKLSQLHDEATDTAKLDELQRRLNTVDSELEKLTETLIQLPNITQIQEALRVKQGEKDELIVQLSREKARVKSVSSLDLSGLDMESVEGRTEAQIIIKRLVKEIVVSGNEKLVDIYLHNGNMIRGFPLDGKDDHTLTLEEATDEMQPLDDMLIFGEPVTRIYPAGDMEEVDA

SEQ ID NO: 8553 - protein, 506 aa, synthetic construct
MRSVITYLRYSSAIQGAEGADSTRRQNDLFKQWLKKNSDAQVVASFSDEGLSGYKGKHLTGQFGDMLARIESGEFPEGTILLVESIDRIGRLELLETEALMNRILGNGLEIHTLQDGLIYTKDALADDLGISIIQRVKAYIAHQESKQKSFRVSQKWEQRAKLALAGEQRLTKMVPGWIDPDTFKLNEHAETVRLIFKLLLSGESLHNIARHLQSNGIKSFSRRKDANGFSVHSVRTILRSETTIGTLPASQRNDRPAIPNYYEAAIDASTFNKAQEILGKNRIGRTPASDNPLTINIFKGLFRCQCGASVHPTGTKNKYQGVYRCNNHLDGRCDVPPLKRKPFDKWMIDNFLGMIDVGNDGEAEGKIASLQHEVEIVTTRIKKATALLLEMDDIDELKIQLKELNQKRTELQTTIDNMRRKASLTDKELPQLKDIDLTTKAGRVECQLILSKHLKGLTLGKDSVTVTLQNDTEITIPTNPLPLNDGSPIFEIADKELLDIDAYQL

SEQ ID NO: 8554 - protein, 506 aa, synthetic construct
MRSVITYLRYSSAIQGAEGADSTRRQNDLFKQWLKKNSDAQVVASFSDEGLSGYKGKHLTGQFGDMLARIESGEFPEGTILLVESIDRIGRLEHLETEALMNRILGNGLEIHTLQDGLIYTKDALADDLGISIIQRVKAYIAHQESKQKSFRVSQKWEQRAKLALAGEQRLTKMVPGWIDPDTFKLNEHAETVRLIFKLLLSGESLHNIARHLQANNISSFSRRKDANGFSVHSVRTILRSETTIGTLPASQRNDRPAIPNYYEPAIDASTFNKAQEILDKNRKGRTPASDNPLTINIFKGLFRCQCGASVHPTGTKNKYAGVYRCNSHLDGRCGVPPLKRKPFDKWMIDNFLGMIDVGNDGEAEKEIASLQHEVETVTARIKKATALLLEMDDIDELKIQLKELNQKRTELQTTIDSMRRKASLTDKELPQLKDIDLTTKAGRVECQLILSKHLESLTLGRGQVTVKLSNGTEIIVPTDPLPLTDGAAIFEIAEKNLLNIDTFQL

SEQ ID NO: 8555 - protein, 507 aa, synthetic construct
MKRVISYIRFSSERQAKGDSLRRQSKMVTDWLKAHPEYYLDQDLSFRDLGVSGFTGKHLKGGLGDFLTAIEKGLVKAGDTLLIESLDRLSRQDIDIASELLRRILRAGVDVVTLSDGEHYTKESLRDPLSLIKSILIMQRAHEESLRKAERIQAAWDAKKEAAKAGIKVSKRCPAWLKLNDDRKSFSVIPEKVETVKRCFQLRLEGKSIWEIVRTLNDEGHQSMSQYKPGKFGQTSVQDLLKNRSVIGYFTPKGCEEIAGYYPAIIDETTFYKVQQLSHSRYGRKPASAKPLSVNLFKGVIRCSECGHALIITGFSDTRNGIYRCPLRNENRCSAKGLSRKQTDGTLLALLSRLDRFDSDTTNNINMLRLHREHISSNIEKLVQLSLEIEDLSAITSKLKQLKGELSQVDADIEKETQRLKSIDVGCLSDCDLTTKAGRIEAQLIIKSAVKEVVLNTAKRRCKVTFHNGKSITLPITENPSEDVTEAIQSLSEVTERGLIDVDVVEI

SEQ ID NO: 8556 - protein, 606 aa, synthetic construct
MNTKVKLIKASNLGARNRNALHLDLKRVAAYCRVSTDSKDQLESYKSQVDYYTNLIKNNKNWTLAGIYADEATTGTTATKRADFMRLISDCQNGDIDMIITKSISRFARNTLDTLKYVRLLKENNVGVVFEEENIDTLTMDGELLLTILSSVAQQEVENTSAHVKKGLKMKMEKGELIGFQGCLGYDYDPITKSISINEEEAKIVRYIFKRYLEGNGGSVIGRELEEQGYLTPRGKTKWSDTTVLGVIKNEKYIGDILMGKTFTVDPITKRRLANFGESDKYHIENHHEAIISKEDFEKAQEIRLRRAQNRNTIANKDRKREKLSRQYAFSSMLECGFCGEILSRRTWHTSSIYKKINWQCVKSTKKGKKYCPHSKGIQEAAIEKAFVESYRQLCHADSTIIDDFLKIVEEEINDETLVKDLKKLENQLNRIISQERKLVDLHLEDSIDEEVYAKKYKKLTKQKEELLDEKKTLELTIKDEDSIKERLKQFKKVLENREIIEEFNRTVFESIVDKVVVGRIDKDGTVHPYDLTFYFKTGVKDSQDSNNFKDKRKNAKDNDINKLCSYKNDEDKKLCSQSKDNACGDGSSVVQTKHRTSFRYRNRGR

SEQ ID NO: 8557 - protein, 558 aa, synthetic construct
MLKEKIKVYLYTRVSTSIQIEGYSLEAQKSRMKAFAIYNDYEIVGEYEDAGKSGKSIEGRKQFNRMMEDIKSGKDGVSFVLVFKLSRFARNAADVLSTLQIMQDYGVNLICVEDGIDSSKDAGKLMISVLSAVAEIERENIRIQTMEGRIQKAREGKWNGGFAPYGYKLEDGKLFINEEEAVAIRTIFDQYVNTTIGANGLSKYLENHGIRKIPRQNGKNPLFDAGLIRKILKNPVYNGKIAFGRRTLEKVHGTRNEYKQVEQDEYLISEGIHEAIVSDEVWQAAQVKLKSQAKKYEHVNKGKDTRTHLLSGIVKCPICGVGMFGNKCTKKKKDGTKYKDFYYYGCKHRQMIRGHKCTFSKQIREELLDDAVAEVIVKIVSNPKFASMMQEKINMKVDTSEIEKEIDNYQKELRKSHSTKFKLIEEIDNLDVEDKHYKRRKQDLDDRLYRMYDKIDELESSLIDAKAKKQTIEAEKLTGDNIYKVLIYFDKLYKVMNDVERRQLITALISEIQVYEEKQPNGQWLKSITFKLPIIDDDLNISLDNDEQVEAIALIQKM

SEQ ID NO: 8558 - protein, 503 aa, synthetic construct
MKRIAIYSRKSVFIEGSISIETQINMCKEYMISKFPDATFEIFEDEGFSGGNTNRPAFQKMLKLAELKEIDIVVCYKIDRIARNTLDFLNILEIFKKNNVELVSITEGFDPNTQMGKVMLTLLASFAEMERTNIQQRVKDSMFSLAQKGNWTGGAPPLGFKVKESGGIEIDNKNLILDVFNMKFKKYKNTEIIEYIESKYNHRFVNTTLASMLRKPVYAKSSKEISTYLKTKGYKILREENNSNSYYTYKNNNQDYAIVNNDIEGLIDPYVWISINKAMDDNSNGETNRFSEKFWLTKTLRCKYCGKTYFGQTKIVKSKYTNKDGVSKEYIGTYEYYMCRDMLKGRLKTCENTKRLKKVDLEKKIEELIYILKDRSIFEKKYYKKEVDNPAKELKELESNMKKLDKTINNLTDKIALLSNDAAMILIDKIETLVKEKKVLKDKMIKIELESLDNIDGKEEFIYENILEFNTNLSVDQKRNIAINIFKEIVYDYKTDKFEVFFN

SEQ ID NO: 8559 - protein, 532 aa, synthetic construct
MARTVTAIPATRALHTGAPLGQTTLRRVAGYARVSTDHDDQVTSYEAQVDYYTRYISDHAGWQFVKVYTDEGITGTSTKHRAGFQQMVTDALDGKIDLIITKSVSRFARNTVDSLTTVRALKDKGVEVFFEKEGIWTFDAKGELLITIMSSLAQEEARSISENVTWGHRKRFADGKVTVPYSRFLGYDKGEDGSLVINPEQAKTVRRIYNMYLGGMSIGTIARTLTDEPETFTAAGNKTWYYRSIRAILTNEKYKGDALLQKSYVADYLTKRQVINQGEVPQYYVTASHEAIISPAVWDFVQAEIAKGARDQRTQHRTRPFSSTFECSQCGHFFGSKTWHAGSKYEKVIWRCGHKYAGQDKCATGHISDQRLKDMFLEAIRLRFGSPTDTGVSQAVLDALDTSDLEVEAAGLLAQINEVAKKLQSMIAHNARVAQDQQAYEKAFNASHEQHQALLAEHAAVVAEIQNKNNRLAAYHYYREETANLDLEQLVFSPYLCVALLEKGTVDVDGNVTFQFRDGSTQVVAIKPSDGA

SEQ ID NO: 8560 - protein, 496 aa, synthetic construct
MYGYNLKPCLTRRNTLKRMEQITPPPISASPLVKVAAYARISMETERTPLSLSTQVSYYQQLIHDTPGWTFAGVFADSGISGTTTHRPQFQEMLALAREGAIDLILTKSISRFARNTVDLLETVRELKDLGVEVRFEKENISSTSADGELMLTLLASFAQAESEQISQNVKWRIWKGFEEGKANGFHLYGYTDSADGTDVQIIEEEAAVVRWIFAQYMKETSCEKMAAQLIADGRVPHLADNKLPGEWVRHILKNPHYTGDLLLGRWSTPEGRPGRAVRNTGQLPQYLVENAIPAIIDRDTFVAVQTEIARRRELGARANWSIETVALTSKIKCVSCNCSFVRNVRNPKTQNSISTEHWICTERKKGRKTGCGTCEISDTALKGFIAQVLGIEAFDEDVFNERIDHIDVQGKDHYTFQYTDGTSSSHTWRPNLKKSSWTPARKAAWGELVRARWAEAKRLGLDNPRQAPTPPEALAKYRAVAKAEAERLRAERGER

SEQ ID NO: 8561 - protein, 507 aa, synthetic construct
MKRVISYIRFSSERQAKGDSLRRQSKMVNDWLKAHPEYYLDQDLSFRDLGVSGFTGKHLKGGLGDFLTAIEKGLVKAGDTLLIESLDRLSRQAVDRASELLRNILRSGVDVVTLSDGEHYTKESLRDPLSLIKSILIMQRAHEESLRKSERIQAAWNRKKELISEGIKISKRCPAWLKLNDDRKSFSVIPEKVETVKRCFQLRLEGKSIWEIVRTLNAEGHQTLNQYKAGSFGQTSVQDLLKNRSVIGYFTPKGCEEISGYYPSIIHETDFYKVQQLSYARHGRKPASAKPLSVNLFKGVIRCSECGHALIITGFSDTRNGIYRCPLRNENRCSAKGLSRKQTDGTLLTLLSRLDRFDSDTTNTIDTLKLHREHISSNIEKLVQLSLEIEDLNAITSKLKQLKGELSQVDADIEKETQRLKSIDVGCLSDCDLTTKAGRIEAQLIIKSAVKEVVLNTAKRRCKVTFHNGRIIDLPITENPSEDVTEAIQSLSEVTERGLIDVDEVII

SEQ ID NO: 8562 - protein, 507 aa, synthetic construct
MKRVISYIRFSSERQAKGDSLRRQSKMVNDWLKAHPEYYLDQDLSFRDLGVSGFTGKHLKGGLGDFLTAIEKGLVKAGDTLLIESLDRLSRQDVDQASELLRNILRSGVDVVTLSDGEHYTRESLKDPLALIKSILIMQRAHEESLRKAERIQAAWNRKKELISEGIKVSRRCPAWLRLNDDRKSFSVIPEKVETVKRCFQLRLEGKSIWEIVRTLNDEGHQTLNQYKAGKFGQTSVQDLLKNRSVIGYFTPKGCCEIAGYYPSIIPESDFYKVQQLSYARGGRKPASDKPLSVNLFKGVIRCSECGHALIITGFSDARNGIYRCPLRNENRCNAKGLSRKQTDGTLLALLSRIDRFDSDMTNTIDTLKLHREHISSNIEKLVQLSLEIEDLSAITSKLKQLKGELSQVDADIEKETQRLKSIDVGCLSDCDLTTKAGRIEAQLIIKSAVKEVVLNTAKRRCKVTFHNGKVIDLPITEAPSEDVTEAIQSLSEVTERGLIDVDEVII

SEQ ID NO: 8563 - protein, 507 aa, synthetic construct
MKRVISYIRFSSERQAKGDSLRRQSKMVNDWLKAHPEYYLDQDLSFRDLGVSGFTGKHLKGGLGDFLTAIEKGLVKAGDTLLIESLDRLSRQAVDRASELLRNILRSGVDVVTLSDGEHYTSESLKDPLALIKSILIMQRAHEESLRKSERIQAAWDAKKEAAKAGIKVSKRCPAWLKLNDDRKSFSVIPEKVETVKRCFQLRLEGKSIWEIVRTLNDEGHQTLNQYKAGKFGQTSVQDLLKNRSVIGYFTPKGREEIAGYFPSIIHETDFYKVQQLSYARHGRKPASAKPLSVNLFKGVIRCSECGHALIITGFSDTRSGIYRCPLRNENRCSAKGLSRKQTDGTLLALLSRLDRFDSDTTNTIDTLKLHREHISSNIEKLVQLSLEIEDLNAITNKLKQLKNELSQVDADIEKETQRLKSIDVGCLSDCDLTTKAGRIEAQLIIKSAVKEVVLNTAKRRCKVTFHNGKSITLPITENPSEDVTEAIQSLSEVTERGLIDVDVVAI

SEQ ID NO: 8564 - protein, 498 aa, synthetic construct
MKRVISYIRFSSERQAKGDSLRRQSKMVNDWLKAHPEYYLDQDLSFRDLGVSGFTGKHLKGGLGDFLTAIEKGLVKAGDTLLIESLDRLSRQDVDQASELLRNILRSGVDVVTLSDGEHYTRESLKDPLALIKSILIMQRAHEESLRKAERIQAAWNRKKELISEGIKVSRRCPAWLRLNDDRKSFSVIPEKVETVKRCFQLRLEGKSIWEIVRTLNDEGHQTLNQYKAGKFGQTSVQDLLKNRSVIGYFTPKGCCEIAGYYPSIIPESDFYKVQQLSYARGGRKPASDKPLSVNLFKGVIRCSECGHALIITGFSDARNGIYRCPLRNENRCNAKGLSRKQTDGTLLALLSRIDRFDSDMTNTIDTLKLHREHISSNIEKLVQLSLEIEDLSAITSKLKQLKGELSQVDADIEKETQRLKSIDVGCLSDCDLTTKAGRIEAQLIIKSAVKEVVLNTAKRRCKVTFHNGKVIDLPITEAPRKMLQRLYSRFLKSLRGV

SEQ ID NO: 8565 - protein, 508 aa, synthetic construct
MKKAIAYMRFSSPGQMSGDSLNRQRRLIAEWLKVNSDYYLDTITYEDLGLSAFKGKHAQSGAFSEFLDAIEHGYILPGTTLLVESLDRLSREKVGEAIERLKLILNHGIDIITLCDNTVYNIDSLNEPYSLIKAILIAQRANEESEIKSSRVKLSWKKKRQDALESGTIMTASCPRWLSLDDKRTAFVPDPDRVKTIELIFKLRMERRSLNAIAKYLNDHAVKNFSGKESAWGPSVIEKLLANKALIGICVPSYRARGKGISEIAGYYPRVISDDLFYAVQEIRLAPFGISNSSKNPMLINLLRTVMKCEACGNTMIVHAVSGSLHGYYVCPMRRLHRCDRPSIKRDLVDYNIINELLFNCSKIQPVENKKDANETLELKIIELQMKINNLIAALSVAPEVTAIAEKIRVLDKELRRASVSLKTLKSKAVSSLGDFHAIDLTSKNGRELCRTLAYKTFEKIIINTDNKTCDIYFMNGIVFKHYPLMKTISAQQAISTLKYMVDGEVYF

SEQ ID NO: 8566 - protein, 507 aa, synthetic construct
MKRVISYIRFSSEKQAKGDSLRRQSKMVTDWLKAHPEYYLDESLTFRDLGVSGFTGKHLKGGLGDFLTAIEKGLVKAGDTLLIESLDRLSRQAVDRASELLRNILRSGVDVVTLSDGEHYTSESLKDPLALIKSILIMQRAHEESLRKSERIQAAWDAKKEAAKAGIKVSKRCPAWLKLNDDRKSFSVIPEKVETVKRCFQLRLEGKSIWEIVRTLNDEGHQTLNQYKAGKFGQTSVQDLLKNRSVIGYFTPKGREEIAGYFPSIIHETDFYKVQQLSYARHGRKPASAKPLSVNLFKGVIRCSECGHALIITGFSDTRNGIYRCPLRNENRCSAKGLSRKQTDGTLLALLSRLDRFDSDMTNTIDTLKLRREHISSNIEKLVQLSLEIEDLSAITSKLKQLKNELSQVDADIEKETQRLKSIDVGCLSDCDLTTKAGRIEAQLIIKSAVKEVVLNTAKRRCKVTFHNGKIIDLPITENPSEDVTEAIQSLSEVTERGLIDVDEVII

SEQ ID NO: 8567 - protein, 509 aa, synthetic construct
MRRAISYIRFSSERQLKGDSVRRQSKLVTDWLDKNPEFYLDSSLSFKDLGKSAFSGKHLKGGLGDFLTAIEKGLVKAGDTLLIESLDRLSRQDIDIASELLRRILRAGVDVVTLSDGEHYTRESLKDPLSLIKSILIMQRAHEESLRKSERVQAAWNRKKELISEGIKVSRRCPAWLRLNDDRRTFTIIPDKVEVVKRAFDLRLQGLSFWAITRTLNDEGHLSLNQYTPKQKGWSDTAVKKLLRNRAVIGCFTPAGREEVQGYYPAIISESLFYRVQQLNTGQYGRASVSSNPLSVNLFRGIIKCSECGATIVLGGYALKRFGMYRCPNRSANRCSAKAISRKQTDATILYMLALCDRFETENTDTIDSLKLQREDLQRKISKMAELAIELDDMTIITEKLRDMKNALSKLNHDIEEETQRIKAITTGSLKDIDRTTKEGMVETQLLIKGVLKEIVIDAAKRRCKVTFHNGKVIDLPITENPSEDVTEAIQSLSEVTERGLIDVDEVII

SEQ ID NO: 8568 - protein, 506 aa, synthetic construct
MRHVITYLRYSSAIQGAEGADSTRRQNDLFKQWLKKNSDAQVVASFNDEGLSGYKGKHLSGQFGDMLSRIESGEFSAGTILLVESIDRIGRLEHLETEALMNRILGNGIEIHTLQDGLIYTKDALADDLGISIIQRVKAYIAHQESKQKSFRVSQKWEQRAKLALAGEQRLTKMVPGWIDPDTFKLNEHAETVRLIFKLLLDGESLHNIARHLQSNGIKSFSRRKDANGFSVHSVRTILRSVTTRGTLPASQRNDRPAIPNYYEAAIDAATFNKAQEILDKNRKGRTPASDNPLTINIFKGLFRCQCGASVHPTGTKNKYQGVYRCNNHLDGRCDVPPLKRKPFDRWMIDNFLGMIDVGNDGESERKIAALQHEVEIVTSRIKKATALLLEMDDITELKAQVKELNQKRTELQTTINTMKRKTSLSDKGLPQLKDIDLMTKAGRVECQLILSKHLKGLTLGKDSVTVTLQNDTEITIPTNPLPLNDGSPIFEIADKELLDIDAYQL

SEQ ID NO: 8569 - protein, 553 aa, synthetic construct
MSTITKIQSYHRNVKQLRVAAYCRVSTDNIEQLESLENQREHYQKYISNHPNWQLAKIYYDEGISGTKLTKRDALKELLADCHNHLIDLVVTKSISRLSRNTTDCLRIVRELQQLNIPIIFEKEHINTGAMASELFLSILSSIAQDESHSTAGNLRWAIRQRFASGEFRVSSAPYGYSIEDGNLVINQAEARIVREIFQQFSKGMSASRIAKGLNHKHVATKHGGQWRSNTVINILRNSNYTGDMLCQKTYSDDQYHRHFNQGELTQYLIEDHHPSLVNHETFNRVQVLLKEAVQKCHIETGSHKYQHHYLFSGKITCGNCGTIFKRQTRPNKICWACQRHLSSAKQCTVKAVTEVSLEAAFCNMMNKLIYSRKFLLQPLLANLQVQANSDTNGQLSSLVNQVKANDRKAETLTELMQSGLLDKAIYVNQTAQLEQDTYQCREKIKQFNSNNTDSANNFENVRTLLHWCQQGQKLSGFNKAPFQDFVQQIVVNSPKEAVFKLKCGLRLTEKLTKAACLDEHFYRGVIRQRFSEPIRQAEYLYSIIESEGDLIG

SEQ ID NO: 8570 - protein, 480 aa, synthetic construct
MSRPVQVDHYKELIQKEPPWEFAGIYADDGISGTNTKKREQFNKMIAACKVGKIDLIVTKSISRFARNTIDCLKYIRDLKAINVAIFFEKENINTMDAKGEVLITIMASLAQQESESLSQNVKMGIQYRYQQGKVFVNHNHFLGYTKDAQGNLVIEPEEAKVIKRIFYSYLNGMTMKQIADSLKADGILTGGKTKNWRSSSVAKILKNEKYMGDALLQKTYTVDFLNKKRVKNEGIMPQYYVENDHPAIIPKSVFMQVQQIIKQRRNGITTKNGKHRRINGKYCFSQKVFCGKCGDILQRNMWYRPEKVAVWRCASRVRRNKTGRRCMIRNVKEPLLKEATVEAFNQLIEGHELASKQIKANIMKVIKNSKGPTLDQIDQQLEEVQMKLIQAANQHQDCDALTQQIMDLRRQKEKVQSRETDQQAKLHSIDEINELVNLHKYGLVDFDEQLVRRLVEKITIFQRYMEFTFKDGEVIRVNM

SEQ ID NO: 8571 - protein, 594 aa, synthetic construct
MLRTLTGSEKFTKTELEALVAKIKALIYARVSTDGQVENYSIESQVERCMDLAKQKGINEDEVVVLVEDGESGDNPNRPMINYVLFLLEYGIGDHVIFLHPNRMSRFLHLQTQLSNRIWGLGKDFWFVEFDFDKSSPESMLNFNIQGSIAEYNKAKILADTKRGRITKVKNGQIPGLNRIYGYTYDTELDTLVENPVEKEIYLKMVDMLLHKDYSCSRIAEELSLRNVPAPKKDRWYQVTISRIFKNETYTGNYYFGKTKVIHNADGTKKQVPQPREEWRRISVPVYIDMETYYRIQKRLDELNKNKPGRPTEDYLLQGICRCGRCGAAVSSGVTTKTKNRLLKYYVCQHKTKKSYEVGTGESNPICKGRNWRVDYVDKIVWEYVKNIISEPTEFFERIIKQQSENSNSDELLKQKKKLEKSLQEKEASRERYTEMYAAGIIKSMKDLEDKVSAVDEQIKDIKEELHTIDQSLSTVLNKKNHIELVQKSLRSFKYLIDNDHIDTETKRKVTRLFIKKVILNEDNKINIYLHLGFIDNHEKESDNQHISTNNCQGHGRPKKSIYFDPRRVFGRNGLFFTDQSWSSFSFSNPTGFS

SEQ ID NO: 8572 - protein, 485 aa, synthetic construct
MAEKRKVAVYCRVSSMHQAIEGYSIEQQRDSLIKYCEAMEWNIYDIYIDAGFSGGKLERPAMDKLIREAEAGKFDTVAVYKLDRLSRSVQDTLHLIRDVFREHDIDFVCLQENIDTKSAMGNLFLTLLSAIAEFEREQITERMAMGRHGRAKSGKSMMWARPAYGYRYDRESQTVSVVQSEAMIVKRIYKEYLEGKSVSQIKNDLNSEGHITKEKPWVYKRITYILQSRVYTGVNEYKGEIYDGKHEAIIDTETFELTQMEFAKRQQQTKDKKNNPRPFQAKYMLSGLARCGYCKAPLKLRLGAVRKDGTRAMVYDCHNRWNRKVTYLTIYNDNKQCAESGRYQKADLEAYVLDKIKELQLNPDTIREKMDLNEKPTVNTEEIKKQIAKTNQQIDKLNDLYLNDLITVEKLKERADKLKKERELLEAELSKNSDHLFKAKKKQLNDLLMNKDIDSMTYEEQRNLVKMLIYKVDVTKEDINIIFDF

SEQ ID NO: 8573 - protein, 485 aa, synthetic construct
MAEKRKVAVYCRVSSMHQAIEGYSIEQQRDSLIKYCEAMEWNIYDIYIDAGFSGGKLERPAMDKLIREAEAGKFDTVAVYKLDRLSRSVQDTLHLIRDVFREHDIDFVCLQENIDTKSAMGNLFLTLLSAIAEFEREQITERMAMGRHGRAKSGKSMMWARPAYGYRYDRESQTVSVVQSEAMIVKRIYKEYLEGKSVSQIKNDLNSEGHITKEKPWVYKRITYILQSRVYTGVNEYKGEIYDGKHEAIIDTETFELTQMEFAKRQQQTKDKKNNPRPFQAKYMLSGLARCGYCKAPLKLRLGAVRKDGTRAMVYDCHNRWNRKVTYLTIYNDNKQCTESGRYQKADLEAYVLDKIKELQLNPDTIREKMDLNEKPTVNTEEIKKQIAKTNQQIDKLNDLYLNDLITVEKLKERADKLKKERELLEAELSKNSDHLFKAKKKQLNDLLMNKDIDSMTYEEQRNLVKMLIYKVDVTKEDINIIFDF

SEQ ID NO: 8574 - protein, 430 aa, synthetic construct
MSTDQDEQLSSYENQVRYYRDYILKHEDYELVDIYADEGISATNTKKRDAFNRLIQDCRAGKVDRILVKSISRFARNTLDCIKYVRELKELSVGVTFEKENIDSLDSKGEVLLTILSSLAQDESRSISENATWGIRKKFERGEVRVNTTKFMGYDKDENGRLIINPVQAETVKFIYEKFLEGYSPESIAKYLNDNEIPGWTGKANWYPSAIQKMLQNEKYKGDALLQKTFTVDFLTKKRVQNDGQVNQYYVENSHEAIIDKDTWELVQMELTRRRDFREEHQLKAYIMQNDVNPFTTKVFCAECGSAFGRKNWTTSRGKRKVWQCNNRYRVKGQIGCQNNHIDEETLEKAVVMAVELLSENVDLLHRKWNKILEENRPLEKHYSSKLAEMINKPSWEFDSYEMCQVVDSITIAEAGQITVRFLEGTDVDL

SEQ ID NO: 8575 - protein, 595 aa, synthetic construct
MVKQIEVIRAQGNIRRNNGKIEISQKKVAAYCRVSTDSEDQKNSYESQVKHYKEYISQRSDWQLVDIYADEGITGTQVGKRQNFQRLITDCLNGEVDYIVTKAIARFARNTLDTLKYVRMLKDKQIGVYFEEENIDTLTMDGELLLTILSSVAQQEVENISAHVKKGLKMKMQRGELVGGPRCLGYDFDWETRQITVNQEEAKIVRYIFDRYLEGIGGRVIARELEEKGVTSPRGNKSWTETTVLGIIKNEKYKGDVLQGKTFTVDPISKRRLDNYGEEDQYYIKGNHEPIVTEEEFNQAQEIRLRRSGRRGRIGSTSGNRQRFSRMYAFSSMLECGFCKSVLSRRSWHSGTIYHKVIWHCQVAIKKGKRYCQHSKGISESAIEKAFLESFRLLYQYNDKIIDIFLKTVEEEISDNSIELELHSIEKQLIKLKQQERDIIQMKLDGRISDDLYDEKFHAIIKDKEKLSASKVNLEVRLRTDSGVKERLESFRKLLKSKQLISEFDRAVFESLVEKVIIGGISDDGVVDPAKITFIYKSGDETSLNCKDFSDKRKNESKKRTGDSEELYSNDTNNDEKLYPQATDTKDRGCSETTT

SEQ ID NO: 8576 - protein, 402 aa, synthetic construct
MKQIKTIQAQKVTTIKRLEVAAYTRVSHTSLLQSLSNQVSHYSQMIQANPEWDYVGVYSDSAISGRSQAHRRDFQQLLEDCRKGKIDIILTKSISRFGRNTVELLETVRELKRLGISVHFEKENIDTLTAEGELLLTLLASMAQEESQSISQNIRWRVKKRFEDGKPYIPQDIFGYRWNGEEYVIEPHEASIVRQVFEWYMEGLSAPKIAKRLDDRGERTRLGNRFTKRIIYNMFDQEAYCGRLILQKTFRDHFGSRSIPNDGQMAKYIVENAHEAIVTPEYFQQVNQEKKRRARRRVSKHDALAKLQGKVYCEHCGLDMILTLETKSNQEKRVRYYCRTRDAKGVEACLGRTVTEEQLFQAFGESINTEDIHHISFNSVTNEAKATYRNGEEKHVIIQKGR

SEQ ID NO: 8577 - protein, 521 aa, synthetic construct
MKKVITIEPAKQVTHKVDLPSFTKRRVAGYARVSTDHEDQTTSYEAQMTYYTDYINSRSDWEFVKMYSDEGISGTNTKKRLGFQKMVEDALDGKVDLILTKSVSRFARNTVDSLSTVRKLKEAGVEIYFEKENIWTFDSKGELLITIMSSLAQEESRSISENVTWGRRRQLAEGQVTFSYSQVLGFKKSDTGGFEIDQEEAKIVRYIFHQVLLGNNPNKIARELTAQGIPTPQGKRKWSYGTVKRMLRNEKYKGDALLQKSFTTDFLTKSTKPNEGELPQYYVENNHEAIIKREVFDLVQVELDKLEKKRQTNNIFTGRLFCGDCGSAFGSKVWHSTSKYKRTIYQCNAKYKGEHKCQTPHVTEEEIKGWFLSAMNQLLSNREEIIANTELLIDMAKDTTPLESRIDDLEQQLETIRQDIEDLVDRNARKAQNQDLYQEQYDTLVTAYQERQKELQEATSSLEEQKSKQLSLDGFIQQLKQQEDLITDFNQELWQTSVERLDIKEGKKISLTFKNGVRIDL

SEQ ID NO: 8578 - protein, 484 aa, synthetic construct
MNKVAIYVRVSTTMQAEEGYSIDEQIDKLTSYCKIKDWTVYDIYKDGGFSGGNIERPAMERLISDANRKRFDTVLVYKLDRLSRSQKDTLYLIEEIFGKNDISFLSLNESFDTSTPFGKAMIGILSVFAQLEREQIKERMLLGKIGRAKSGKSMMVSKVSFGYTYDKLKGELIVNQAEALVVRKIFDEYLGGRSLIKLRDYLNSNGIYRGDKYWNYRGLLLILSNPVYIGMIRYRGEIYPGNHQPIIDTEVFNKTQEEIKKRQIEALEFNNNPRPFRAKYMLSGLAKCGYCGTPLKIILGYKRKDGSRSMRYQCINRFPRNTKGITIYNDNKKCDSGFYEKADIEEFVIAQIRGLQLNSYKLDNMFDKQPIIDVEGIEKQITLLDNKLKRLNDLYLNDMIELDDLKKQTQSLRKQKTMLEDELINNPAIMQDKNKNHFKEILGTKDITTLDYETQKSIVNNLVNKVFVKAGHIKIEWKIPFKKV

SEQ ID NO: 8579 - protein, 520 aa, synthetic construct
MKKVITIQATPSIIRSSSDDFSLKKRRVAGYARVSTDHEDQATSYESQMRYYSEYISGRDDWEFVKMYSDEGISGTNTKLRTGFKAMVEDALNGKIDLIITKSVSRFARNTVDSLTTVRQLKEVGVEIYFEKENIWTLDSKGELLITIMSSLAQEESRSISENVTWGLRKQFAEGKVHFPYTNVLGFKAGEDGAIVVDQDEAKTIRYIFQQALIGKSPYHIAKDLTEQGIPSPSGKSRWNATTIKRMLRNEKYKGDALLQKTYTIDFLTKKKNINRGELPQYYVENNHEAIVDRETFDAVQQVLDAKGKKSSTSIFSSKLVCGDCGHYFGSKVWHSTSKYRRVIYRCNEKYNGENRCATPHVTEKEIKQWFVLAVNQVIENKDEIIDNIKVLCSIGSLEGIDNQIKELETETEILSQMVSRLVMENASTLQDQDEYQSKYRQLSAKYESLVEEIEELEVQKLAKSKRNKDLQDFITGLKQQEGLLTDFDELLWETMIESITITKDSDVEITFKNGAVSTI

SEQ ID NO: 8580 - protein, 624 aa, synthetic construct
MFRPSPNPEVYSYRRFSNIEQEKGTSLARQDKYAYEIAEKYGLTVNEDLILTDKGLSAFHAEHKTKGAFGVFLSLVKSNHIKPGSFLIIESLDRMSREQVIQAQSTLNELVMAGITVITARGDKVFNRKTFSADPVGTMLYAIIEMQRSHEESLRKQGFSIDFIHEQVANFRKGEIADVSGSLPFWLSRKPKSHPKEKAGFELNEHQSTALLIVELYLKENMGLNSISRELGTRGIKSPTGRDVWGVSTITSILANPSLCGRKVFEIKYLKEGETVKEKFELDNYYPQLISEEEFETIQAVKKRKHQAMSGDKSVSQKNAIVYLLTDYGKKSICAKCGKSIGSQPQRQKYRIRRRLHCSTQKETKTCCKSIIQDYLEDAFLMSVSRHIDYDLINQDVDSNTKLTIDEKIKEIDQKMDNILDTLTIISDGEKRASEKAKYQVLQNKKEELKKQSSEYETYTISADSIKEFISKVQAARNYRNREARLLVKDVLVKAIKKLSVHMEPKPLSYYGYGNIHGNALVNVIDVEFYSSRNLSIFVTSEKDAGELLFTRIDDDFANDARGSYTEEQLAYWNQHGFEALLEKLAMDDSKSDSSAPDNVWLGYDIASALSQIVVDELVEEQII

SEQ ID NO: 8581 - protein, 538 aa, synthetic construct
MKRAVIYARYSTDLQNDQSVEDQIRICTAHADRLGAKVVTEYHDRARSGASMFGRPGLSSLMQAADLSAFDIVIAEAPDRLSRDIGDLAHIHKNLTFRSVEINCVNGGKIETLQVGMYGVIGQMQREEGSKKVRRGMVGVVRSGRSAGGKAYGYEPVPGEPGALRIVESEADIIRRIFQLYVSGTAPRTIAALLNAERTPAPRGSKWNASTINGSGQRGHGILRNPLYNGEFVWNRVRMVKDPSTGRRVSRVNDHTDFERREAPELRIIDADLFAAVQRRKEARGGPHKEKLSRSKRLLSGLLRCGCCGGGMALVGADRSGDRIQCSTYRESRSCENTRRYYIDRIETQVIDDLRMMFADTSIISEYVNHYRAERRRIADELRRDRSGLERKLAGAIDGIAKIVEKISKGLIEDDEAAFLLEPLRAERDSIKEQLSTQDGPTNVIELHPQAVIRFRENIEALSHIVSMKDAEANANVVSKFRELVAAVIIHRTEKGEPYALQIKGHLTSFAKTGIVGDSVGSGRGTRTPDTRIMIPLL

SEQ ID NO: 8582 - protein, 604 aa, synthetic construct
MKKVFVYHRVSSDQQLDGSGIARQAELLEGYLERTGICSEMHDPIPVVLSDQGVSAFKGLNISEGELGAWMEEVRKGMWDSSILVVESIDRFSRQNPFDVMGYINALMAHNVAIHDVMANIVISRSNSKDLPFVMMNAQRAYDESKYKSDRIRKGWAKKREQAFNKGTIVTNKRPQWIDVKDDKYIINHKATVIKEIFELYKTGLGCPTIAKELQKKEGEQYKFNRAWTGELVHKILTNRRVTGKIFISETIRNHDDLDNPVTQKKYQMNVYPVIVNEDEFELVQDLLKSRRPNAGRVTVKKTDNEEVLIKSNLFSGIARCMDCGGPMYHNVVRAKRTPKKGEPKVEEYRYIRCLSERDGLCNNKAMTYETVERFVVEHLIGMDISTVIKEQEFNPELEVIRIQIDQVKDQIANYENGIERRKSVGKVISFEMREELDDARLQLEELLARKASLATVNVDIPVLKNVDVNELFNVNNVDIRTRYENELNKIVSTVRLKRVDDSYIIDIKYKNNDLKRHVIFVEHKKKEQKLIGDVIIENIDGTILYSTSSFWIRVKDGAILFKQTKDDLSIIDYHILLNYVDGLERDNMVAVWMRHNINFLFGK

SEQ ID NO: 8583 - protein, 508 aa, synthetic construct
MKKAIAYMRFSSPGQMSGDSLNRQRRLIAEWLKVNSDYYLDTITYEDLGLSAFKGKHAQSGAFSEFLDAIEHGYILPGTTLLVESLDRLSREKVGEAIERLKLILNHGIDVITLCDNTVYNIDSLNEPYSLIKAILIAQRANEESEIKSSRVKLSWKKKRQDALESGTIMTACCPRWLSLDDKRTAFVPDPDRVKTIELIFKLRMERRSLNAIAKYLNDHAVKNFSGKESAWGPSVIEKLLANKALIGICVPSYRARGKGISEIAGYYPRVISDDLFYAVQEIRLAPFGISNSSKNPMLINLLRTVMKCEACGNTMIVHAVSGSLHGYYVCPMRRLHRCDRPSIKRDLVDYNIINELLFNCSKIQPVENKKDANETLELKIIELQMKINNLIVALSVAPEVTAIAEKIRLLDKELRRASVSLKTLKSKGVNSFSDFYAIDLTSKNGRELCRTLAYKTFEKIIINTDNKTCDIYFMNGIVFKHYPLMKVISAQQAISALKYMVDGEIYF

SEQ ID NO: 8584 - protein, 559 aa, synthetic construct
MKTKLYSYIRFSSMRQNDGSSYERQIRMAREVAAKYDLELVNDYQDLGVSAFKGANSKTGALSRFLDAIGRSVPVGSWLFIENLDRLSRADIVSAQELFLSIIRRGITIVTGMDNKIYSLDTVTANPMDLMFSILLFIRGNEESQTKRNRTNSSALIKIKAHQENPQNPAVAIEEVGKNMWWTDTTSGYVLPHPVYFPVVQEIVELRKNGRSTAEILDHLNETYTPPPAVSNKKHSKWSRAMVERLFHTRALIGIKEVSVDGVNYELKDYYPRVIDDPTFYHLKKNIGARAWNFGDKEEVKPIPLLSGIGLLKCDHCGCAMVKVKGTNKRSDQYRYTCDATRSRRLDCEHPNWSFRGDQLEKAVLQLLADKIWIAEDKANPVPALKVQVDEISRKIDNLIALSAMTGATKELADQITTLNSERETLYNQIKMAEEEMYSVDSQGWEKLAEFDLEDVYNEERLKVRFKIKQALKRIGCSRIDRNKNLFVLEYIDGKTQRVVIENSRGTRKGQIFVDLKTINDRQILESNGLVLHPCLDMLTDKNWKPEEEIPGPLQEFGI

SEQ ID NO: 8585 - protein, 518 aa, synthetic construct
MPKAISYIRFSSRIQASGDSTKRQNKYINEWLKNNPDYQLDESLRFQDLGISGYSGANAKSGAFGEFLAAVESGVIEAGSVLLVESLDRVSRQDIDTARERLRKILLAGVDVVTLADNSWYKKESLNDPLSLIKAVLIMQRANEESATKSKRLRSAWDAKREEAAKGKIMSRRCVAWLRVSDDMSHFELIPDNVKAVQRVFQLRLEGLPFVRIARQMNEEGFYTLNQRNPVKGAWSHTTVKALLDNRSVIGFKVPSNCTVTKGVKEIPNYYPAVISEEHFYAVQQLKQGAGRRPSSEKPLLTNLFKGVMRCAECGFVTIVNCATEKWHGVYRCSMRYEGRCHAKSINRRLADKALVQGLLYNTNRLSLNRDNGSAIGSLQSELEQLQKQRERLIKLAMLADDTESMAKDLKALNSQIKDAEKAVSEVHQREQSSQLETISHLDLTVKKDRIEAQIIIKRIVKEIWLNTAQKKCDVFLHNGLKLLNFPLDRVVDGEIFLEVLPVLEADEFDFDTYRMIE

SEQ ID NO: 8586 - protein, 604 aa, synthetic construct
MKKVFVYHRVSSDQQLDGSGIARQAELLEGYLERTGICAEMDDPAPVVLSDQGVSAFKGLNISEGELGAWMEQVRNGMWDSSILVVESIDRFSRQNPFDVMGYINALMAHNVAIHDVMANIVISRSNSKDLPFVMMNAQRAYDESKYKSDRIRKGWAKKREQAFNKGTIVTNKRPQWIEVENDKYVVNEKAAVVKEIFALYQTGMGCPTIAKQLQRKEGEQYKFNRPWTGELVHKILTNRRVTGKIFISEIIRNHDDIENPVTQKKYDMDVYPVVINEEEFELVQELLKSRRPNAGRVTVKKDGQEEVLIKSNLFSGIARCTECGGPMYHNVVRAKRTPKKGDPKIEEYRYIRCLNERDGLCENKAMTYETVERFVVEHLLGMDLSTVMKEQEFNPEIEVLRIQIDQVKDQITNYENGIERRKSAGKPISFDMREELDDAKSELERLLARQASLATVQVDVPVLQEVNVTELYDVNNVDIRTRYESELNKIVSNIRLKRNGTSYTIDINYKQNELKRHVLFVENKKKEQTLISEVIIEDVDGAKFYYTPSFMIMLKDGEIRFQQTNEDLSIIDYSLLLNYIDAVDRNDAVGVWMRNQFNFLTSN

SEQ ID NO: 8587 - protein, 520 aa, synthetic construct
MRTAYAYIRFSSEKQSAGDSVRRQQSLIDSWVKNNPDYILSQKTYKDEGLSAFTGKHAAGDLGRLMNDISNGSITAGDVILIESLDRLSRENISTATDRLKAILIHGVNVVTLTDQKQYTPESLNSPMDLIMSILTAQRAHEESQSKSKRMREVWAKKRTEAEESGKVITKSCPRWLTVNSDRTGFEPIPEHVESIRLMFEMRLSGKGFAGIAQALNESGRLTLTGRSKGWNQSSVQQLLSNKALIGYKIPSRKAVVNYIEIPDYFPSVIPLEQFQQVQLIGADKQGQRAANDRPMNVNLFRGVMKCAECGATVIVSGVDDKRAGYYSCSFRRLGRCNTSKPMNRGMVDEALIKGLLYSLDRLTTQGQGENPLMKLEAKRADLTERSQKLLAALEIADDVSAIATRLKAVTDEIRAIETQIKTCKDLEQVHTVQSVQGMDLTVKSQREEVQLLVKKTFREINLDGIRKTVNVYLHNGLTLLNVPVNQIVDAGEWIELLPVIGGDTVDFKDISFKAPRYLD

SEQ ID NO: 8588 - protein, 541 aa, synthetic construct
MPKAISYIRFSTKIQSVGDSTKRQSKYINDWLKRNPDYYLDESLRFQDLGISGFSGANAKSGAFGEFLAAVESGYIESGSVLLVESLDRVSRQDIDTAGEQLRKILRSGVEVVTLVDNEWYTKESLKDSLSMIKAMLVMERAHEESAMKSTRLRSVWAAKRERAAKGEIMSKRCAAWLKVSEDRSHFEFIPENVKAVQRVFQLRLEGLSHVKIAKQMNDEGFSTLNQFKSVTGGWSQSSVTELLSNRSVIGFKVPSKSMAVKGVSEIPNYYPSIITDEQFYAVQQLKQSSGRRPSSDLPLLTNLFKGVLRCSECGFIVVVAGVSAKRSGIYKCSMKSEGRCNSVGFSRLQTDRALVQGLLYNTNRLSLNRDNGSAIGTLQSELEQLQKQRERLIKLAMLADDTESMAKDLKALNSQIKDAEKAVSEVHQREQSSQLETISHLDLAVKKDRIEAQIIIKRIVKEIRLNTAGKKCDVFLNNGLKLLNFPLDRVVDGAQWLEVLPLIDGDEFDFEGFTTKPQHIALEEAPEWVKEMEEQPNQPL

SEQ ID NO: 8589 - protein, 627 aa, synthetic construct
MKKIFLYHRVSTEQQVEDGSGMARQAELLQSYIDRTRIVESMDDPVPVVLEDGGLSAFKGHNFLHGQLGRWMEEVRAGMWDGSILVVENIDRFSRQNPFNVMGYLHDLINHSVAIHDVNMNMVISRENSAMLPMVMMQAQRAYDESKFKSNRIRAGWAKKRDNAFNNGTIVTNKRPKWIDIVDNQYVLNAKARIVTEIFRLYQTGIGCPTIAKTLREMGDDWRFDRIWTGEAVHKILRNRRVTGVIFISELIRDYNSTENSIVQKRYEMNVYPPVIGEDEFNLVQQLLSSRRSGKATGGKRITKKRNDDGSVVTDINGYPTYDTIDCGEITKSNIFNAVCRCAKCGSPMYHNIVVSKRTPAKATSPVEQEYRYIRCLNERDGLCDNKSLRYDVIERFIMEHVKGLDFSTIIQENRINPEVEFVRLKLEEEREHIREYEHGIKRLRNLGKKVPFDVLLELEDAQERLKALEDKQATFADVHVDLDVLKNVDLDALYDVTNIELRGRVENELSKVLEKVELHRDSKNYVITFKYRRVDVLKHVLMITASKTPVLVSGVCIETLGDTVAYSTPSFDIIVVDGGDLRFQPIDDEPLSIIDYSLLMNYVDGTEGADAVAAWMRHNMNFLFTK

SEQ ID NO: 8590 - protein, 587 aa, synthetic construct
MPQLYSYIRWSSERQQKGTTRQRQVIGAKEFAIANGLELVEIEDPGVSAFRGKNTTHGKLGDFIDAVRQGAIPPDSWLYVENLDRLTRQEVTTAQKLFIELLDLGLTLVTGMDKRVYTLESVNKNPTDLMISLLLFSRANEESKTKQARTIGNVESLIERHRQGLPVNIKSCGKHPFWIDDSGSQYESVKRHAIYWEIAREAIELFLSGYGIYKVKRFLDEKYPNGLNGKEWGYQVLKKMRESRALIGERQINIGSHTYTLRDYYPCLCKNEVEFLHLQELKGQNSYKSKKNPLKEQIKLLSGLAILRCSKCGGTMSSFMNKGKPRYICLNGRHLQKGCVGWSLTAPLVDHCVIIALLMGYMDANRKERQDTSDISALIEAKNTSVGELNVSITNLVAVIEAGVNVSELASRLKVLSTERETFLKEIERLKERKALIDSKGSFEVSMMDFINLIHWNVFSDYAHESRDKIRSTINKIIEHVIIDKTDGCITIKIKCRGSDEQLIFCGIGRKPHWKFDIALYVEQDTDGDTTFEEKSILPMANQLMEEATKQFALIREGYISYFDKICKILAAIGYPDIDGSAFWPNR

SEQ ID NO: 8591 - protein, 521 aa, synthetic construct
MPKAISYIRFSTKIQSVGDSTKRQSKYINDWLKRNPDYYLDESLRFQDLGISGFSGANAKSGAFGEFLAAVESGYIEAGSVLLVESLDRVSRQDIDTAGEQLRKILRSGVEVVTLVDNEWYTKESLKDSLSMIKAMLVMERAHEESAMKSTRLRSVWAAKRERAAKGEIMSKRCAAWLKVSEDRSHFEFIPENVKAVQRVFQLRLEGKSHAKIAKQMNEEGFYTLNQFKSVKGGWSQSSITELLSNRAVIGVKVPSKSMVVKGVSEIPDYYPAIISEQQYHAVQQLKQGSGRKPSSDLPLLTNLFKGVLRCSECGFIIIVSGVTAKRSGNYRCSMRYEGRCNAKGFSRLQTDKALVQGLLYNTNRLSLNRDKGSAIGAIQSELEQLQKQRERLIKLAMLADDTESMAKDLKALNSQIKDAEKAVSEVHQREQSSQLETISHLDLTVKKDRIEAQIIIKRIVKEIRLNTAGKKCDVFLHNGLNLLNFPLDRVVDGEIFLEVLPVLEADEFDFDTYRVIEQAP

SEQ ID NO: 8592 - protein, 644 aa, synthetic construct
MLRPICYERVSSIQQIEGGGGLDDQRSALEGYLDRNSDKFSNDRIFIQDRGVSAFKNSNISSESQLGIFLQDVQNRKYGEGDALIVMSLDRISRRSSWAEDTIRFIVNSGIEVHDISASTVLRKDDPHSKLIMELIQMRSHNESLMKSVRAKAAWDRKIIEAVQNGTVISNKMPMWLKNVDNRYQVIQEKADLIIRCFEWYRDGFSTGEIVKRIADPKWQMVTVSRLVRDRRLLGEHKRYNEEIIHNVYPKVIDDDLFLTANRMMDRVMLEKNKPAEDLLLESDVVQEIFQLYESGLGSGAIVKRLPKGWSTVNVLRVLRDKNVVTQKIIDNLTFERVNQKLSMNGVANRIRKDITIAQDDYITNLFPKILKCGCCGGNIAIHYNHVRTKYVICRNREERKICDAKSIQYIRIEKNILKCVKNVDFQKLMIESTGSETSVLDGLREELSSLRREESSYNDKINERKLAGKRVGIHLNDGLTEVQDRIEEIEKEIISAQTVREIPKFDFDMDEVLDPMNIELRAKVRKQLRLVLKAVKYWMFDKRIFIQLEYFNDVLSHMLVIDNKRGGGEVMYEMSIEEKKGERIYTVHENGYAVFIASVTIGTELWSLALSRTRTIDSVGNYLSLLAREGFEIFVNEDQIDWF

SEQ ID NO: 8593 - protein, 539 aa, synthetic construct
MFESEETRLYARTSSEDQAERGTIQNQVDFGTKYCDLHQLPIAGWYRDDGVTGTLPLQERPEGRRLLEDAKAGKVKLLLIYKLDRLGRTARVILNAVYDLEQYGVKIRSMTEPFDTSTAAGRLLLTVLAGVADMDRETILERLWLGANRAAREGKWLGGIVPYGYIVNEEKCLELSDKNPLPGMDMTEVDVVRLIYHITADDGISTIKIADYLNSLGIPPAYAIAGRQARKGKRIENTAGIWRPARVRNMIVNETYKGIHLYGKRSKKQREIISREVPAIVSEEIWDRAQQVLHNNQLESVHNSKRQYLLRGLIKCGCCSLTYCGTAYSSSQRGCYICNGKTTYRGSLMGKCGSKNLPQDWIENQVWNDCVKFIMSPGEALNQFENSIQENKSRVLQIETERALITKSMDEKEVEKQSILDLYRKKLIEAKDVEQQLQKINIEKLELQSRLDQLVIKMDSVDTMSQRFSSAKLFLDDLREKLGNGEPNFELKREIVKALVHKIIVETKNPGAKKPQANISVQYSFARGILRTDKDSLQQ

SEQ ID NO: 8594 - protein, 453 aa, synthetic construct
MIKGACYVRVSTDNQLENYSIEEQTDRLKAYCKAKDIQIVKIYTDGGYSGGNVNRPALQQMLQDIDKGLIDSVIVYKLDRLSRSQKDTLMLIEDCFLAKNVDFVSVNENFDTSTPFGRAMIGILSVFAQLEKDQITERFTMGRIGRAKNGYFHGGGNAPTGYDYIDGELIINDYEAIQVKDLYNRFLKGYSIHNCWQYMQQKYGGWSSEVLVRNVLKNELYIGKVKFKGVAYQGNHQPIISEETFRQVQDLFNSSRRASDTFKRSPFKASTLLSSLVYCGKCGARFHGEHGNYSCYSRTKGDKKYIVDPNCKNKKWKIEELDRLVLDYIMRLDFSKLKSGHPVPVPVTDYSIRLNEIDKQIGKLIDLYQVSGIPIETIQEKMDALNKEKEALLNISKPKNVPVTTLAEMITARDTLMSLSDTGSLDEKRACLTMIVDRIIIDDDNVNIKLKQL

SEQ ID NO: 8595 - protein, 435 aa, synthetic construct
MAAYCRVSTDQEDQLHSFEAQVEYYTRYISDHPNYEMAGIYADEGISGTNIKKREQFRRMISDCETGKIDMVITKSISRFARNTQDCLQYSRMLKNLGIGILFEKEHINTLDSSGELLFTILSSLAQDESRNISENCKWGIRSKFKKGEMHVNTHKFLGYDKVDGKLVINEREAKIVRRIYREFLWGHSPQEIAKGLEDEEIEGCMGAKKWYPSTVINILKNEKHMGDALLQKSYTADFLTKKQVKNHGEVTQVYVKGSHIGIIDKETWNAVQLEFARREEFVKEHGLKGYGYGRECNPFTSRIFCGECGSPYTRHTWRSRGIMQWQCKNHMTNGKVTCVNGFVSQNDLELGFVKAYNMLLKHKEILIPRWKDTIETGNALERLRAKQFLDLSEQPELECYVPELAQMVIQMVIIKGIKKYEFTFMDGSRETVCV

SEQ ID NO: 8596 - protein, 504 aa, synthetic construct
MEIQVLEARSSKGYRKKVCAYCRVSTDALEQENSLENQIAYYENLIQSNPEYEYAGVYYDFAISGYKEKRPGLQKMLTDARNGKIDLIYTKSVSRFARNTAIVLKASRELKELNVGIFFELQNINTLSSQGELMLTILAAFAQAESESGSIGAKMVYQRKYEQGIPVQYLERCFGYTKNEKGEFVPDTEQAKWIVKIYEMAAEGYSLSTIADEMNAAGVKTDKGAGWVESTVKRILENEIYKGDYIMHKNYVNEERKLVRNRGEVDAWYIEDDHPPIVSRQLWDKAQEARKKKRDYLDMDCQIREVTEENYPYKGHLFCAKCGSPLTHRIYSNGNRMSWDCSGRRRHGKDFCTGIHVPDTAVRQWKFDGNIYISVKDSRKSIKEFSYTKESSWSRRHKKKEFVRDVPELTEENYPYYRSIFCAECGSRLVRHIKKHGDIVWECNGRKRKGATYCEGVRIPDRVVQAFMPIRKAIYIKERKGRNGTKHYSYSCKKPERATRKEQG

SEQ ID NO: 8597 - protein, 484 aa, synthetic construct
MQKEKVIPIDSLDLVDLYIRVSTTEQALEGYSVAEQEHRLRQYCAAMGHRIHKVHIDAGFSGASLDRPGIKETIKDVQKHLVRRVIVWKLDRLSRSQKDTLIMLEDVFLENGCDFISMMESFDTSTSFGRAIVGILAAFAQLERENIKERTMMGRQARLAKGHYNGSRPPLGYSFIPGSNDLQVDPYQAAIVREIFKLFLSGISINAIARKMEEKYPTVRTWNNTMIRRTLKNPVYIGKVNDNGILRDGIHEPLISEIDFQMANAILVHNSKIKKQSCRSRSLLTGLLYCGDCGARMHPRRIAKGYPLRRYVCYSVSRTSKSMIKSDHCTNRLHPYTQEELEQIIIDEIKKLAADEDYISEVIRNSSAEAPVDDTELFQERIEELNRQTDKLLNLYQIGAIELDQIQERLAALKQERESLTAALKESRTKTDINMDHLKIMSYASAFQVALESGDPEYTNSIIRLLIDKIVVLNEDIEIHWTFC

SEQ ID NO: 8598 - protein, 460 aa, synthetic construct
MTKISTDVQRVALYIRVSTEEQAQHGYSLEAQESALVEFANAHNYKIVNIYRDEGFSARKSVIKRKVMQQLLQDVQQNKIDLILFTKLDRWFRNVRDYHTVQAILDRYHVSWQAILEDYSTTTADGRLKVNIMLSVAENEADRTSERIRFVFENKIKSGDFCFARPPYGYKVETIDGMRKLVKDPDTEQIVSTFWEKCLKYRSVLRSIRETNIEFHLARPQKAWTRLFKNPVYAGIFHGIKDYCPAYISFSDWQELQRPEKRIKATQNNRVYLFAGLLRCPICGCTLKSTYSHCSTNKSIEYRHYRCNEKAQGRCTYNRAINEKTLEKYLIDNIRDEMEKFAVEYQAELSEKKKRYPKTDISKLKEQLRRLNTIYMSGNISDNDYLSQSQVIKAAIQKSESEQQELASAADLDSLRHFLQHDFDKIYIDMTDDEKQRLWRSLISEIHFKDNRVSEIIFNV

SEQ ID NO: 8599 - protein, 652 aa, synthetic construct
MRKQKCYIYMRVSTAMQVEGYSLEAQKDRLTKFAQFQDMEIVREYCDAGKSGKNITGRPEFSRMLQDVAEEKDGVSYILVFKLSRFGRNAADVLNSLQYIQDYGVNLICVEDGIDSSKDSGKLTITVLSAVAEIERENILVQTMEGRKQKAREGKWNGGQAPFGYELDSKNSTLIVNPEEAEIVRIIFDQFTRTEAGADSICKYLNQHGYTKKRLRDQEVSYFSRSTILKILDNPVYVGKIAYGKNKTEKVKGTRDQYCRVKQDEYLLADGLHDAIIDEETWEAAKEKRKRTGVRWVKTHSLDHEHILSGLIKCPLCGGGMSGTVQRRKNKKTGEYKDTFYYRCHHRKRVDGHICDYKPMLNQKVFNAEIEEFIRYMAGGEKFKEFLMEKLEEKVDVSSLEEEKKQLAGQLQQAQGSRKKLVQMLERLDPGDKHYDRKYQDMQERMDNLYDRIAELEEAITDVETKIGASYGKQVTGKKIYQFLLDFDILYGKMTDLEKKEFMRTFIESIELDPDEKDMGRIIKHIDLTFPVYYDGQEGDRIRMPKENTVETVVLLSKGEIDSKKIRVEFSLEDMDTSGFQQGATYEQIKGRVLEQTELKVSSLYISQIKRKCGLEVGQSYNLSKKENAKQPQCPPEKEKAIREAMKYFGMI

SEQ ID NO: 8600 - protein, 667 aa, synthetic construct
MCADRNEGTRYIIGTGSRVTTGIRKGGENLKRKKCYIYTRVSTAAQTEGYSLDAQQKRLKDFAEYKGLEIAGEYCDAGKSGHSIKGRPAFMEMMDDITSGKDDISFVLVFKLSRFGRNAADVLKSMQTLMDYDIDLICVEDSIDSSTQGGRLTLAILSAVSEIERENIRIQFMSGKMQKVLKGGWAGGPIPYGYRSREGELVIEPSEAEVIRLIYEKYLEPPMKLNSVVRWLNSHGYQRISQGTIRPFNSDFVSRILNNPFYCGKIVYYRRANKGSPDPKQEIVVQGKHEAIVTEKIWEQAQEKREQLARVKGKRDEEDRISLLSGLVKCPVCGGGLISKKNKSLNHNYGGYYKTVYSYGCRNYRTSEGRVCSFCHTYNQERLDAAVMEVIQKVTGTEEFRTAFARTVGNQMSEEAVETQLKMLRKEMHHQEHVKYKLGMELDHLDVLAESYDQQYEKLQAEVDAAYDRIGRIEDKIEKLKRKLLRMKQGIHSSDNICLILDHFDRLYEKMNYEERRTLCRQFIQRIEVFPEKGDDKRILKSITFRFPVYFDLGGNQEEDDEDTPDEMVVFTLDCSRLPVTAAESKATYAEIKAHVLRIHGLKVSSLYIAQVKRKYGIEMGTAYNKPEKNKNHIPRCPKEKELAILDALKTYRMIPESTEYFEEAAE

SEQ ID NO: 8601 - protein, 507 aa, synthetic construct
MKRVISYIRFSSEKQAKGDSLRRQSKMVTDWLKAHPEYYLDESLTFRDLGVSGFTGKHLQGGLGDFLTAIEKGLVKAGDTLLIESLDRLSRQDVDQASELLRNILRSGVDVVTLSDGEHYTKESLKDPLALIKSILIMQRAHEESLRKSERIQAAWDAKKEEAKAGIKISKRCPAWLKLNDDRKSFSVIPEKVETVKRCFQLRLEGKSIWDIVRTLNAEGHQTLNQYKAGSFGQTSVQDLLKNRSVIGYFTPKGCEEIAGYYPSIIPETDFYRVQQLSYSRYGRKPVSENPMAVNLFKGVIRCSECGHTLIINGFTEKRHGIYRCPCKQENRCNAKGLSRKQTDGTLLTLLSRIDRFEPEQINVIDTLKLQREGILKNIEKLVELSLIIDDMTAITSKLKQLKSDLSLIESDIEKENQRIKSIDTGSLSDCDLSTKAGRIEAQLIIRGVVKEAVLDTTNKRCKVVFHNGKVIDLPITENPSEAVTEAIQSLTEIASKGLLDIDEFSL

SEQ ID NO: 8602 - protein, 484 aa, synthetic construct
MKKEKVIPIDSLDLVDLYIRVSTTEQALEGYSVAEQEHRLRQYCAAMGHRIHKVHIDAGFSGASLDRPGIKETIKDVQKHLVRRVIVWKLDRLSRSQKDTLIMLEDVFLENGCDFISMMESFDTSTSFGRAIVGILAAFAQLERENIKERTMMGRQARLAKGHYNGSRPPLGYSFIPGSNDLQVDPYQAAIVREIFKLFLSGISINAIARKMEEKYPTVRTWNNTMIRRTLKNPVYIGKVNDNGILRDGIHEPLISEIDFQMANAILVHNSKIKKQSCRSRSLLTGLLYCGDCGARMHPRRIARGYPLRRYVCYSVSRTSKSMIKSDHCTNRLHPYTQEELEQIIIDEIKKLAADEDYISEVIRNSSAEAPADDTELFQERIEELNRQTDKLLNLYQVGAIELDQIQERLAALKQERESLTAALKESQTKTDINMDHLKIMSYASAFQVALESGDPEYTNSIIRLLIDKIVVLNEDIEIHWTFC

SEQ ID NO: 8603 - protein, 526 aa, synthetic construct
MQYCLYLRKSRADSEAEALGEGETLARHEKALLDLAKKLNLNITAIYREIVSGETIAARPVMQQLLQEVEQGIWDGVLVMEVERLARGDTIDQGIVAQTFKFSDTKIITPIKTYNPNNEFDEEYFEFGLFMSRREYKTINRRLQRGRMASVKDGKYVANKAPYGYNRIRIENDKGWTLEINKEEADVVRLIFELYTVGEKQSDNTFNRLGTGFIAKRLNAMKVPPKRGKVWVVASIRDILINPVYIGMIRWNWRPQQKKMIDGQLHISRPRATDYLLCKGLHPPIISKETFNIAQDLMRHNPARPIGEKNTVKNSLSGIVVCGNCGRHMVRRPHTKYPDMLICSEPTCNNVGSQLRVVEERILQSLKEWLGEYKISWDITSPPVERISQVSIKKKALQKEQHELDTLNKQISKTHDLLEQGIYTTDVFLERSRALSLRMDEVKEHIAILDKELKTEITREDSAVNIIPKVEKLLEVYHDLPSPKAKNDMLKDVLEKVVYTKKERSKKGNLDNFNITIYPKIPKYIT

SEQ ID NO: 8604 - protein, 463 aa, synthetic construct
MSFFTPNPQLFGLRVVKYIRCSHDDQVLHGDTLEAQDLILEDFIKVNRMILVDTFIDEALTARKKFNKRKEFVRLLDGVKAHAFDLIIFTKLDRWFRNIGDYHKIQEILEANGVQWKAVTENYDTTTTNGRLHINIRLSVAQDECDRDSDRIKDVFAYKLKNKTYVSGSLPRGLKLDAEKHVIIDPEWNCFALDMFDRFEATCSKRDTQLFLQDKYNIRVCYDTVARYLKNPLFKGQYRDDPDFCPATISPERFERIQKLAIRNVRIRHTQQFYIFSGLLICSSCNHYMCGTVTYRRMADGSEKMYKNYRCNFKAQSKLCDRGKTYREADLEEYMLAHIRPALSDYIAKYEVTAASTVQKNPVTEIAKIERKMKKLYDLFMDDLIDKEAYRSEYDKFKAQIEELQKCSTAAPMRSLDSVKKLLSEDWEVVYRTFSDQEKNTFWKSFVESVLVYEDGSMDIRFL

SEQ ID NO: 8605 - protein, 538 aa, synthetic construct
MAKKITVIPSVSESLHTQMKPRIRVCGYARVSTASMAQADSYAAQVGYYTEKIQSNPLWEFAGVYADEGITGTKAKGRYDFNEMIAACEDGDIDLILTKSITRFARNTVDCIQTIRKLKAIGVGITFEKENINTLEEKSELLLTIMASVAQGESEDFSGNNRWAVISRFEKGTFIVGTPAYGYRKDEDGNLMIEEKEAEVVRLIFESYLNGTGTYLISKMLNEQNIPTIRESEQWQDSVIKEILKNPVYEGDALRQRTYTEKQFPFVRRGNTGQMPMYLTRDAHPAIVTHEEAEAVRSIMEYRSRTLHMGGEKCQNRYLFSSRIICGECGSHFRRQKIYIGKPYEKIIWTCHRHVEDKESCQMKAIREDMLQQAFITMWNKLYTNQGTVLEPLLKALTGLAANQPDTEEMEQLDREINSLSEQSRILNQVMMKGYMDSALFMEKNNLLAHRLTECRRKKTLLARKQKRTKEIVGTEQLIGLLKKEGYQREFNEELFDLTVKEIRISLTHEITFCLHNGLSLTEEEGGDADAVAYTNRV

SEQ ID NO: 8606 - protein, 552 aa, synthetic construct
MPATAVQKKVSMIPAKPQYDRSIKLSEKKLRVAAYCRVSTELEEQESSYEAQVEYYTRKIQETENWKLAGIYADDGKSATNTKKRDDFKAMIKDAEGGKIDMILTKSVSRFARNTVDSLLTIRKLKEKNVAVIFEKEGVNTLDGTGEILITILSSLAQEESRNISENTRWGVVRKFEKGKVIVNHNKFMGYTKNENGDLVIVPKEAEIVRLVFRLYLEGYSAGKIAKYLEEQKIKTATGLERWHDTVVLKMLRNEKYMGDALLQKTYTVDFMTKKKVMNKGIVPQYYVEDDHEAIIPKDLFYRVQEELARRASVNKSAVTREKKKNGKHSSKSKYSSEYALTGILLCGECGQEYRRVTWARNGKKKIVWRCSNRLTNGTKYCKDSVTLEEGILNRAVMEAIHRITRNDGNFASALRQNVIRVIGSYGMEQEPDEYDGKIKAKQEEMVSLIAENAAISSYTDEFDERYRRIAEEISTLKEEQLEARRKKKLAESYDQRLKDMDSFLKQQTYQMPEFDNDLVRRLIANIKVVSADKLLIQFQSGIVMEQEIRYD

SEQ ID NO: 8607 - protein, 460 aa, synthetic construct
MRFFSYGRKSVFSDKSDSIDNQFRMNREYCESKFSGQVDSWQQFSDEDFTGANTSRPDLQRMLSFIKGGFCDVLVVYQLDRLSRDVRDFANIYALLEEHGVMFISIKENIDTTTPIGRAMMYVTVVFAQMERETIAARVTDNMLGLAKKGYWTGGNPPVGYVRKHIVVNGKKHCSIEVDPDGARYVTQIFDTFLAYNCSLQGMETRFKNQGIRTQSGKFFSTTQLHKMLTMPYCVEATPEVYDFYAAKGCIMDPGSPREMWDGSVGVIIYGRSTEKNKKHQAQPPEKWTVCLGKHKPFMPAEKWLAVQSRFTQNKCIKDAKWPVPLLKGVLRCKCGNLMQVSRKKKVDGTCSSWYYCRKRMRQGVDACDMGQIKCDLLDEKVLELFRGITADPALIQKFVKAEAPADVPDLKAAQARVSACERKIGRLAASLALAEDSAASKYIIAEMERLDVELGALKR

SEQ ID NO: 8608 - protein, 511 aa, synthetic construct
MKRITKIDAAAKTEKKLRVAAYARVSTDSADQLVSLDAQKEHYEQVIKNCPSWEYAGLYYDEGVSGTKMAKRDGLLRMLADCDRGLIDYILVKSISRFSRNTVETVETVRRLSAIGVYIFFEKENIDTGKMEGELMLSIMSSLAEDESRSLSDNNKWSIQKRFQNGTYVIGTPAYGYKNVDCRMVIDEEKAEVVKRIFASVLEGKSGTKIASELQEEGIPTARGGRWQSSVILGMIRNETYTGIAVFQKTYKDDRFNSRLNRGEKGMYRIEGHHEPIVSEETFRAANFAVDNNAREKGITKGGKYSKRYALTGKVFCGECGGKCKRKMIYGEVWYGCETHIRDKKKCRQLPVRGADVEAAFVNMINKLIYGRDAVLLPMSGKLLGGGNKDVIDRLEELNAELETIAERRQAADRFFAKGLLDAAVYIEQLDVLAQKEKEIHSARAGIEGDPDLDFDRQTALNELLKYTAGAERLTAFSDEVFTKHVDRVIFFSRKEVGFVMKCGPVFRERI

SEQ ID NO: 8609 - protein, 519 aa, synthetic construct
MAMAQNITFIPAVRTVGTQKPAEKKQKVRVAAYCRVSTDFEEQESSYETQVAHYTSYINGNPEWEMVEVYADNGLSGTRTAKREAFNRMIADCEAGRIDMIITKSISRFARNTVDCLKYTRKLKELNIAVFFEKENINTLDAKGEVLMTIMAALAQQEYESLSANVRLGIQFRNQQGKVQINHNWFLGYTKDESGKLVIVPEEAEVVRRIYREYLEGASFVKIRRGLEADGILNGAKHARWHETNIKQILTNEKYIGDALLQKTYTVSVLDKKRSVNDGAMPKYYVEGCHEAIIDRETFLLVQEEIARRSSLYKGGKKRMYSSKYALSGNVVCGHCGNIYRRVVWSVGNEKPVVWRCVSRLTTGQECSARTVPEEDLHAAIASAVNMAYGNRDDIIPVLKENIESVVGCDADEEIEVIDNMIRKSQMDLLDAGRDEARVQEIGERIVSLRERRQNVLTQAALRKDEIDRIKAMITFIEEQTGEAEYSEILVRRMIEKVTIHDDRITVEFKSGLAIDVDA

SEQ ID NO: 8610 - protein, 510 aa, synthetic construct
MSYFIYARKSRKDAELEALGIDVLERHITTLLELAKTHSLPIGAIYREVVSGDSIDARPVMTQVLSEVEACMWDGALVMDVDRLARGDTIDQGRVQRAFFYSNTRIVTPNKTYDPANEYDNEYFEFSLFMSRREYATIKRRMQRGRERSSSDGYYVGNVAPYGWERVIAPDGKHYSLAPHQTEAPVLDLMYDLCGNKQYGYQKACTYMSNMGILARSGKPFTPSTLKGIISNPANIGKVRWGHRKTVRAVKDGRVVKSRPKATDYILSDAAWAPRISADLFKRANQPKGCFSAPVRSDRPIQNLFAGLVRCSQCGRLMVRKKAQTKTPYDMLICQYAECSTVGIRIDELEEALLGWLKDYIAKYEFADTHEEDAAAIAAKELIVTNFETEHQTLLKQRESLFDFLEQGIYTKEIFIERSNALEQRIRDCMNNITAAREDLHTTIARQANRKNFVPKCKNLLSEWDSLAISEKNSALRQLIDRIVLTKTKRNKKNQKNSEFTIDVYPKVPK

SEQ ID NO: 8611 - protein, 519 aa, synthetic construct
MKKVTKIAENTSAKVKLKKIRVAAYCRVSTDSDAQLESLEAQKTHYENYITARDDWEFAGLYYDEGITGTKKDKRPELLRLIDDCKAGKIDFIVTKSISRFSRNTTDCLSLARELLAVHIPIYFEKENINTGSMESELFLAILSSMAEGESVSISENNNWSIQKRFENGTFKCSYPPYGYEWNGSHMVINPEQAAVVREIFADLLSGKGTHAIADDLNQRGIPSKRGGRWTSTTIRGMLSNEKYVGDCLFQKTYSDSQFVRHNNHGEQAQYMVKDHHEPIISREDFEAVRALISQRANEKGIVKGSEKYQNRYAFSGKIICGECGDTFKRRIHSCTGYKYPAWCCNTHINDKSKCHMLFVKDDALKLAFTTMMNKLIFSHRLILKPYLEALKKTSTDDSLHRIQQIQTLLAQNTEKRETLTKLMTQGIIDPVLYSQETNELLSQADTFRDEIEALKNEVSGDVTKVTETTALLHFAEKSAMLHEFDDALFDRFVKRIIVHSRNDIRFELKCGLTLRERT

SEQ ID NO: 8612 - protein, 501 aa, synthetic construct
MEIQIREGSREQKRKLKVCAYCRVSTDADEQENSLENQVRHYETVIKANPDYEYAGVYSDFAISGFKEKRPGLQKMLADAEKGKIDLILTKSVSRFARNTSIVLEATRKLKELNVGVFFELQNINTLSGEGELMLTILAAFAQAESESGSAGAKMVYQRKYEAGIPVQYLERSFGYTKDERGVFVADEAEAVWVRKIYEMAADGYTPASIKRYLNENGVKTVGGVQWVDSTVFRLLENEIYKGDYIMHKHFVNEERKLVRNRGEVDAWYIEDDHEAIVSPELWQKAQDALAAKRDYLAEGSVIEEFTEENYPYMNKIYCAKCGYPLYKRIYSKGNRLNWGCSGTKRYGKSFCDGINIPDGVLRSAWHFEENTYIDEKASDKGVKEFTYLKERSWKRRHKKKQPSAIPENTETEYPYREKIFCALCGSRLVRYVNPQNYKVTWVCNRRKRKGKEACDGTRVPDTVIKGWGEIKKDIYIQRKDDKNGKKRYRYTSKKPSGIRV

SEQ ID NO: 8613 - protein, 526 aa, synthetic construct
MANVTVIPATRNFHTGIRKDAVVQKKTAGYARVSTDSEEQQTSYEAQVDYYTNYIKNNPEWEFVGVYTDEGISATGTKHRDGFNQMIQDALDGKIDLIVTKSVSRFARNTVDSLTTVRKLKEKGVEVYFQKENIYTLDSKGELLITIMSSLAQEESRSISENVTWGQRKRFADGKVSIAYSSFLGYQKGEDGQMEIVPEEAEIVRLIYRMFMQGKTPYAIAKYLMEKKVPTPTGKQRWQHRTIENILTNEKYKGDARLQKCYTVDFLSKKRKVNEGEVPQYYVEGSHDAIIAPAEWQMVQLEMERRRNMGRSHNCCGTFSAKLKCGDCGEFFGSKVWHSNSKYKRTIWQCNAKFKGESKCTTPHLYEQRIQELFLEALGRLLENRETVMDDCRAVMDVLGDCSTIEKELESVSSEMEVVTGLIQKLIVENATRKLDQNDYRRKYEGYVNKYAALESRMDSLKKDRESREIKFDIFSGFLFELSELEELPLEFEVKLFHSLVDYATVYHDGRVVFAFRNGAEVETRI

SEQ ID NO: 8614 - protein, 464 aa, synthetic construct
MARSVTVIPARNRQRETGRRAVQEKKIRVAAYCRVSTDQEDQLHSFEAQVDYYTKYINDHENYEMAGIYADEGISGTNTKKREQFKRMIADCEGGKIDLVITKSISRFARNTQDCLAYSRKLKNLGIGIIFEKENINTLDSTGELLFTILSSLAQDESRNISENYKWGIRTKFKNGEMHLNTFKFLGYDKDENGKLVINKEQAKTVRRIYRDFLIGINPAQIAKELTEEKVPGCNGQTKWYPSTIVGILKQEKHMGDALLQKTYTADFLTKRQVKNNGEIAQVYVKDSHKGIIDKETWNAVQEEFERRERFMKDHGTDRYSYGADCMPFCEKVFCGECKSLFTRHSWKSRGIVQWQCKNHRTDGRVTCSNAYVDNSNLEKGFVKAFNKLVADREKFMERWNQMKTDGSPLEKIRAEQMMEATENEPLGRFVPEIAQLVIAEVTVLGAKKYEFFFLEGSRIKVSV

SEQ ID NO: 8615 - protein, 531 aa, synthetic construct
MNGVIYARYSSENQREESIDGQLRECTAFAQHNDIQIVGEYIDRAFSAKTDNRPSFQKMIKDSAKGEFDVIIVWKLDRFARNRYDSAHYKNILKKNGVKVVSATEAISSGAEGIILESVLEGMAEYYSAELAEKVSRGMKENALKCKYNGGSVPLGYYIDESKHFQIDSSVAPFVVECFEHYADGMTMKQLRDELNMKGVKNSRGGKLSIDVISRMLTNRKYLGEYTFQDITIKDGIPAIVSTSLFEKVQDRLTKTKKAPSSHKADDDYILTTKLFCGKCKSFMVGESGTNAQGKKYRYYKCVNHKKHQGCDMKSIRKDLIENMTIKYIREFLNDEDLINTLIDLAYDAQHKENEQLPLLRKQLAQTEKGIKNIVDAIEQGISTKSTRERLLDLEQRKNDIEMSISKESIENPMLTKKQFKFWFDQLKKLDISKSEQRQKLVDLFVNSIIIYDDHIKFFFNYKEHTETITFDELNNCSDLPDSPRPKKRYQMKGISFYLVCTRLELAAGFSELDELKRSANLGETVRWTVS

SEQ ID NO: 8616 - protein, 508 aa, synthetic construct
MKKAIAYMRFSSPGQMSGDSLNRQRRLITEWLKVNSDYYLDTVTYEDLGLSAFNGKHAQSGAFSEFLDAIEHGYILPGTTLLVESLDRLSREKVGEAIERLKLILNHGIDVITLCDNTVYNIDSLNEPYSLIKAILIAQRANEESEIKSSRVKLSWKKKRQDALESGTIMTASCPRWLSLDDKRTAFVPDPDRVKTIELIFKLRMERRSLNAIAKYLNDHAVKNFSGKESAWGPSVIEKLLANKALIGICVPSYRARGKGISEIAGYYPRVISDDLFYAVQEIRLAPFGISNSSKNPMLINLLRTVMKCEACGNTMIVHAVSGSLHGYYVCPMRRLHRCDRPSIKRDLVDYNIINELLFNCSKIHPVENKKDANETLELKIIELQMKINNLIAALSVAPEVTAIAEKIRVLDKELRRASVSLKTLKSKAVSSLGDFHAIDLTSKNGRELCRTLAYKTFEKIIINTDNKTCDIYFMNGIVFKHYPLMKTISAQQAISTLKYMVDGEVYF

SEQ ID NO: 8617 - protein, 488 aa, synthetic construct
MEKTRAVAYIRVSTERDAQLHSYEFQEHYWQSAFEDDPNTDLIGIYADKGISGHSVQKRPKFLVMMQDAREHKFDKIYTKSVSRFARNTTQLLEAVRELRDLGIEVVFENENIHTFQPTSEIFLTIAATIAENDLEVDSARQRWSIQHRCENGWISVGSGLFGLKLTADNELEIVPEEAAVIRYIYESYVDGGIGSKKIADALNAAGVQSRNGYPWDAKHIIGLLRNEKYKGDVIMGKSVRHFGEYHKNPNAEYAPRYYMEGTHEAIVDRDTWEAAQRILEERSRNHCRTRIAHSFTGMIECGCCGKNYLHKVNNSQCKWQTDIWACRTYLRDGKKACGNSRIKDTVLKEKFISAYNEFIERRPQGDSMVALQEVLEDLRQQEQELAELMMQRLIPKAAYEEERKSVKMQITDISEKISERRAKRVPESEYVPITEFSEEKAKRFLSKVVVTMFTVTFVFYNGAKITRTYDNGQPGNKVGWNKKKEES

SEQ ID NO: 8618 - protein, 540 aa, synthetic construct
MATATRRVVRTMPQMFIDVADNQSERLQVAAYARVSTEKEEQEDSFERQVEHYKQLIYSKPEWQFVDVYADPGISGTRAEKRPDFLRMIEDCRAGKIQKVLVKSISRFARNTVDALQYIRELKDLGISVYFESENIDTLTPGGEVLLTILAAMAEQESRTISSNIKWAWQRKFQKGDVILNTGLMLGYRKIGKDDEGHDVYEINEEEAEIVRRIYREFIAGYSITQIAKRLQADGVKTKLGKENWRHNVIESILTNEKYTGNALLGKTFKPDVLTKYRQKNDGKKAPIYYVEGSHPAIIEKGLFDLAQQEMQRRRDANDNKVGGGRYSSRYPFSGMLVCGICGSKLRRQVRTMGSGKRTASWGCCNRINNGRAECDSHHVNEEVLEATYLTAMRRLVDSAEEVVEVVRDGTELALEPENKAAMERIDEETIQLQEAALALHKAKQRMEIGAVEYASRVKEYSERMKELEAERNELQGTAAKYAEVRMWLDTFIEQTMQSDTLTTVDGTTMKMLVDRIHVRNDGIVVEFKCGVAIEQEYVK

SEQ ID NO: 8619 - protein, 464 aa, synthetic construct
MARSVTVIPARSQKARTGHKAVQEKKIRVAAYCRVSTDQEDQLHSFEAQVEYYTKYINEHENYEMAGIYADEGISGTNTKKREQFKKMIADCEGGKIDLVITKSISRFARNTQDCLAYSRKLKGLGIGIVFEKENINTLDSTGELLFTILSSLAQDESRNISENCKWGIRTKFKNGEMHLNTFKFLGYDKDENGKLVINKEQAKTVRRIYRDFLIGINPAQIAKELTEEKIPGCLGQTKWYPSTVVGILKQEKHMGDALLQKTYTADFLTKRQVKNNGEIAQVYVKDSHKGIIDKQTWNAVQEEFERREKFMKDHGTDRYSYGADCVPFCEKVFCGECGSLFTRHSWKSRGIVQWQCKNHRKDGKVVCTNAYVSNADLEKGFMKAFNRMVTDRDKHMERWQQMKTDGTPLEKIRAEQMMEAVGNDPLTRFVPEIAQLVLCEVTVLGAKKYEFFFLEGSRVKVSV

SEQ ID NO: 8620 - protein, 502 aa, synthetic construct
MEIQIREGNGRQKKKLKVCAYCRVSTDADEQENSLENQIRHYEEIITSNPDYEYAGVYSDFAISGFKEKRPGLQKMLADARKGKIDLILTKSVSRFARNTAIVLEATRKLKELNVGVFFELQNINTLSGEGELMLTILAAFAQAESESGSVGAKMVYQRKYEAGIPVQYLERSFGFKKDERGVYIADEEEAVWVRKIYEMASQGYTHAAIKRYLNENKVKTVGGAKWLDSTVLRILENEIYKGDYIMHKFFVNDERKLVRNRGEVDAWYIEDDHEAIVSPELWQKAQDALDAKRDYLAEGSIIEEFTEENYPYMNKIFCAECGHPLYRRIYSKGNRLNWGCSGTKRFGKSFCKGINIPDGILREAWDFDGNMYIGEKLTAKGTKKFTYLKEISWKRRHKRKEPEPIPENTAEAYPYRNKIYCGLCGSRLVRYVDSKNRKVIWVCNGKKRKGKEFCLGTRIPDSVIQGWGEITKDIYIQRKDDKNGKKRYSYTSKKPKGADRA

SEQ ID NO: 8621 - protein, 501 aa, synthetic construct
MEIQIREGSREQKRKLKVCAYCRVSTDADEQENSLENQVRHYETVIKANPNYEYAGVYSDFAISGFKEKRPGLQKMLADAEKGKIDLILTKSVSRFARNTSIVLEATRKLKELNVGVFFELQNINTLSGEGELMLTILAAFAQAESESGSAGAKMVYQRKYEAGIPVQYLERSFGYTKDERGVFVADEAEAVWVRKIYEMAADGYTPASIKRYLNENEVKTVGGVQWVDSTVFRLLENEIYKGDYIMHKHFVNEERKLVRNRGEVDAWYIEDDHEAIVSPELWQKAQDALAAKRDYLAEGSVIEEFTEENYPYMNKIYCAKCGYPLYKRIYSKGNRLNWGCSGTKRYGKSFCDGINIPDGVLRSAWHFEENTYIDEKASDKGVKEFTYLKERSWKRRHKKKQPSAIPENTETEYPYREKIFCALCGSRLVRYVNPQNHKVTWVCNRRKRKGKEACDGTRVPDTVIKGWGEIKNDIYIQRKDDKNGKKRYSYTSKKPSGIRV

SEQ ID NO: 8622 - protein, 668 aa, synthetic construct
MAYVRNKKKILKFWSKKKAALYVRVSTRYQVDKDSLPFQRKKLKEYCKFLGIEDFVIFEDDGYSAKNTDRPHFQEMMSRVRDGEFSHLIVWKVDRVSRNLLDFAAMYQELKDHKVTFISMNEQFDTSTAIGEAMLKIILIFAELERNMTSERVTGIMLDRAEQGLWNGARMPVGYRWNPEIKFPEPDPEETKIVQFIFDEYERVRSTTKIARYLNHNQIASKRGGQWTSKLIRDIIRNPFYIGTYRYNLRESGRGPLKPESEWIVRENNHPAIITKEQFDRCNAIMDENGTSRDTSELRARKYVHTFSGRLVCGKCGANMIASKDRARANGWRPSMYRCAQRSRMMDCDNSKTVNESYIGPFIFNYVANLARIQKNFKNIKTLEQLEKELLKGPEFENMKVSKESLRRTFDALAFQEVGKGAYLPDIDLSDGDDDYTAAEQLSILKRELDKCKTAIDRLTDLYLYDPDSMTKEEFAKKKKDLVNKIAGYEKQIEASQATGDKDDLADLEFIRKASAFLVAQRIVSKKHVDYIQMALDLDNEILKDFVDQIIDRIEILEGRVQSIRFVNGLVHEFTYSTPADLPVCQKCGGRIGSTCGCRTRTFDFAGKPYRRIKVGDPGDKFHGVTGAVCPECSAQAGRWHHWKCGIERCPICGEQLIACEHGPNGKD

SEQ ID NO: 8623 - protein, 533 aa, synthetic construct
MAKPEVSELAVVYARYSSHSQGEQSIEGQLSNARDYAAAHGYTIVHEYVDRAKSGRTDNRAEFQQMLKDTAKRQFSVIILWKVDRFGRNREEIAINKMKCRKNGVRVEYVAETIPDSPEGVILESVLEGFAEYYSLQLSQNIRRGRAESAEKCQSLGGNRPLGYKTGPDKKFVIDENTAPTVKMIFTMYADGKTVTEIVDKLNEMGLQTLRGGPFTKNSLHSILKNKKYIGIYEYQGHEIKDGVPRIIEDDVFNKVQEMLKINKRAPAKTWSRADYILTDKLFCGKCGALMFGESGTSKTGVKHNYYICSNKKRFRSCDKKAVRQADIEDAVLNATHELLQDDELLDYIVDRTWEYYLAQDNSQEELRNLQRQLAQTDTAISNLIRAIEAGILTEETKKRMDELTQQKADLKASIADREIARGFHLQKSHIAFYLRSLRDADWSDKEAQKRLIQTFVNAVFVYDDHITLTYNFSGDKSTITLRDMQRFEDGEEFGCRASRSTNTIESEPFADWPWVRIYCFVRRPGIIFPAAA

SEQ ID NO: 8624 - protein, 586 aa, synthetic construct
MARAAKQDNNSEIIDGVIYARYSEGPNQTEASIEGQVRECKEYAKRNGIRIINVYSDSKHTGTNDNRAEFQKMLRDSRRGGFSVVVVWKIDRFGRNRAEMAQNKALLKLQGVKVVSAKEYIPDSPEGIILESVLEGMAEYYSANLSQNIKRGMKENALHCKSNGSGKSLGYIVDKDGYFEIEPNEATIVKTIFQKYDEGMKIADIWREIVASGAKTKRGKDFTQYGISRVLSNRAYIGEYRYGDIVTPGGMPRIIDDDLFNRVQERRALSKKAPASRRSNSDVDFLLTGKVFCGHCKGTMRGMSGTSKTGRKFYYYACHDKIFKHNKCTKKNVKKEWLETEVTRITRDDILNKETIEFIADRVVEIQRQEQEDKSMLHYYEQQLRDTQSAINNIMKAIEAGIITSSTKSRLFELEEQKSIIEGEIEREKIITPVIEKEQVIFSLERFFGGDINNKEYQRNIIDMFVNKVILYDDKIIITYNISSQNEISVDVVEQAAFAALDECSSKLSLAPPATRRGGHFPSRLFVNTQSHRCDNLCVTFTNSGACPCTRSALLYVRRFFIAAHQFYLKPNHCFSVAGISRQGFL

SEQ ID NO: 8625 - protein, 503 aa, synthetic construct
MLRAALYARFSSENQREESILAQFRDSTEYCKKHNYAIVAKYADEAKSGTTTIGREQYKLMLKDAQKGKFDIVVFHKIDRNARNELDYYITKHKLEEAGVKYAYSRQDIDSTSPEGQMMESMLVGMAAYYSRNLSNEIKKGLRENAIQGKCTGGRPPYGFSIDANKKLIINENEAPAVRVIFDWYSAGVHYGVIRKRLFNAGYRNRAGKEFTIASIYEILRNRKYVGDLYLGKTLFRKGKRNTHQTSANVQYFENVIPAIVSREIFEEVQVKLDRNKRRSGAGKAKAIYALSGLIYCGKCGSAMVAHSTKNSRGIKNYYYRCPKGRLVGDEKCPQKFINRDDIEETVYQLIRKLFTAPDAHDQIKRIIAKNNMGVKVPDYTDLVKRLKKQESDASKRLDKLYDLYMTDREDEFTSAKMAQIKEEILRLRTQIKEAEDRQAIAQSTTFDIDKIIDTFQKQLKQKQSPEFIKTLFELAVKNVTVYPDKIKVVLLVTQERFELPTP

SEQ ID NO: 8626 - protein, 538 aa, synthetic construct
MNTAPNVTIIPAKIQTAENRDKYHQLRVAAYCRVSTEQEEQQNSYQVQIAYYADLINRKKEWTLAGIFADEGISGTQTKKRTEFNRMIRMCRNKKIDLVITKSISRFARNTVDCLEYVRQLKDLGIGVIFEKENINTLTMTSEFMIALYGSFAQAESESISKNVSWGKEKAYRNGKVPFQYKHLLGYKKGADGKPEIVPDEAETVRVIYDLFLDGFSMTDIANKLTLSGRKTAHGNTEWHREIVRSILRNEKYAGDALMQKTFTVDCITHKVMKNNGERPMYLVTDHHSPIVDRDTFNRVQQELARRNSKRKISDKTITEQGKYSSKYALSELLICGSCGTPYRRQIWNSNGNRYAVWRCISRLEHGKRYCTNSPTLKETVLEKAILNAVNEYFSCRDEIAEILKANIGSVLEYQGQDEIISIENRLKEIDRSRNDLIGLIASGGCDEDKLDGEFAKLYQEEQSLKEQKEDLKEKMRLSADTQEKIDSAMDMIKNESLKLEFFDNVIIRKLVECIKVISKTELLIIFKGGIEVQAEMK

SEQ ID NO: 8627 - protein, 513 aa, synthetic construct
MPAVTVIQPTITEEKTAKMRCAAYCRVSSDSEDQLNSFMAQTRYYSQLFENSETEELIDIYADEGITGTREDKRGEFQRMMKDCRRGKIDRIYTKSISRFARNTKDCLKNVRELKSLGITIFFEKENIDTAKMTDEMMITIMGGLAQEESTSISQNLRWGIKKRMENGTIKMCTPLFGYDLVNGELALNSQEAEIVRQVFDCYLNGSGTAKIAKTLNSLNVQRKGKPCHWTAGTVKLMLTNEKYIGDQLFQKKYTTDTLPFRQMLNKGEREQYYYSQRHEPIISREDFDKVQKILNEHKKSFKGIKDSRIFSKKLYCGECGSTFKFKCNMNKNYWVCRLHDTESDRCSNKQISEVNVISAFIRLYNKLYFNYKEILLPLHTALQNLKLRKFSGQAQVMEVRKEIAKLREQSHVLARLKTKGFLDEAKYIEQTAELTAKINKLQTELKKLTRSDDEYETLDQIEMLIDFFEKQDDPITKFEESEFESIVDKIVVINQHELEFHLIGGLKFKEKI

SEQ ID NO: 8628 - protein, 513 aa, synthetic construct
MPTVTVIQPTLTEEKTAKIRCAAYCRVSSDSEDQLNSFMAQTRYYSQLFEDSKAEELIDIYADEGITGTREDKRGEFQRMMKDCRRGKIDRIYTKSISRFARNTKDCLKNVRELKSLGITIFFEKENIDTAKMTDEMMITIMGGLAQEESTSISQNLRWGIKKRMENGTIKMCTPLFGYDLVNGELALNSQEAEIVRQVFDCYLNGSGTAKIAKTLNSLNVQRKGKPCHWTAGTVKLMLTNEKYIGDQLFQKKYTTDTLPFRQMLNKGEREQYYYSQRHEPIISREDFDKVQKILNEHKKSFKGIKDSRIFSKKLYCGECGSTFKFKCGNNKNYWVCRLHDTESDRCSNKQISEVNVISAFIRLYNKLYFNYKEILLPLHTALQNLKLRKFSGQAQVMEVRKEIAKLREQSHVLARLKTKGFLDEAKYIEQIAGLTVKINKLQTELKKLTRSDDEDETLDQIEMLIDFFEKQDDPITKFEESEFESIVDKIVVINQHELEFHLIGGLKFKEKI

SEQ ID NO: 8629 - protein, 539 aa, synthetic construct
MNTAPNVKIIPAKTQTAENRNRFRQLRVAAYCRVSTEQEEQQNSYQVQIAYYTDLINRKKEWTLAGIFADEGISGTQTKKRTEFNRMIRMCRNKKIDLVITKSISRFARNTVDCLQYVRQLKDLGIGVIFEKENINTLTMTSEFMIALYGSFAQAESESISKNVSWGKEKAYRNGKVPFQYKHLLGYKKGADGKPEIVPDEAETVRAIYDLFLDGFSMTDIANKLTLSGRKTAHGNTEWHREIVRSILRNEKYAGDALMQKTFTVDCITHKVMKNNGERPMYLVTDHHSPIVDRDTFNRVQQELARRNSKRKISDKTITEQGKYSSKYALSELLICGSCGTPYRRQIWKSNGNRYAVWRCISRLEHGKRYCTNSPTLKETVLEKAILNAVNEYFGCRDEIAEILKANIGSVLEYQGQDEIISIENRLKEIDQSRNDLIGLIASGGCDEDKLDGEFAKLYMEEQSLKEQKEDLKEKMRLSADTQDKIDSAMDMIKDESLRLEFFDNVIIRKLVECIKVKSKTELLIIFKGGIEVKTNIEN

SEQ ID NO: 8630 - protein, 535 aa, synthetic construct
MSEIVYCLYRVSTAKQVDKVKDDIPMQREACRDFAKRMGWTVEKEFLEKGVSGFKVSATDRDAIQELKAAALRNEFQILLVFMFDRIGRIDDETPFVVEWFVKHGIRVWSVQEGEQRFESHVDKLMNYIRFWQASGESEKTSMRIKTRMQQLTAEGCYTGGGVPFGYQLEKRGRLNKRGKEIYDLAVNPIEAEWVTVIFEKTVKEGYGSHRLASFMNDNGVRTHSGAKFQCNTIIRILRNKLTCGYMVSGETVSPHMKELQIIDEKLFERAQFILDQRAKKNDEERHIAMSTKSQAMLSGIMHCAHCGSRLTSSMHTEKYILKSTGEVRTKQYLRYMCYHRSRKLCDCDGQSVYSAEKVDNAICNVMADIFSKISDAPDEAELKREYNKEMQKCRAKQTKFNAELRKYKAQYEKLNDEIANTLIGESFYSPEQLSAAMTTVQQKIDVINHQLEKLNNEIEFKRASMEKVRPMYEQFKGWAEEFRLASIEQKKMIISQVTSRIELGRGYRIRITLNMEYEQFCEGWNALETGGKTE

SEQ ID NO: 8631 - protein, 502 aa, synthetic construct
MEIQIREGSREQKRKLKVCAYCRVSTDADEQENSLENQVRHYETVIKANPDYEYAGVYSDFAISGFKEKRPGLQKMLADAEKGKIDLILTKSVSRFARNTSIVLEATRKLKELNVGVFFELQNINTLSGEGELMLTILAAFAQAESESGSIGAKMVYQRKYEAGIPVQYLERSFGYTKDERGVFVADEAEAVWVRKIYEMAAEGYTPASIKRYLNENGIKTVGGVQWVDSTVFRLLENEIYKGDYIMHKHFVNEERKLVRNRGEVDAWYIEDDHEAIVSPELWQKAQDALEAKRDYLAEGSVIEEFTEENYPYMNKIYCAKCGYPLYKRIYSKGNRLNWGCSGTKRYGKTFCDGINIPDGVLRSAWHFKENTYIAEKASDKGVKEFTYLKEQSWKRRHKKKQPPAIPENTEAEYPYREKIFCALCGSRLVRYVNPQSHKVTWVCSRRKRKGKDACDGTRVPDTIIKGWGEIKKDIYIQRKDDKNGKKRYSYTSKKPEGADRA

SEQ ID NO: 8632 - protein, 464 aa, synthetic construct
MARSVTVIPARSQKVRTGHKAVQEKKIRVAAYCRVSTDQEDQLHSFEAQVEYYTKYINEHENYEMAGIYADEGISGTNTKKREQFKKMIADCEKGKIDLVITKSISRFARNTQDCLAYSRKLKNLGIGIIFEKENINTLDSTGELLFTILSSLAQDESRNISENCKWGIRTKFKNGEMHLNTFKFLGYDKDENGKLVINKEQAKTVRRIYRDFLIGINPAQIAKELTEEKVPGCLGQTKWYPSTVIGILKQEKHMGDALLQKTYTADFLTKRQVKNNGEIAQVYVKDSHKGIIDKQTWNAVQEEFDRREKFMQRHGTDRYSYGADCMPFCEKVFCGECKSLFTRHSWKSRGIIQWQCKNHRKDGKVVCTNAYVDNADLEKGFVKAFNKLVTDREKYMEIWQQMKSDGTPLEKIRAGQMMEAVGNEPLTRFVPEIAQLVLCEVTVLGAKKYEFFFLEGSRIKVSV

SEQ ID NO: 8633 - protein, 484 aa, synthetic construct
MNAVIYARYSCDRQTEQSIEGQLRECKAFAASEGIHIIGEYIDRAISGTTANRPEFQRMIADSRYKTFQAVIVYKLDRFARNRYDSAMYKSKLKANGVRVLSAKEHITDSPEGIILEGLLEAMNEYYSAELSQKIKRGMRENAIKGKTTGGNVALGYRIGADKQMEIDPAGASLVRRIFTSYDNGRTFTEICDDLNHAGYTTSRGKQFRIDTISRILANQRYTGTFQCAGEEAHCPPIIEPELFRSVQERLTESRHKHRHTQSPHDYVLTGKAICGTCGRRLTGRAGTSKTDKRYYYYCCPNKCCGWLPAAELEHAVLDAIAQYTTPEACEQIANATYALYQQSTHENADLTAAQRRLQETEKKLENAVNAILSGITSAALQTTMQQLEQQKAALETEVRLLQTDAPELKLEHFQYFAHRLLEVQAEGTEKILQLLVNQVIVYKEQITVLVNLTDKTKTPPLEQVTAALRESSCSIACGGGDEN

SEQ ID NO: 8634 - protein, 503 aa, synthetic construct
MLRAALYARFSSENQREESILAQFRDSTEYCKKHNYAIVAKYADEAKSGTTTIGREQYKLMLKDAQKGKFDVVVFHKIDRNARNELDYYITKHKLEEAGVKYAYSRQDIDSTSPEGQMMESMLVGMAAYYSRNLSNEIKKGLRENAIQGKCTGGRPPYGFSVDANKKLIINENEAPAVRVIFDWYSAGVHYGVIRKRLFNAGYRNRAGKEFTIASIYEILRNRKYVGDLYLGKTLFRKGKRNTHQTSANVQYFENVIPAIVSREIFEEVQVKLDQNKRRSGAGKAKAIYALSGLIYCGQCGSAMVAHSTKNSRGIKNYYYRCPKGRLVGDEKCPQKFINRDDIENTVYQLIRKLFTAPDAHNQIKRIIAKNNMTVKVPDYAEQIKRLKKQESDASKRLDKLYDLYMTDNEDEFTLQKMTQLKEEILKLRVRIKEAEDRQAIAQSTTFDIDKIIDTFQKQLKQKQSPEFIKTLFELAVKNVTVYPDKIKVVLLVTQERFELPTP

SEQ ID NO: 8635 - protein, 445 aa, synthetic construct
MNVIRGVGYIRVSTAEQATRGLSLDAQEAEIRTYAKAHGIELFNIYVDAGITARKRLDRREAFGQMMKDVDSGLIDEIIVMRLDRWFRNIYDYHKMMNEHLIPHGVNWSAVKEDYDTKTTNGRLMINLRLAIAEQECDTDGDRIRDIHDNQIANGIWIGGCAPPGYRIENKRLSIDPDMQPAVSYFFERLLSCGSVRRAMLDMNERHNLHFEYGQAIRMARSTTYCGVRRENYNYCPTYISQDEHARIMAALEHNVRVRSADNARIHIFSGLLVCSCCGRRLAANTVRKKSVTWTAYRCHRAFGDHVCDNRHLVDERKVEAWLLDYLENGLSDYIVSASVADAQPVVVDNTAAIRERQERVKELFINGFIDLQEYKKRATELEAKIQVPEKQPPRSMEKLKSLLERGVRAIYNDLSRGERQEFWRSIIREIPVNNGAVSGDPIFL

SEQ ID NO: 8636 - protein, 569 aa, synthetic construct
MKQSSKNPTMGTAALYCRLSRDDNMDTESNSISNQKKILQKAAKEKGYTDTLFFVDDGITGTTMKRKDFQKMLAAIEAGYISAVFVKDLSRLGRNYIEVGKLTEEFFPQHDVRLVAVADGVDSDEGENEFTPFRNIMNEWYAKDISKKRRIVNKMKGNSGIPLSPPPYGYIKNPDDPRFWVIDPEAAAVVRRIYQMALDGYGLAETAAALEKDGILNPTYYWRAKGASRGGSKSTVEPTKWGHTTIKKILTLQEYCGDVINFKSYSKSYKMKRRIENPEENRAIFLNIHEAVIDRATWEKVQSMKKGTRRKRPTVTQEPSVFSGLLKCPECGGNLNFHFNQSNHDIKFFSCQNHNSGLRKCSKTHYIRLDFLEQVVLYEVRRLAAFANEYEDDFIKAMMGRSAKVAENDRARKQRELDGLLARDKELDVLFERLYEDNVAGKIDDTRFAKMSKRYEQEQGENAKKIKALRLELKKSEGKRMDVDHFLEAVRRYTNADKITQRMAAELIDHIDVYHAEKQDGVTTQRVVIYYNCIGAFEVPERRKIPEADITMRTRKGVAVSYAPAQVAV

SEQ ID NO: 8637 - protein, 502 aa, synthetic construct
MEIQIREGSREQKRKLKVCAYCRVSTDADEQENSLENQVRHYETVIKANPDYEYAGVYSDFAISGFKEKRPGLQKMLADAEKGKIDLILTKSVSRFARNTSIVLEATRKLKELNVGVFFKLQNINTLSGEGELMLTILAAFAQAESESGSAGAKMVYQRKYEAGIPVQYLERSFGYTKDERGVFVADEAEAVWVRKIYKMAAEGYTPASIKRYLNENGIKTVGGVQWVDSTVFRLLENEIYKGDYIMHKHFVNEERKLVRNRGEVDAWYIEDDHEAIVSPELWQKAQDALAAKRDYLAKGSVIEEFTEENYPYMNKIYCAKCGYPLYKRVYSKGNRLNWGCSGTKRYGKTFCDGINIPDGVLRSAWHFKENTYIAEKASDKGVKEFTYLKEQSWKRRHKKKQSPAIPENTEAEYPYREKIFCALCGSRLVRYVNPQSHKVTWVCSRRKRKGKDACDGTRVPDTIIKGWGEIKKDIYIQRKDDKNGKKRYSYTSKKPEGADRA

SEQ ID NO: 8638 - protein, 505 aa, synthetic construct
MCPIDALYARQSLDKKDSISIENQLEFCKYETRGAEYETYIDKGFSGKNTNRPAFAKMMEDIRAGKIKRVIVYKLDRISRSILDFSNMMEIFQQYHVEFVSSTEKFDTSTPIGNAMLNISIVFAQLERETIQKRIADAYATKSQKGYYMGGRVPYGFQLEKTIINGIHTSVFVPEPNEMKQIRLIYQLYSEPDMTLGAVMRELLRQGFTEKRGAPWSTARISEILRNPVYAKADIDIYNFFESQGANMINPASDYVGTNGIFLYKGINGDKTKKKQYDLVDRDVVIAPHLGVIESNVWLKCRLKIMKNRQSARTNKGKRTWLAGKVKCKKCGYAYTVTRSNTKAGRYFQCSGSRYSIKCKGAGHTIYADVFEDYVLEEMKKQLAKFQYLSDELEAVTQPSSQAEKVRIAEIEQEIGNLLAKVPEANKTVMEYINRRIEELDKEKQSLQQKLVEQSTNQTSGKMDKITNYVAKWDELDNDDKQRVADILIDRIDIDEDIIEITWNI

SEQ ID NO: 8639 - protein, 510 aa, synthetic construct
MSYFIYARKSRKDADLEALGIDVLERHITTLLELAKTLSLPIGAIYREVVSGDSIDSRPVMSQVMAEVESCMWDGCLVMDVDRLARGDTIDQGRVQRAFFYSNTKIVTPNKTYDPANEYDNEYFEFSLFMSRREYATIKRRMQRGRERSSSDGYYVGNIPPYGWRRVIAPDGKHFSLAPDPTESPVLDLMYDLCGNKQYGYQKACTHMAEMGILSRSGRPFTPSTLKGIISNPANIGKVRWGHRKTVRTVKDGKISRSRPHSSDYILADAVWPPRISADLFRRANQPKGSCSAPVRDDRPIQNIFAGLVRCSQCGRLMVRKKAHTKTPYDILICQYTECPTVGIRIDELELALLEWLRNYIDKYELTDALPEDAENVAAKEAIVKNFEKEHETLLKQRESLFDFLEQGIYTKEIFIERSNALEQRVKECMEHIISAQNDLHATLALQANRKNFVPRCKNLLGEWGRLTIPEKNSALKVLIEKIMFTKTKRNKKGQDRSDFEIDVFPKVPK

SEQ ID NO: 8640 - protein, 502 aa, synthetic construct
MEIQIREGNSIQKRKLKVCAYCRVSTDADEQENSLENQIRHYETVIKANPSYEYAGVYSDFAISGFKEKRPGLQKMLADAQKGKIDLILTKSVSRFARNTSIVLEATRKLKELNVGVFFELQNINTLSGEGELMLTILAAFAQAESESGSVGAKMVYQRKYEAGIPVQYLERSFGFKKDERGVYIADEEEAAWVRKIYEMAADGYTPASIKRYLNENGVKTAGGAEWIDSTVFRLIENEIYKGDYIMHKHFVNEERKLVRNRGEVDAWYIEDDHEAIVSPKLWQKAQDALEAKRDYLAEGSVIEEFTEENYPYMNKIFCVRCGHPLYKRIYSNGNRLNWGCSGTKRYGKSFCEGINIPDGVLRRAWHFDENMYIGEKQTDKGKKEFTYLKEASWKRRHKKKEPEPIPENTETEYPYREKIFCGLCGSRLVRHVNTKNHKVIWVCNGRKRKGKDFCDGTRVPDTIIKGWGEIKKDIYIQRKDDKNGKKRYSYTSKKPNGADRA

SEQ ID NO: 8641 - protein, 464 aa, synthetic construct
MARSVTVIPARSQTVRTGHKAVQEKKIRVAAYCRVSTDQEDQLHSFEAQVEYYTKYINEHENYEMAGIYADEGISGTNTKKREQFKKMIADCEGGKIDLVITKSISRFARNTQDCLAYSRKLKNLGIGIIFEKENINTLDSTGELLFTILSSLAQDESRNISENCKWGIRTKFKNGEMHLNTFKFLGYDKDENGKLVINKEQAKTVRRIYRDFLIGINPAQIAKELTEEKIPGCNGQTKWYPSTIVGILKQEKHMGDALLQKTYTADFLTKRQVKNNGEIAQVYVKDSHKGIIDKETWNAVQEEFERRERFMKDHGTDRYSYGADCMPFCEKVFCGECKSLFTRHAWKSRGIVQWQCKNHRTDGKVTCSNAYVDNSDLEKGFVKAFNKLVTDREKFMERWNQMKTDGSPLEKIRAEQMMEATGNEPLGRFVPEIAQLVLAEVTVLGAKKYEFFFLEGSRIKVSV

SEQ ID NO: 8642 - protein, 523 aa, synthetic construct
MPNTESFTVNEVLVYLRKSRSDSPDMSVEEVLRKHEEMIQQYASTHFHSPIPEKNIFREVVSGETIESRPQMKNLLKMIESEQFKAVLVVEPQRLSRGDLEDCGRLINILRYTNTTVLTLTHSFNLQEEYERKFFEMEITRGNDYLEYTKRILKRGREASVAKGNYIGSVDPYGYKKTVIKKDGVTCHTLEIIPEEADTVKLIHELYAYTPEGIGFTNIAHKLDAMHIKPKKAAHWTPAIISSILCNPLYLGMVRWNNRKVVKYINEGQLAKARPQNSEAKYYKGLHEPIITQELYDACMARRGTNPSLRRNKELCNPFAGLLYCGTCGHAMSLKIYKNHNSVSQMMLCNHQAYCHTKSVLYSAFLRRFISSMEDTLNDFELAQKSDDGRAQAISKMIVVNLENKLKKLNEKDARQKDAYEDGIYSKEEFLVRNVKTQQDIASTIIALEDARAKKADIIDYEEKIRRFKDCLHALNDPELSAAEKNRFLKSCVDKILYYNNMESKAGIGRYIENVFSLEIQYK

SEQ ID NO: 8643 - protein, 588 aa, synthetic construct
MRIVNKIEAKTPQMPRRKRVAAYARVSMESERLQHSLSAQVSFYSSLIQSNPAWEYVGVYADNGITGTKAEAREEFNRMIADCEAGKIDIVLTKSISRFARNTVDLLNTVRRLKELGVSVQFEKERIDSLTEDGELMLTLLASFAQEEIRSLSDNVKWGTRKRFEKGIPNGRFQIYGYRWEGDHLVVHEEEAKIVRLIYDNYMNGLSAETTEKQLAEMGVKSYKGQHFGNTSIRQILGNITYTGNLLFQKEYVQDPISKKSKINRGELPQYFVKNTHEAIIPMEVYQAVQTEKARRRELGALANWSINTSCFTSKIKCGRCGKSYQRSNRKGRKDPDANYTIWVCGTRRKTGNAKCQNKDIPEQILKEACAVVMGLDTFDEIIFSEQIDRIEIPAPNEMIFYFKDGHIVPHHWESTMRKDCWTDERRAAKGRYVQEHQLGPNTSCFTSRIRCDSCGENYRRQRSRHKDGSFDSVWRCASGGKCQSPSIKEDALKNLCADAMGLEEFSETVFREQIVCIHITAPYQLSIRFFDGHTFETAWENKRKMPRHTEERKQHMREVMIQRWREKRGESNDNTGDDKPIHGNADQ

SEQ ID NO: 8644 - protein, 541 aa, synthetic construct
MGQKCVIYTRYSSDRQREESIEGQIRVCEDYAKRNGLEVLHIYADRAMTGRSDQRPEFLLMIKDAASMTFDTVLVYKLNRFARNRYDSAKYKHKLKKYGVKVVSAMENIADDPSGILLESVIEGMAEYYSVELAENVVRGMTENALEGKWPGGIVPLGYKLDDDHHLVIDEPNALVVRRIYQMILDGRTPASICRILNAEGKRTATGSAFNHNSITRLLSNERYIGTFSWRDVRRTGVVPRILDDRTFYAVQELRKSRKRHKGVAKRSENYMLTGKVFCGQCGSPMVGKSGTSKGGCVYYYYNCQHHIDGSGCPSRPVRTDKLEDQVVQVTTKILSQPDAIKAIARQAIAIQKERRESLEVQSLKAQVTDLSKKLDNCLKAIDNGAFSEALCNHMREYESRLRDLKAALSRAQLMDRGGKLTEQQIEFFFFAISRQLKQEDRYKEILLSSLVRCVIVNDDSIEIQYNYKKELPTLANPVKVKSSHKAVMVTLGATGFEPTTPCSQGRCSTKLSYAPSSITLQFLQKKMVGDDRIELPTFCL

SEQ ID NO: 8645 - protein, 559 aa, synthetic construct
MSKTVAIYVRVSTGKQADRDSIPFQIQECSNYVKHFLKTENFEVFKDAGRSGKNTHRPEYQRMIEKVKAGMISHVVVYKIDRISRNLVDFSIMYNDFKEHKVAFISLNEQFDTSSAIGEAVLKIILVFAELERKLTGERVRDIMMNRALEGKWNGARVPYGWDWDTKKQCPVHSDTEAEYARMMYRLYDECHSTCVVRDYCNAHDIPTKRGGEWTSKTVADFLRNPMNVGDYRYNYRKSARGKRNDPSEVIYVKDVFPPLIDRELYERVTHQMDLNTFGLGKDGRKVVSKKTHVFGGLVVCGLCGAFYHSDADVVRADGFRPSNYRCGAHNKKIHCKAKGTSDVKLGPFIFNYISNLVKASKSKKLLHFVSDLEQILLTGPEFEQVAGIADIGLDVTFDTIMHGFKPKRYTAAPYTVIRSGDSDALTAKRDKTIRALERLKKLFLFEDDAMSEKEYLMSKRELEGTLSDIENELSALEADTADTKYDDMSFISTASGFLIAHQIASGEHINYRELSCAVDAKVLKDFVNSVIERIVLLDGRVASIEFKNGLVHEFLYRE

SEQ ID NO: 8646 - protein, 559 aa, synthetic construct
MAYRKITDIKATIGMRAVFYARVSTAEEEQLNAIELQIEENRGCIKDHGWKLVGEYIDRSKSGTMVKGRDDYQRLYEDLYEDLFDIVVIKDQERLQRNTLDWYLFINRVVQTGKLLFMYMDGKFYSPDDALITGVRAIIAEEFSRNLSKKLHNYHDHRIEKARQGQEIALQGSGNVYGWDKKDGKYYINPEQAKVRRLMCEGIMARKGSTLIAKELNEAGYRNTVGKPWKPMDIPKFVYDCKNVGTMIINKERHDFESKQTIKLPKEEWVYVENALPPIVTQEEWDLICKIHEERVIATGSDKRGKKTSGYSFSGKLVCGICGAPYWRKQRVSKDEYWVCSTKQTKGRKTRKRDSTMGKAGEINPLGCDNENISYNSLMEIMGVVSERLQANTDTIKQDMINWLTKLRKQLLEANGGHTEADLQRELSRKSKLLDAYLDGILNKQEYQKKAEELDERIIQLKAETEKNKANSGDIAEIDKVLANIDEEVARYVDGNEKLKVEYLLEHLEQVQIFPDKVIVIVPILSEGIVVEKTQYVSREKWCWEIYDYENAFGLDCTY

SEQ ID NO: 8647 - protein, 566 aa, synthetic construct
MSISNPVMADCPPRKGAETMLRQSDKITALYCRLSRDDELTGDSNSIVNQKAILSKYAKENHFSNPLFFVDDGYSGTDFNRPSWSELLEKIEKGEVSTLIVKDMSRLGRDYLKVGFYTEILFVEKGVRFIAINNGIDSANQQDSDFTPFLNIINEWYAKDTSKKIRAVMKSKGEAGEHLCTNPPYGYMKDPENKKRWIVDEEAATVVKRIFALCLDGYGPSQIARILKADKVLIPTAYWQAQGKTVNHSVPENPYLWVSATVADILEKKDYLGHTVNFKTYKQSYKSKKKLYNPEEKQLVFENTHEAIIDADTWKRVQELRKNKRRPTRTGKTNMFSGIARCADCGEKLYYCTSRNFEARQDHFVCSTSRLKGKEVCTTHFIRAVVLEQGVLAHMRMTIACVANHEEQFRKAMGAKQKAEAKRELTAKRRQLTQAERRIDELDRLFKRIYEDSVSGKLSDSRFQMLSDDYEQEQEELREKLLRLNEEITKQEEQAENIDRFIGKVRKYLDLDELTPAILNDMVKAVYVHAPDKSKGYREQQIDISYDLVGILPASLLNDLQNGETA

SEQ ID NO: 8648 - protein, 494 aa, synthetic construct
MIAIYARQSVEKKDSISIESQIEYAKHEVFSDDFKIYQDSGFSGKNTNRPAFMEMMHDIEAGRIEKVVVYRLDRISRSIVDFADFIDVLENNGISFVSATEKFDTSTPMGRAMLYIIIVFAQLERETIAERVRDNYYARVKKGAWGGGPAAYGFDLVRTTLDGKKATIYQPNADLETVARIFEVYSRPNTSLSDVQKELIRTGSLSSGGVNFDNVKLSSILKNPAYVRADIAVYNYYKARGAILANEPEDFDGVHGCILVGKRDASERKYKDVSNHLLAMGHHKGIVDSTMFLYCQEKLSKNRQIKNTGKGKHSWLTGLVKCGHCGYAFSVRFGQTKEGPTPYFVCSGKYLHKCCDVKQTHRVRDVEAHVQARLIQEVESYHLTREKRENAVIKQNQQKIADIDSKIENLISTLENVSSISAEYINRRIETLHREKQLLIHQYSEALAEFNTAEVIPFTADDWENMSFEDRRDIAHNMIDRVVLTEDGIDIRFK

SEQ ID NO: 8649 - protein, 523 aa, synthetic construct
MRFFSYGRKSVFSDKSDSIDNQFRMNREYCESKFSGQVDSWQQFSDEDFTGANTSRPDLQRMLSFIKGGFCDVLVVYQLDRLSRDVRDFANIYALLEEHGVMFISIKENIDTTTPIGRAMMYVTVVFAQMERETIAARVTDNMLGLAKKGYWTGGNPPVGYVRKHIVVNGKKHCSIEVDPDGARYVTQIFDTFLAYNCSLQGMETRFKNQGIRTQSGKFFSTTQLHKILTMPYCVEATPEVYDFYAAKGCIMDPGSPREMWDGSSGVIIYGRSTEKNKKHQLQPPEKWTVCLGKHKPFMPADKWLAVQSRFTQNKCIKDAKWPVPLLKGVLRCKCGNLMQVSRKKKVDGTCSSWYYCRKRMRQGVDACDMGQIKCDLLDEEVLELFRGITADPGLIQKFVKAEAPADVPDLKAAQARVSACERKIGRLAASLALAEDSAASKYIIAEMERLDVELGALKREASLAEMESHRAAASAKDAKATAAEIAKLIHGLEGFDDKEKNAIARAVIQECTWDGERLFITL

SEQ ID NO: 8650 - protein, 456 aa, synthetic construct
MRNKEIAPALVRVALYIRVSGEEQKIKGLSLEAQQERLEAYARERGWVIVGIYIDAAKTARKNIHKRTEFQRMMDSVKRDEVDILLFARLDRWFRSVADYYKVMEILQAHNCDWKTTDEEYDTTTANGRLYINVKLSIAQNEADIDGERIDVVFDSKIAHGTVVSGSAPFGFRVNEEKRLEVVPEDAAIVQDAFNYFENTVSQRATVRYVRETYGVNWCDATFRRMLKEKLYTGVYDRGGRYNDQFCPAIISRQQFDRVQVLLTRNVRSAPSGKVYIFTSILTCAECGHKLVGYKSSDYFYYRCNQHFQRGRCSHNHSAREDVVEQWLFEHLGEELERCQLEWDVEAAKKKASVARTDKAALKRKLTKLKELYVNDLIDIEDYKKDYQIYVSALNQIPEPAQEAPPDFAAVRRLLDNSFRTIYDTLTREEKRTLWRSVIKEIRIDNDQNITGVVFG

SEQ ID NO: 8651 - protein, 530 aa, synthetic construct
MEQYLIYLRKSRSDLEAEAHGEGETLSRHEHTLLELAKRQHLNVTDIYREVVSGDTIAARPMMQRVLSEVEQGVWSGVLVMEVERLARGDTIDQGIIAQTFKFSGTKIITPIKTYDPDNEFDEEYFEFGLFMSRREYKIINRRLQRGRLASAKEGKWPSGLAPFGYRRVKLKNEKGCSLEPIEEQAAIVRMIFDLYTVGLQDEDGSARPLSLGSIATRLNDMHIPSPSGSQWARITIRGIIKNPTYIGMVRWGSRETKKKVVDGKVVSVRGPADPEKECVFKGIHPPLVPKETFELANDKLTRSENTSTHKEKVVRNPLAGLLVCSECGRQMMRIINPVHPDMPVVRCPRRGCPNCSSYLPIIEERVIQGLSEWMKGYELEWSSAAASSSVSSVGVREKALASAEAELRKLQQQLERTHDFLEQGIYDTDTFLSRSRMLSDKIAAAKDSVTRCSRELTEEKLRETSRRDIIPKVKNLLDVYPLLETAEEKNALLKEVLEKVVYQKLNEKRKKSPDGFTIEIYPRIPKSEK

SEQ ID NO: 8652 - protein, 517 aa, synthetic construct
MPRKKKLQEVGGLRLVAYYRYSGGSGQTEQSIEGQRRDCEAYAKLHGMTIQHEYIDRHISGKTDDRVSFQQMIRDSDKGAFDMVICWKTDRFARNRYDSAVYKKRLRDNGVEIIYAAESNISGAEGIIIEGLMESLAEYYSAELAEKMRRGMRESALKCQAINRCRPLGFTTDAGKKFIIDERTAPAVRFIFEHYAAGESAAYIVEQLNEKGYRTSQGNEFNKSSINRIIQNEMYRGVYISKAYDVRIEGGVPAIVDDELWRRAQAMAKLNKQKRAKYSSKADYFLSGKLYCGECGCLMKGISGHSSTNGEVYRYYACSNPKCKKHNIPKEELEGKVIQAIIDNLLQPEAMEALAEAMVAVQETDADKPNAEREAIQQELADVRRRSKNILDAIENGTANPHLTARLDELTERENTLRFQLSTLTDEKPLRFTKEEYLFLLEQFLIDPAERNEDYGRRVVHTFVTSMEVSDSKLLIYFNISEESADKNKNASPSELQKESSTVKRLVRVARIELTAS

SEQ ID NO: 8653 - protein, 641 aa, synthetic construct
MTNTIFKNNTKIGNPYDFLDRNRHRKMVFYGRVSTEHEAQMAALENQIEWYDDQAKYHPNWEVLNKYIDEGITGTQAKKRPAFLQMIEDAKKGKFDLIVTREVCRFARNTVDTLVTTRELKNIGVEVYFVEDNIWTMDGDGELRLTIMATLAQEESRKTSERVKAGQHISRQQGMVYGRGNILGYNRKAKSTYTINPEQAETVRMIFDLYLQGEMGASKIANELTRLGRKNASGLVKWSPCVITRIVNNPTYMGYQAYGKSYSNNYLEQKRILNNDFSTYMLVKSDYEPIITEEEWYRCQEIKQRRVTKTIGVSTDGKKKQPNHGKNETKDLWATKLKCRCGASFRRNRWHKNNNAPWSYGYLCYNRLNNGSAQKRRDAGLDDTGYCDQTEIPDWKLEMMGKMIMEQVWRTRAEDIKLACEILQECYKPDSKAPQQNKSVMLANIEKLKSKKDILLDMRSDGEITKEEFLKKKEDIDKKISQLTAEYEKDDCPTESDEAGLELGKIEAALNELIDFSQLVLPREIYQKFVSKVTPYSKTHYRWYLNLDGTGTQMADVKVNGRKSNATVAFCDEGEIPPVHFKEIIFFNILKQEIKNKKSFFVATLHRLLLLKCNSVIFVLILYSVIFWAVPFWDSPFALLK

SEQ ID NO: 8654 - protein, 581 aa, synthetic construct
MIDNCARAVFYARVSTQEEQQLKALPKQIQENRDRIREKGWVLVDGYVDEGKSGTVIKRRDEYQRLLEDMELNKFDVVVVKDQERLQRNTRDWYNFIDRLVQNKLKLYFYLDNTFYSPDNALITGVKAIMAEEYSRNLSKKMNNSNKRRIEKARAGEEVSAMGNGQTYGYSIVDGKWVVDESQREVVRRMYELYTELHSVRKVRDALNEQGYRNQRGNLFTDENISRIIKNVMHKGWVILNRHHRDFDTKEIIEKSEEEWVIVKNDHEAIVSEELWDAVNDEIQSHRNKGNSGTRGKRGGTDTLSGKMVCNCCGRVLWKHASQGSYKSKEGRKYTYKRYTQWYCSGKMGRGELACTDPATISGVKLQKYLVEMADMFLDYSTVEYSKNLLKRRTISWLEDLRDKLTTPTDNGKIEQDLKALEGKRGKLIDLYTDELISKEEFKSRSVDLDAEIEKKRALLVPVEENPDIKAIEDTIANIDAEIEVLFEDEAMVEEKKVQFIQEHIKKIYVSKNSDVFIVLDNVAGAFLFIDKEDTRIEVVPVAEYNPEELSEEGITENDFVPFDRESMPKHYGRKRYDIFS

SEQ ID NO: 8655 - protein, 516 aa, synthetic construct
MNNVACYIRVSTDKIDQQNSLEKQRILLQEQYKDCNISMYSDTGTGTSFKRKGFKQLLFDCGLNEKILKDGRLTFEVDAIREPLFNEIVVINTSRFARNIAIIDILRVLWDYKKVNVKFLDVQKNSNNPSDMILLQMFFAMAENEVAETSKRTKRGNKTTIMQNKIRNNSIFGWDFDRETNSLIANEKEKKVVEFIFETALTNGLKNTAKLVNEKGYRTKKGNLWTDSTIKTLITNPKYKGYNVRNKYESINLFTESRSKYVKKENWVVMKNNRIEPLVSEELWEKVQQALKQRCIAGNKGQNARIYDTRGKVKCKCGANYVRCVTTKVTNEPKDKHYLICGNKKKYGKDYCKAENITVGILDRFIEEQRKSYYKNIQLQTRVKIMQLQKEVDNIAKDEVFSIKEKEQELDVLREKLDKLLDTFLSSSETMQKLVEKKIGELEVHIKRIELEISNIKSIYADKEKHLRQLNNRIIKLKQDLINSIDKELTRKEWLDKVDKIIIESKISFNVVYNLD

SEQ ID NO: 8656 - protein, 426 aa, synthetic construct
MRVKVINKRPASVLQKKRVCAYARVSTDSRRQEDSLENQMETYERLITGNPEYEFIGVFADQGISGYCENRPQFQRMMEKARAGEIDLIITKSISRFARNTVTVLKFARELKELGVGIFFEEQNINTLSGDGEMMLAVLASFAQEESRSMSENNKWSIRKKFERGEVMITTSRFLGYDKNEYGDLIVNRKEAEIVSLTFDLYLLNVGSSRIGELLDYLGVKTVTGTTWESGTINGMLCNEKYKGDFHLQKYYTPENKRNHTRKNNGEVQSYYISENHEPIVSPEVWEKVQEVREQRKRDRNIGQDSTMKFQNRYPLSGMLICPYCGKTLRRRQVYKKKIQWLCSTYIEKGVKACKGIRIDDAELQGLNITEQTVIEEVVKNGKKHYCYTSKADFDCGIRNSTVSAEIEDGSVLPGINRPRRTVIKL

SEQ ID NO: 8657 - protein, 444 aa, synthetic construct
MAAYCRVSTDQEEQLLSYENQVNYYTNYISENPLYEYAGTYADEGISGTNTKKRDEFNRMIADCRAGKIDMIITKSISRFARNTLDCLNYVRELKELGIGIIFEKENINTLDAKGEVLLTILSSLAQDESRSISENCTWGIRRRFETGKHKMSTKRFLGYDADETGKLVINRTQEPIVVRLYQEFLDGKTTDYIKRIFEREGVKNWDGGTKWQSTTLMSMLENEKYKGDALLQKSYTVDFLTKKRTQNKGEIQMFYVEDDHDAIISKRIWECVQLEIKRRKKYLEEHGTNSYSHRPESNPFASKIICGDCNKVFARKGWRSSTGIDRKVWQCSERYKVKGVMGCANRHVEEETLIKAYLMAWNALVENREDFMEQWTEQLKSENLLEGYRAEKFIEYTDGAEPLTEMDTDFMLKTLDHIKVFEDGTLLVVFLDGTEIECKNEEE

SEQ ID NO: 8658 - protein, 465 aa, synthetic construct
MARSITVIPASQPYRVGGRTQQKTRNLRVAAYCRVSTDQEEQLNSFENQVEYYTKYIQDNPLYQMAGIYADEGISGTNTKKREEFKRMIRDCEEGKIDLVITKSISRFARNTQDCLEYSRRLKNLGIGIFFEKEHINTLDASGELLFTILSSLAQDESRNISENCKWGIRSKFKKGIPQVDCTKFLGYDKGEDGKLIVNQEQAKIVKRIYREFLNGYNPAAIAKMLMEDHIKTGTGREEWRSASVRAILKNEKYMGDALLQKTYTADFLTKKVKKNQGEVEQFYVKESHEAIIPKEQWEAAQLELERRDSYMQELGLTFYGYGSAVNPFSCRVVCGKCGAVCGKKSWKSRGVEFWQCNNRSKNHGVKGCASENLPHENLLKGFITAWNQIVAEREQYLPKWEKKKKEGNPLEKLRAEQMIELTLQPPLTKMLPELGQMILERVIVQGKEIMVIRFLDGTEIKVRI

SEQ ID NO: 8659 - protein, 452 aa, synthetic construct
MQIEVRKAEMGKEKKRLKVCAYARVSTEASEQENSLENQVSHYTEMIQANPAYEFAGVYADFGISGFKESRPQFQKMMQDAKNGKIDLIITKSVSRFARNTAIVLKASRELKERNVGIFFELQNINTLTEAGELLLTILAAFAQAESESASESSKMAYLHRIENGEVVAYLERSYGYEKDENGEYRAKEPEASVIREIYDLVIQGVNYGKRHQVQNRGEKAMYYAKDNHPPIVSEKIWEKAQRKLEDMRAERAEHSVIQEFTEENYPYMNHIFCAKCGWPLKPRVYSHGHRLSWDCSGQKRGTKKFCTGIHVLDNGLRKMKIEGNRYFSETVDKYGEVHLKHVGERTWKNKHKKKKFNHKDLYPELNEENYPYYKRLYCARCGSRLGRYISHGTVRWICSSYKRKGQAKCPGVRIPDEIIKGWNLPDGKIYIMGKEDKNGEKHYSYTSESAL

SEQ ID NO: 8660 - protein, 512 aa, synthetic construct
MERAVIYARYSSDHQREESIDAQVRACREYCQRKGYLVTKIYADEAKSGKSIAKREQYKKMLSDSQKNLFDVVVFHKIDRNSRNELDYYLTKNQLISSGIKYEYAAQNIDTSPAGQMVEGILVAVAANYSRNLAEETKKGLKENALKALFNGGRPPLGFEINQENKYIINDYEAGAIRIIFDLYLKGKGYHYIISQLNSLGYKTREGRKFGKNSLYDILRNPKYCGTYTFNKVNKDPSGKRNSHKISENTIIVEDAIPAIISKEDFRKVQEKMNQNRYRSAAYKSKETYLLTGKVFCGICGAAMNGHRASSNGKKYVYYTCSGRDRLGTSACQNKVVPRDDLEELVLLTIEQELLSENSLKKLKDTIEMEYQAVANEYADEASSLSEQKAIAERKLNNLYTVIEQGTADEYDLERLAAVKQELSQIKEKLAKCAGANSIATINPAHIEKVLKVCRKMLFKNITNESLRMLFDDLVNKITIDAKKITLQLKLECSGTYGAEGRTRTGTWGNHA

SEQ ID NO: 8661 - protein, 578 aa, synthetic construct
MGYVTKKAAQRFEEKKAAIYVRVSTQYQVDRASLPVQREELINYAKYALGISDYVIFEDAGYSAKNTDRPDYQQMMARMRTGEFSHLLVWKIDRISRNLLDFSVMYAELKELGVVFVSKNEQFDTSSAMGEAMLKIILIFAELERKTTSERVSAVFVSRANDGIWNGGKVPYGYSYDKESKTFSIAEDEAKIVRLIYSLYESEKSIVRVARIMNERGLKSRAGNDWSPTTVHTILSSPFYSGTYRYNYRDESNTKRFREKGKDEWVLVENHHPAIVSPERQAAVGVILESKRYNKNATYQRKNVHVFAGLLTCGCCGATMAATTDKVRADGWRPSMYICSRRRKSEDCTNKYVSDVTLGPFVLNFFANLIKASNSFGRTTSIETLEKKLLRGEALSCVDHIERPGLEELYNHLRSGFDEKCFESPTIAATESSADLSERDLLLSEKRRLERALNRLKTIYLYGDDEMASKDFNIERQRITKALSEVDSRINELDIANAFDLSLSDEAFMQKASQFILTQQLLDKRYVNYERFIRKIDPKIVKDFLNETVSNFCIKDGLTTSILLKNGIELRFSYKTAE

SEQ ID NO: 8662 - protein, 539 aa, synthetic construct
MLRQATQNLITALYPRLSHEDELQGESNSISNQKRILETYAKQNGFTNLRWYTDDGFSGANFQRPGFQAMLADIEAGKVGTVIVKDMSRLGRNYLQVGFYTEMLFPQKGVRFIAVNDNVDSANGGMDNDFTPLRNLFNEWLVRDTSKKIKAVKRAKGMSGKPVTSKPVYGYLMDEDENYIVDEETAPVVQQIYQLCLAGNGPTKIARMLTEQQIPTPGTLEYRRTGSTRRYHPGYECKWATNTVVHILENREYTGCLVNFKTEKPSYKVKHSVENPVEKQAIFENHHEPIIDRETWERVQELRKQRKRPNRYDEVGLFSGMLFCADCGHVMYQQRYQNKTRKQDCYICGSYKKRTRDCTAHFIRTDLLTAGVLSNLRQVTEYAAKHESRFVKLLIQQNEIGGKRKTAAATKQLEQAQERIAEVSRIIKRLYEDNVNGKISDERFMELSADYEQEQRELKDRAAALQAELDKSQAATVNAEKFMGIVRKHLAFEELTPTLLREMIEKIVVHECSYDENGTRRQDIEIYYSFVGKIDLPEA

SEQ ID NO: 8663 - protein, 569 aa, synthetic construct
MKQSNNKKSRDVTAFLYERLSRDDNLEGESYSIGNQKKLLAKVAKEKGYTNLVHFLDDGISGVTMDRPGFVEMIRQLEQGKAAAVFVKDLSRLGRNYIEVGRLTEEFFPDHDIRLVAVSDNIDTAEGENELAPIRNLFNEWYARDISKKRRISNKIKGNAGEPMGQPPYGYIKDPNDPKHWIVDDEAAQVVRRVYSMTLEGFGTEQIAAQLEKDDVLTPRAYWLTKGIKRPGKGKQQPPTKWNSSTITKILSLQEYCGDILNFKTYSKSYKNKKRIDNDRENWVVFQNVHVAIIERAVYEQVQQKRGKIRKRRTNNGEHNMFSGLLVCADCGSNLHFHFNQGNPEIKYFNCSNYKGNRGTCTSTHYVRVDFLEEVVLGEIRRLTKFASLYEDEFVKAVIGHSQQAEQTDRKLKEKELKTLLARDEELDGLFERIYEDNVSGKLSDDRFAKMSRRYEDEQKELSEKIKKLRSEIEKQSSRSMTTDMFIGLVRKYTRARKLTPRMLNELVEKIEVFNAEKIDGVWEQRLRIHYNCVGTIEIPTVLPLPIPEVSINTRKGVVVNYAPCELAV

SEQ ID NO: 8664 - protein, 547 aa, synthetic construct
MSRKKQNIQKITALYCRLSLEDGRENESMSISNQKLMLKDFAEKNGMFRYEYYVDDGYTGRNFNRPAFQRMIADIEAGKIDCVITKDLSRLGRNYIEAGSYIEIFFPKHHIRYIAITDGVDSLTRQEMDITPFKNILNDMYSRDISKKVLAGIMTRSRQGKFCGGTPPYGLMRDPKDKGHLIIDPDAAPVIRKIYDYALDGMGNMRIAKKLLEEKIPITRVKANTALDANYYTWGTARIGHILRNPFYKGAHLVCRTHQTGIRSGSFKFIPREDWEVIENCHEAIVSPEEWAKVQELIDRRPTIMTGNDCPYYNIFHGIIYCATCGKSMQARYEKVGRKDIDRTTKKKREPIDKAFFTCQTYNRIGCKVCSSHKIEARDLHELVLNDIQELAAQAMKDSDAFYQRLSRRMENQYRTDTSEVRAEIRRLEERNQEIDDVFLNLYTDKSKGIISEQRFLKLTDAMEQEQNSNKTRLSELNLLLHQSDEQESDVHAFIEEIRKYAAIKELDEVVLNRLIKKIMIGEVQKVDGQKIQEVKIIYNFVGEISA

SEQ ID NO: 8665 - protein, 535 aa, synthetic construct
MLRQTTQKITALYPRLSHEDELQGESNSISNQKRILETYAKQNGFSNLRWYTDDGYSGANFQRPGFQAMLADIEAGKVGTVIVKDMSRLGRNYLQVGMYTEMIFPQKGVRFIAINDGVDSAQGDNDFAPLRNIFNEWLVRDTSKKIKAVKRSKGMSGKPITSKPVYGYLMDEDENFIIDEEAAPVVKQIYRLCLAGNGPTKIARMLTEQEIPTPGTLEYRRTGSTRRYHPGYECKWATNTVVHILENREYMGCLVNFKTEKPSYKTKHSIENPIEKQAIFENHHEPIIDTQTWERVQELRKQRKRPNRYDEVGLFSGMLFCADCGSVMYQQRYQTDKRKQDCYICGNYKKRTHDCTAHFIRTDLLTAGVLSNLRKVTSYAAKHEKQFIKLLIEQNEDGGKRRNAAKRKELDAAEKRISELSAIFKRLYEDSVSGRISDERFTELSADYEAEQQELKERAARIQAELSKAQAATVNAEKFMNIVRKHMNFEELTHTLLREFVEKIVVHECSYDENGTRRQDIEIYYSFVGKVDLPE

SEQ ID NO: 8666 - protein, 698 aa, synthetic construct
MPKEPKITALYERLSRDDDLAGESNSITNQKKYLEDYAQKNGFKNIRHFTDDGFSGVNFNRPGFQSLIKEVEAGNVETLIVKDMSRLGRNYLQVGFYTEVLFPQKNVRFLAINNSIDSNNASDNDFAPFLNIMNEWYAKDTSNKIKAVFDARMKDGKRCSGSIPYGYNRLPNDKQTLVVDPLASEVVKRIFLLANEGKSPRTIAELLTEEKVLIPAAYAKKYHPEQYNGTKFSNPYLWGTSSVRTILGRQEYLGHTVLRKSVSTNFKLHKRKETDEDEQYIFQNTHEPIISQELWDSVQKRRCRVNRASAWGTHTNRLSGYLYCADCGRRLTLQTHYSKKDGSTQYSYRCGGYASRVNGCTAHSISADNVEALILASVKRFSRFVLKDEETFALELQSLWKEKREEKPKQNQSELKRCQKRYDELSALIRSLYENLMAGLLPERQYKQLMAQYDGEQAELESKMETMKSEIAEDKSSSADIRHFISLIRKCKNPTEISDSMFNELVDKIVVYEAEGAGNARTQKVDIYFNYVGQVDIAYTEEELAELKAQKEQEERQRMEKQRKREKAYREKRKAKKIAENDGEIIKTKTCPHCGKVFTPTSNRQLFCSRECWNQARQEQKKADREAERGTRYYRQRTCAVCGHSYWPTHSQQEFCSDECRRINHNRKTLEFYHKKKGNPKPDPEAFPTPKPKEDNAA

SEQ ID NO: 8667 - protein, 514 aa, synthetic construct
MAKRKFNKGGEVRLVAYYRYSGGSGQTEQSIEGQRRDCEAYARLHNMTIQKEYVDRHISGKTDDRAAFQQMIADSDKGAFDMVICWKTDRFARNRYDSAVYKKRLRDNGVEIVYAAESNISGAEGIIIEGVMEALAEYYSAELAEKMRRGMRESALKGQAISRCRALGLKTDEHKRFVIDEKTAPTVRFIFEHYAAGESAMSIVEQLNAKGLRTSQGNPFNKSSIPRIIQNEAYRGVYISKSYDVRIEGAIPAIIDDELWERAQTMLKLNRQLKAKNEPKADYILSGKLYCSCGSLMRGMSGHSATGEVYRYYTCPNKDCHLRNIPKDDLEGKVMQSIVDHLLQPESMEALAEAMVEVQKADVEKPNAERVAIEQSLSDVRRRSKNILDAIENGTANAQLCARLDDLTEQEQTLSFQLSSLEKEKPVVFTKEQYLFLLEQFLMEPSERTPEYGRRLVNTFVTSMVVSGRELVINFNVSDETVNKNKKTSQTNLQKESSSGMRLVRVARIELTAS

SEQ ID NO: 8668 - protein, 497 aa, synthetic construct
MTAVIYARYSSDNQREESIEGQIRECTAYAEKNGITVVKHYIDRALSAKTDNRPDFQQMIKDSEKRLFDIVLVWKLDRFARNRYDSAHYEYQLERNHVKLVSATEPISDSPAGIMVKSMLTGMAEYYSAELSEKVVRGMTENVLKGKYNGGTIPIGFKVDEEKFFQVDPLKAPFVVEAFQRYNDGATMKELMNWLNDSGVTTNRNQKFTYNSVQTLLTNKRYIGENHFKDIVMPDSIPAIVDKDLFEEVQLKIKKNSRAPARHKAEDDYLLTTKLFCGMCGAMMFGECGTGRNKVVHHYYKCATAKRFKTCKKKTVRKEWLEDLVIAETMKLIQDDAVIDAIVAEVMELQEQENTTLPLLEKQMREVENGIENMLNAIQAGVLTNSTKLRLEKLEAQQKELEVRIAEEKIARPRLSENQVRFWLIRFRKLDPNVKSHRETLINTFVNAVYLYDEKVLITFNYKDGTKTITFDEIAAKDAPEGNGSDLGCFAPPKEPA

SEQ ID NO: 8669 - protein, 559 aa, synthetic construct
MSQGKTKVYIYTRVSTTMQIDDYSLDAQKARMKAYADFNNYQIVGEYEDAGKSGKSIEGRASFCKMMDDIKSGKDGVAYVLVFKLSRFGRNTADVLSTLQVMQDFGVNLICVEDGIDSSKDAGKLMISVLSAVAEIERENIRVQTMEGRIQKAREGRWNGGFAPYGYRLVDGVLQINEDESPAIRTIFEQYVNTDTGANGLSKYLETHGFQKLARQNGTSPLFSATLIRAILKNPVYCGKIAFGRRKLEKIHGTRNEYHQVPQENYLLVDGLHKGIVSEELWNAAQVKLLAQSKRYEPVNRSKTEQAHLLSALIKCPICGAGMYSNKCTKRKKDGTPYKSFSYYSCKHRKMQRGQKCDFNKQIQEEVLDNAVVEVIIKLVSNPKFAAMMQEKINSKVDTTAIEQEIAAAEKQLRQYYSVKSKLMDEIDTLDPDDRHYIMRKSDLDERLYKMYDKIEGTENQLVTARAKKQAIEADKITGDNIYKVLVCFEKLYNVMNPVERKKLMEHLISEIQIYPERQPNGQWLKSIKFRLPIIENGADLCLDNGSHVEVVSCYTKTM

SEQ ID NO: 8670 - protein, 518 aa, synthetic construct
MAANVTYIPPKAAKPEALRVAAYCRVSSDSSDQLHSYATQIKAYTEQIGAHADWELVDVYADEGLTGTRMDKREDFQRLLADCRKGKVDRVLCKSISRFARNTKDCLAALRELSALGVTVYFEKENIDTGTLTSELMVSVSGALAQQESISISQNQRMSYKRRMERGEFITCKAPFGYRLVEGKELEIIPEEAERVRWIFASYLSGKSLEWIAEQMEKAGIPTPDNAPYWQKTSILYILTNEKYIGDSLNQKYLSGGFPFLKRRNHSEADQYYIENTHPAIVSRETFEKVQQLLQRKGARQRMEHPRSSLVRKIRCGQCGTVFSRRAGRSGLVTWSCRKHDRDAASCPVGRIPETEIYAAFVRMYNKLRANADIVLKPALTQLDDLERALQRENPAMLEVNRAIAQAAEQSHNISKLQAAGLLDTDACAAKLNAINIQLTQLRRERRRLLEHDDIEDTIGRLHQTADAIKAGPERLDTFDEDLFEELVEEIVAESQTRIRFRLHGGIELAEKVGRAKR

SEQ ID NO: 8671 - protein, 502 aa, synthetic construct
MDIIREDCIYARQSVDRKDSISIESQIDFCKYELKGGSCKVFKDKGYSGKNTDRPEFQKLLGEIRKGRVRRVIVYKLDRISRSILDFANMMELFQEYDVEFVSSTEKFDTSTPMGRAMLNICIVFAQLERETIQKRVTDAYYSRCLKGFHMSGQAPYGYQLEPTVVEGIRTKKMVADPVAADHVRLMFEMYAEPETSFGDITRYFEEQCIKIYEKSMVRSFLSQLLRNPVYAQADLELYEFFKSQGAAIVNDASDFAGTNGCYLYQGRDVKEDKDRCLKDQILVIAPHEALIPSDVWLKCRKKLMMNKTFQQGRKPKNTWLAGKVKCGRCGYALKATHVPNSPGYFRCTKRAENKGCPGCGKIRKTEFEEFIFNAMRKRFKNFQVRHDREEKVNPKLTAHQIELAQVEAEIEKLLDTLTGANATLLAYANKKIEELDTRRQTISKAIAELSVETMSPQKEQELSYFLDHWDSIDFEDKRKAADGLIISISATSDHVQVEWKI

SEQ ID NO: 8672 - protein, 566 aa, synthetic construct
MAEKIMQGIKQISELIGQAVKKRVVCLYRVSTVGQVEKDDIPMQKQYCREFCRGQSGWEIVKEFSEKGVSGFKVSAKDRDAIQEIQKMALKGEFDILLVFMFDRLGRRDDETPFVVEWFVKQGIEVWSAMEGQQRFDTHVDKLLNYIRYWQASGESIKTSLRVKTRLEQLTQEGYYTGGRVPFGYQAVKRGRINKKNHEVRDLAIEPGEAEVMKIIFQKYVYEGYGALRLHRYLMDQGLRTKDGKTITMGIINRVIKNPICIGIIQKGESQSSVLPELKIIDEEVFARAQEIVRERVVPQSEVPLTTRGQSLLVGNVYCGHCGARLLLATAGRNYKKKDGTVVKKTYSCYKCYNKAMAAEKCDGQTTYGVSKLDNLVDQIIHIQLQRIQKAPPQALIEKQRDREAEQVKAKAKLLREQYQQKQRDYQDLKEETLKVVRGTSRLNVDLLNNLIEETTVQMAELEGQIRTAEAELREVLSGAEQVRQEYAQLMDWAGLYDNCSFEAKKMIAAQFVKAVRVKRGYEVDIEFNVSFEEFQTLYLEPESEEDRRSRSATYLSLVEKSGQAG

SEQ ID NO: 8673 - protein, 626 aa, synthetic construct
MRNEKITPLYERLSRDDELQGESNSISHQKQMLEEFARRNNLPNPRHFTDDGVSGTRFDRPGFLAMMEEVEAGRVEAIVIKDMSRLGRDYLKVGQVMEILRQRGVRLIAINDGVDSLKGDDDFTPFRNIMNEFYARDTSRKIRSVFKSKGMSGKHLTGTVIYGYLWDEKREHWLVDEEAAEVVRRIFSLTMEGYGPYQISKLLSEAKVEIPAVHLARFDEGVNRTKPVKDPYGWGSSTIVSILKKREYLGHTVNFKTRKHFKDKKSHYVDESEWTIFENTHEAIIDQETFDNVQRVRGNARRYPDGFGEAYPLTGLMYCADCGGKMYVHRTYNGKRVPQYTCGQYGKYPIGSLCPTQHRIKAEAVLTLIADMLRTIAEYSRNDRAEFIRTVQETQAAQQTADISKKRKRLAAAQKRAGELERLICKIYEDNALGKLPDARYEALDAQYAKEQDALNAEITELEKAVTGYEQSRKSAEKFIALIDKYENFDTLTNIMLNEFVEKILVHERARKGSQDTTQEVEIYFNFVGRYIPPALQPVPLTPEEQEELRKKEERKDRLHQNYLRRKANGKQKEWEERYTAKRKAQVEAAKAAIRAEDMEKGIFTTISQLPRQEPRKATLPASAAV

SEQ ID NO: 8674 - protein, 532 aa, synthetic construct
MNEQTAISGSLALNSAPHVIMIPASGPVRTRKLRVAAYARVSSNSEDQIHSFAAQNAYYTELITGNPEWEFVDVYADEGITGTSAEKRDDFQRLLKDCRRGRIDKVLTKSTARFARNTSESLMAVRELRDLGIGVCFEEQGIDTAQMSGELLTAIFSMIAQKESEAISENIRWTYQKKMKKGSFITCKAPFGYRLVKGGLEIVEAEAEIIRLIFQRYLNGRSMEDIAKEITRYGIPTRDKTPYWQTTSIQYVLHNEKYAGDSLAQKTYTTRTLPHRKKRNQGEYDQYFVPGSHPAIIDRELFDRAQALLKQKGAVIHPKSGVTYPWTGTVICGQCGSIFKRKKCRESAYWTCRLHDKSPDKCQITQIPESEFERAFLRLYYKLRHHGMPVLSQLLTDLQTAQNRKLLWSLDIVELNKQIADIVRQERLLAELKQQGLVDPDIYITRSNTLAEQLRTAKLEKERFLESEEDQTIRQTQVLLEILETGPEFLEAFDEELFSELVAKIIVENNECLRFRLINGLELTETIERTVR

SEQ ID NO: 8675 - protein, 549 aa, synthetic construct
MTETAPKVIVIPAKKETPQEQAQKRHLRVAAYCRVSTNSKEQLTSYENQLAYYTEKIMKNPSWTMVKVFADEGKTGTSTCKRKEFLQMIRMCRQGKIDMILAKAVSRFARNTVDTLNYTRELRELGIPVIFEEQNINSIYPESEFLIAIHGAFAQSESENTSANVRWGKRRSMKAGHVTMQYKWMLGYEKGPDGRPVINEEQAETVRFIYQRYLAGDTLRAIKSKLEAQGALNAIGKQEWTIKNLLSILSNEKYCGDALLQKTFIQDCISKKVIQNNGQLPKYLVQDHHEGIVSRDVFYAAQLEIARRRAQTGGTSKSAPTGRSKYSGKYILTNLMFCGHCGTGYRRCVWNKGGVKRAVWRCGSRLDYGAKYCKHSETLEEKPLQQAILNAINSVMDSRDALEVQLMGAMEQELAPIPGETMSLADIDRMLEELEKQFNSLLAEASAAGGTEDYAERFRMISNAMADLKEHKSRIKQVYQENELVSQRLKAASIAMSAYAAELTEWDQSVVYQLVEKVTVLAKDKIRVTFRNGTEVEQEIEQLDWRNAS

SEQ ID NO: 8676 - protein, 520 aa, synthetic construct
MPRKKAPAAEAPRLVAYYRYSGGSRQTEQSIEGQRRDCEAYARAHGMTILREYVDRHISGKTDDRPAFQQLVADSAKHTFDAVICWKTDRLARNRYDSAVYKKKLRDNGVEILYAAESNISGAEGIIIEGLMEALAEYYSAELAEKARRGMRESALKGKALGSSRPLGLTVDADKHYIIEPTGAEAVRYIFEQYAAGLSSSSIVERLNAMGLRTSHGGPFNKSSINRIIQNEMYRGVYVSKKFDVRIEGAIPAIIDNDLWKRAQNMFERNRQSRTPHASRADYILSGKLYCGECGCLMKGVCGRSSGNGQMYHYYACPGRSIGRACTRKNIPQDELEAMVVNSVADLLLEPELLEQIADAIVELQQAEAARPDPEKQALEKSLSDVRNKIQNILSAIENGTSSAALSARLADLEQQESTLSYQLSSLDAKKPLTFTRDQILFLLQQFRVSPSERTKAYCRRLVDTFVDHIELTNTELILYFNLSDETVDKNKKAPRSNPSEESSTEKRLVRVARIELTAS

SEQ ID NO: 8677 - protein, 680 aa, synthetic construct
MSVKQTESKITALYERLSRDDDNAGDSNSIVNQKKYLESYAQQRGYTNCRHYTDDGWSGGNFERPAWKQLVADIEAGKVAHVIVKDMSRAGRDYLQTGFYTEVFFRQHGVHFVAIANGVDSDDQNSNEFAPFLNIMNEWYLRDLSRKQKTAIRVKGESGKPTTNCAIYGYKKDPENKYHWLIDEEAAAVVRRIFRLTIEGKGHYDIARILFEDKVETPAVYFGKQGKGIWKSKEEFSNPYNWSGYVVGQILSKPEYMGHTVNFRSHKQSYKDKNAVMNPKEDWLIFEDTHEAIVDRETWELAQKLRKTPKRIDTLGEANPLTGLVFCADCGAKMYNHRSKGGTENNPYPSDFFDCSSYTLARQKRTAACCGHYITTKALRTLILDTIRTVSTFAISNQAAFMEKVRSASQFRQTEAAKDAKRKLSKDKKRIAELDTIIKKLYESFAVGRITDERFDSLLADYEAEQKTLQVSVTEAEERLSAFAEDSARVEQFLELARKYTDFSELTTPMINEFIEKIIVHAPERIDGDRVQEVEIHLRFIGQFELPAPELTEEEIKRQEFLKKERIRSRERYQKLKSGERTVGVPVTLTCKCCGQEFASKRTNTLFCGPNCRAKFYRQEAAEGRSRACTCENCGKEFITTRSDVKYCSDDCRYAAQIKRQGARKKALREAKNEKETKTT

SEQ ID NO: 8678 - protein, 475 aa, synthetic construct
MQRAVIYARYSSDKQTEDSIEAQLRACREYASNKQYQIIDTYIDEAVSGKTAARAQYQKLLRDCEKDKFEIILIHKYDRIARNLLEHVTLEQKLKAKNILLIATAQDFGLSNEAKIMRSLVWSMSEYYNDNLAQETKKGLKETALKGLHTGGCPPFGYDVVNQKYVINDFEAIFVRKIFDCASKRTGFVDIIQEMESCGVKGKRGKPIKYPQIYEMLRNEKYTGTFIYSPNEEKNRTNRRNKPNAIRIENAMPQIISKEQFQEVQKIMSERKQTGKTKYLCSGLVYCRCGAKMHAIKSKKKGHEYLYYNCSKHCGAPVVHMEVVDKAAKDYLHELLSKETQKDISTAMQLYQIYTDDTEKDFMKTINKKVREKEKRYNNLMDTLASGAVNQTVIADITNEMETLKSEIESLKCRKPPKDFTFDYVSQWLEALKANPDEKAIHLLIERIDVKSTTDIRITSTLTSVVGKLGCGSWI

SEQ ID NO: 8679 - protein, 521 aa, synthetic construct
MSKHKLAVVYARYSSHRQGEQSIEGQLAAARDYATANGLTIIREYVDRAATGRNDNRTAFQEMLKDTSKNQFGTIILWKIDRFGRNREEIAFNKYRCKKNGVKVVYVAESIPDSPEGVILESVLEGMAEYYSLQLSQNILRGQRASAEKCQSTGGNRPLGYLTGADKKFIIDPDTAPTVRLIFDMYAKGNTCTEITKFLNEKGLRTLRGGKFNKNSLRSILKNEKYIGVYKYKNEIRIENGVPAIVDKDTFYKVQDMLKINKRAPAHKWSKSDYILTDKIFCGKCGSKMVGESGTSKTGKKHNYYVCTKKKRQQTCNKKAVKQRYIEDLVISHVHMILQDDELLSFIADSVYAYYIEQNKENNYLESLNKKLSQVNQAISNVMKAIESGIINDITKQRLDELDTQRTEISTEIADLEHAKSLQLTRDQILFFLCCFRNEDIEDRECCKRLIDTFVNAIFVYDDKIIGTFNYSGDKNTVTLAEINDAETLGKVFVHCAQCSTTIKNPNPMPVGHGFGFIILC

SEQ ID NO: 8680 - protein, 555 aa, synthetic construct
MNYIIRDDKEHETTAPKVKVIAPRKKFQPSYNDRQNRKIRVGAYCRVSTDSDEQELSYETQCEYYENYIGSHENWELVAIYSDEGITGTSTNKRSDFMRMIDDARAGKLDMIITKSITRFARNTVDSLMYLRILKEYNVDVYFEVENVHSLGANEMLLTILSSVAQQSSEDKSESIKWGYQRQFEKGKVYAANMYGYKSNRGTLDIIEEEAEVVREIFSKYLSGMSESKIARYLTENKVPKKNGSTKWDSGTIGRMLQNEKYSGDALLKKTFSIDFLHKKRYKNEGQKKMYFVENSHPAIVTKEVFKAAQVERTKRNMKSNDEKEVVESHHQNRYSSKNPLSNKIICSECGALYRRTVWTKRNKEKEPVWRCSNRLKNGKAICPNSVTLKEKPLLDALTSLINGKTKSKEKTRLELAKELSEYLNPKDIVEKKQKLNCELENVNSQINELLDKGMLLVARGVQDESQIEEPLAQCYQTKQMLKKELQKLDDKYNALKQGRQEKLLKTLEKNSNEHTVMTQEDLAVFIDRIVVKKDKIEIETIDDQKCELLLNQIS

SEQ ID NO: 8681 - protein, 408 aa, synthetic construct
MAQGQKQVRIIEPLERFVNRINLVGCYARVSSDSEDQLNSYNNQVDFYESYVNSLENSKLVKIYTDEGITGTRMDKRDGFLQMIEDCRKGLINTIITKSISRFARNITETLSVVRELKSIGVSVYFMTEKIDTAKMGSEMMLAVYDACAEIESKAISNAQKWAFRTRAKEGRYNQPKLPYGYQRIDGEVKVIEEEAKIVEDIFNKYVNKDFSVTKLVDYLNKHYFKKKKWSQSTVSSMLKNERYCGDMLLQKKYSPDVFPYKLVTNKGELAQYYVYDVFPKIIDRELFEKANEKLVNNKLKFNKNQTDGNREYLLTSKIKCEHCGGTFKRRVLRNKEYWSCSNHVTSAKKCEVKMIGTDEIDDAFLKIFYKLKGNIHVLEAYKKHIVNFTTNDDDRCELDLVNRELKK

SEQ ID NO: 8682 - protein, 538 aa, synthetic construct
MAKKVTVIKAAKAQKHTQEERRLKVCGYARVSTGSQAQATSYTAQVEYYTEKIESNPLWEFAGVYADKGISGTNVKHRDEFQMMISDCEDGNIDLILTKSITRFARNTVECIQTIRKLKEIGVGIYFEKENINTLSEKSELFITILASVAQGESENISSNNRWAIQKRFQDGTYIISTPAYGYGKDEDGNLVIIESEAETVRWIYESYLNGMGVYVIAKALNQKGIPTIRGAEKWQDGVIQDILKNPIYEGDMLQQRTYTETRFPFVRRVNNGQRNQYLIKDSHLPIVTHEEAEAVRNLMAYRVDVLHMNKSDYTKRYLFSGRIICGECGRTFRRQKIYIGKPYEKIIWTCSGHVEDKESCCMKAIREDVLHRAFTDMWNKLYTNQGTILEPLLKGLTELVAARQDSEEIRQLDKEIKDISGQSQILNQVMRKGYMDSALFMESSSKLGWQLTECRRKKTLLTRKLRRTKEIVRTEQLIQLIAEQDGLREEFDEQLFKMTAEKIVVSKEHDITFCLHNGLKLTERGGGQDAVAHANRL

SEQ ID NO: 8683 - protein, 544 aa, synthetic construct
MAETAKKISMIPAKVQYDRNVKLSEKKMKVAAYCRVSTELEEQDSSYEAQVEYYTSKISENENWKNAGIYADDGKSGTNTKKRADFNAMIQDALAGKIDMILTKSVSRFARNTVDSLVTIRKLKEKNVAVVFEKEGINTLEGTGEILITILSSLAQEESRNISENIRWGVVRKFEKGKVIVNCTKFMGYTKNEDGDLVIVPEEAEIVKLIFRLYLEGYSTGKIAKHLEEQGIKTATGQDKWHSTVIDKMLRNEKYMGDALLQKTYTVDFMTKKKVKNTGIVPQYYVEDDHEAIIPKELFYRVQEEMMRRASLCKAAVTRKKNQKSRYSSTYALTGMLICGKCGQEYRRVTWARNGKKKVVWRCSNRLTNGVKKCGESETLEENALNRAVMEAIHRITSDDMEFMEHFRQNIIHVIGSYGTAKESGEYEEKIKEKQEEMVALIAENAKTGSYTPEFDERYRIIAEEINALKEAQKTARNEKRMADSYEQRIQDIDHYLSTSTCQIPEFDNDLVRRLISTIKVESSEKLLIQFQSGIVMEQEIRYE

SEQ ID NO: 8684 - protein, 560 aa, synthetic construct
MKKQQKCYIYTRVSTSMQVDGYSLDAQKDKLRKYAEYQEMSIVGEYSDEGKSGKSVEGRPQFKQMLADVESGKDNVDYVLVFKLSRFGRNAADVLSSLQKMQDYGVNLICVEDGIDSSKDVGKLMISVLSAVAEIERENILVQTMEGRRQKAREGRWNGGFAPYGYQLVNGELIIAEDEAEIIRIIYDKFVNTTMGMAAIAAFLNNSGYKKKLRQNNTIEGFSTSFVKGVLDNPIYCGKLAFGRRKNEKIPGTRNEYHIVKQKDYLLSDGVHEAIISEEMWNQAHRKRQETGVLQVKTHSLEHEHILSGIIKCPVCGSGMYGNVNRKKHPDGGYYKDYFYYACKHRKLVDGHRCTYKRQWNEDRINAAVEEIIRQFVKNPKFEQEIRKQIGSSIDTSELDKEYDGLKDRLSQTTGAKNRLADQMDHLSVSDKNYDKKYNDMQERLDKLYDEITDIEDAMEEVETRLYNIRQDKISEDNVYQFLLFFDKLYDKFTDLEKKTFLKSFLSDVFIYEEEQKDGRILKGLRFKFPIYMNGRNVLGVDWDNESTDECVTLLQRKDI

SEQ ID NO: 8685 - protein, 503 aa, synthetic construct
MNNRIDAIYARQSVDKKDSISIESQIEFCKYELKGGNCKEYTDKGYSGKNTDRPKFQELVRDIKRGLIAKVVVYKLDRISRSILDFANMMELFQQYNVEFVSSTEKFDTSTPMGRAMLNICIVFAQLERETIQKRVTDAYYSRSQRGFKMGGKAPYGFHTEPIKMDGINTKKLVVNPDEAANIRLMFEMYAQPTTSYGDITRYFAEQGILFNGKELIRPTLAQMLRNPVYVQADLDVYEFFKSQGTVIVNDAADFTGMNGCYLYQGRDVKPSKKNDLKDQMLVLAPHEGIVPSDIWLTCRKKLMNNMKIQSARKATHTWLAGKIKCGNCGYALMSINNPVGKQYLRCTKRLDNKSCAGCGKIITSELEAVVYQQMVKKLEKHKTLTGRKKAAKANPKIAALQVELLHVDSEIEKLVDSLTGANNVLLSYVNVKIAELDGRKQELLARIAELTVEAISPEQVSQISGYLDTWENVSFDDKRRVVDLMITTIAATSDSLNITWKI

SEQ ID NO: 8686 - protein, 698 aa, synthetic construct
MPKEPKITALYERLSRDDDLAGESNSITNQKKYLEDYAQKNGFKNIRHFTDDGFSGVNFNRPGFQSLIKEVEAGNVETLIVKDMSRLGRNYLQVGFYTEVLFPQKNVRFLAINNSIDSNNASDNDFAPFLNIMNEWYAKDTSNKIKAVFDARMKDGKRCSGSIPYGYNRLPNDKQTLVVDPVASEVVKRIFLLANEGKSPRTIAELLTEEKVLIPAAYAKKYHPEQYNGTKFSNPYLWGTSSVRTILGRQEYLGHTVLRKSVSTNFKLHKRKETDEDEQYVFQNTHEPIISQELWDSVQKRRCRVNRASAWGTHTNRLSGYLYCADCGRRLTLQTHYSKKDGATQYSYRCGGYASRVNGCTAHSISADNVEALILASVKRFSRFVLKDEETFALELQSLWKEKREEKPKQNQSELKRCQKRYDELSALIRSLYENLMSGLLPERQYKQLMAQYDSEQAELESKMETMKSEIAEDKSSSVDIQHFISLIRKCKNPTEISDSMFNELVDKIVVYEAEGAGNARTQKVDIYFNYVGQVDIAYTEEELAELKAQKEQEERQRMEKQRKREKAYREKRKAKKIAENGGEIIKTKTCPHCGKMFTPTSNRQLFCSRDCWNQARQEQKEAAREAERGGHYYRQRACAVCGHSYWPTHSQQEFCSEECRRINHNRKTLEFYHKKKGNLKPDPEATPTPKPKEDNAA

SEQ ID NO: 8687 - protein, 547 aa, synthetic construct
MEATAATLERRVRVIPATRKPEELHRHHDGKMRVAAYCRVSTDSEEQLNSYEAQKTYYTQKIQDSPDWEMAGVYADEGISGTSLKKRTQFNKMITACKRGHIDLIITKSLSRFARNTVDCLDTVRLLKANGIGVYFEKENINTLTESSEFLITLFSGFAQAESESLSKNVAWGKQKSAEAGKVTFQYKKMLGYQKGADGQPEIVPEEAEIIRRIYHRYLDGCTLGKIKRELEEDGVPTAQGVERWSPSIIHNILTNEKYIGDALLQKTYVTDCINKKVKKNRGERTMYYVENSHPAIVARDLFNQVQQEMTRRSSKRKVLQKSGKTELGKYSGKYALTELLVCGECGSPYKRVTWARNGKKRIVWRCVSRLEFGTKYCQHSPTLDEGRLHSAILAAMNEYAAIRQEVCPDVLAMAEEAKQALSQAGARLLQLKKRMDAVSREQSDVLDRLLVNMADTELNARMKALTDEKESLKAQIADAQQAEVDLGEQTARRRQMWDSIMECAAGYTEFDNELVRQVIQKITVEDAETIHIHFRDSDVVLEQEVE

SEQ ID NO: 8688 - protein, 517 aa, synthetic construct
MAQVKIIAPQTREAEHLRVAAYCRVSSDSKDQLHSYAAQIRNYTEEIAQHDGWELVDVYADEGLTGTRMDQRDDFNRMMRDCRKGKVDRILVKSVSRFARNTRDCLSALRELSAMGVSVRFEKENIDTKTLTTELMVSVSGSLAQQESISISANQKMSYQRRMERGEFITCTAPYGYRIVNKKDLEIVPEEAATVRWIFDAYLKGRSSGWIAEQLTAKGIPSQSGAECWRETGIRYLLTNEKYIGDALSQKSYSCGFPFVQKRNHGERLQYYTENSHPAIIDRDTFERVQALLQKKAQKEKKRREKSPLALKIVCGNCGTVFQRRSSQNGYVTWVCRTHDRHAADCPVGRIPETEIHAAFLRMYHRLKSNADIILAPALRQLNTLDTILRQNHPQVLAINRAIAEATEESHKISTLRANGLLDADICAARMNAISARLAQLRGERRRLTENEAIDETMDALRKVEQTLLNGPERLDGFDEELFEHLVEKIIAESQNRIRFRLYGGLELTEQWEVAAR

SEQ ID NO: 8689 - protein, 537 aa, synthetic construct
MTENKNRVCCLYRVSTDKQVDFNSNHEADLPMQRKACHKFAEAKGWVIVHEEQEEGVSGHKVRAEARDKLQIIKEYARKGKFDILLVFMFDRIGRIADETPFVVEWFVRNGIRVWSTQEGEQRFDNHTDKLLNYIRFWQADGESEKTSVRTRTSLRQLVEEGHFKGGSAPYGYDLVKSGRINKRKHELYELHINEQEAEIVRLIFDKYVYEGYGAQRIATYLNNAGYRARSGKCWHPGSLRGMVGNLTYMGVLRCGDARSELMPELQIIPQEEFEAAQRIREDRSAHAAEEAEHHVPLRTRGQALLSNNVYCGHCGARLALTTSRKWRKLSDGTLDDTLRIRYTCYGKLRKQTDCTGQTGYTMHILDEIIDKMVRQIFSSLRGIPKEQLITSRYAKETAERKNHLQALQTERDKAEKDLLALKAEILAVIKGESAFPKDTLAEMIAAQEKKHTELETLCEEASAELERNAELMANVSQLYEELISFADLYDSASFEAKKMIVSQLIRRGDVYRGYQIHVDFNFDLAQYLENSDELAC

SEQ ID NO: 8690 - protein, 502 aa, synthetic construct
MEFIREDCIYARQSVDRKDSISIESQIDFCKYELKGGSCRVFKDKGYSGKNTDRPEFQKLLGEIRKGKVRRVIVYKLDRISRSILDFATMMELFQEYDVEFVSSTEKFDTSTPMGRAMLNICIVFAQLERETIQKRVTDAYYSRCLKGFHMSGQAPYGYQLEPTVVEGIRTKKMVADPVAADHVRLMFEMYAEPETSFGDITRYFEEHDIKIYGKSMFRTFLSQLLRNPVYAQADLELYEFFKSQGAAIVNDASDFAGTNGCYLYQGRDVKEDKDRCLKDQILVIAPHEALISSDTWLKCRKKLMANTTFQQGRKPKNTWMAGKIKCGHCGYALKATHVPNSTGYFRCTKRTENKGCPGCGKIRKEEFEQFIFSAMQEKFKDFQILHGREEKVNPKLTAYQVELAQVEAEIEKLLDTLTGANATLLAYANKKIEELDTRRQTISKAIAELSVETISPQQIKKLSYYLDNWDSIDFDDKRKAADGLISTIKATSDRVQIEWKI

SEQ ID NO: 8691 - protein, 519 aa, synthetic construct
MARKKNIAAGLDAVIYARYSSHNQREVSIEQQIAECTKHAAALGLRIVGTYEDRAISGKTDNRPRFQQMMRDAEKGKFQAVVAWKSNRIGRNMLQAMVNEAKLDDYGVKVFYAEEDFDDTAAGRFALRNMMNVNQFYSENMAEDIIRGLYDNANKCMANGRQPLGYKRGADGKVMLDEPAAAVVREIFTRVAAGDLFVDIARDLNAKGIKTSKGAAWNKGSFQSICQNERYKGIYIYGNVRIVDGIPRIVSDELWYRVQEAMRMKKNPVGTRHRVGAEDYLLTGKLRCGHCGSYMTGVSGTSRNGELHYYYTCQKRRTEHACNKKNVRRDVIEPAIAQAIKMYCLTDDVIEWMADQTVQYWEKHDNDLQIEALEQQLAENKKATSNMLKAIEMGIITEATRSRMVELETENSKLTAQLSAAKRDVVKINREDLIHELHILRSKDIQDREVQAELFKDFLVAAYIYDDNRLKLVFSFMGKDNSVEIPLETGEDPPDGEDSPDAKMFVLTPDSSTKKHCTS

SEQ ID NO: 8692 - protein, 532 aa, synthetic construct
MTENNNRVCCLYRVSTDKQVDFNSNHEADLPMQRKACHKFAEAKGRVIVHEEREEGVSGHKVRAATRDKLQIIKDYARKGKFDILLVFMFDRIGRIADETPFVVEWFVRNGIRVWSTQEGEQRFDNHTDKLLNYIRFWQADGESEKTSVRTRTSLRQLVEKGHFKGGNAPYGYDLVRSGRINKRKHELYELHINEQEAAVVRIVFDKYVYEGYGPQHIATYLNNSGYRARSGKCWHPSSIRGMVQNLTYTGVLRCGDARSELMPDLQIVPQEQFENAQRIRNERSVRSTAEAENRLPLNIHGKSLLAGNAYCGHCGAKLELTSSRKWRKMADGSLDDTLRIRYTCYGKLRKQTNCTGQTGYTVHILDEIIDKAVRQIFSKMRGIPKEQIVTKRYEKENTERKNHLQDLQTQRDKAEKDLLSLKAEILACIKGESVLPRETLAEMITEQEEKLKELEDLCESASEELERTAELMDKVSRLYDELISYADLYDSASFEAKKMIVNQLIRRVDVYRGYQINISFNFDLTPYIEGE

SEQ ID NO: 8693 - protein, 514 aa, synthetic construct
MRRKKVEGGNRLVAYYRYSGGSGQTEQSIEGQRRDCENYARLHGLTIVHEYIDRHISGKTDDRAAFQQMMNDGDKGAFDMVICWKTDRFARNRYDSAVYKKRLRDNGIEIFYAAESNVDGAEGIIIEGLMEALAEYYSAELAEKMRRGMRESALKGQAINRCRSLGLTTDENKKYVIDEKTAPTVRFIFEHYAAGESSASIVEQLNAKGLRTSQGNPFNKCSIPRIIQNEMYRGVYTSKAYNVRIEGAIPAIIDDDLWKRAQAMMKTNRQLKAKYEPKAEYLLSGKLFCAKCGCTMKGVSGHSGGNGEVYRYYACSNPQCRKRNIPKDDLEGKVIRSICDHLLQPETMELLAETMVEVQKADMEKPNAERDVLEQELWDVRRRSKNIMDAIETGSANPQLVARLDDLTQQENTLTYQLSTMEAEKPLLFTKEQYLFLLQQFYAQPTEQDDAYKRRLINTFVTNIEVSDSELLIYFNISEETENKNKNAPQLNFDKSSSTEKRLVRVARIELTAS

SEQ ID NO: 8694 - protein, 555 aa, synthetic construct
MDETRLIFPFSLKEREIEMKKRVYTLYRVSTKGQVEKDDIPMQKEACRNFAESQGWEIVKEFSEKGVSGFKKSAKERDELQKIQQAAMEGKFDILLVFMFDRLGRRDDETPFIVEWFTKQGIEVWSVNEGQQRFDTHVDKLMNYIRYWQASGESLKTSVRTRTRLEQLTGEGHYTGGTVAFGYKRVRLGRVNKKNQEVCDLVIDEAEAEIVRLIFHKYVYEGYGAQKLSHYLYEQGVVGRNNKNIPNTSIVRMIKNKGYTGYLINGAVETECPQLRIIEPELFEQAQELRQARTCERGGTSLGTSSKALLTGLVYCAHCGNRLSLTSSGRTHTYADGHTVKEVRPRYSCFYKIRHPGDCDGQSGYGVSKLDSIVEEVVRQIFAQFREVSRKKLLESVKTNDAARIQKKVKKIQKDLESKQKELDDLKAETILVIRGVSALDKELLGTLVAEAKDALETLEKQLVQAQEEYEEATKTAKRSNYICNELFTWADVYNTANHDERRAILQQFIKEIRVRKDYEISITLNASFDQVEQLKAVSTYDGAEIFEGISEKGA

SEQ ID NO: 8695 - protein, 541 aa, synthetic construct
MARKKESTQPRLVAYYRYSGGSRQTEQSIEGQRRDCEAYARAHGMTILREYVDRHISGKTDDRAQFRQMIDDSAKRTFDLVICWKTDRFARNRYDSAVYKKQLRDNGVSVIYAAESNIEGAEGIIIEGLMEALAEYYSAELAEKARRGMRESALKGQTLGRTPPLGLTVDSTKHYVIDPAGADTVRLIFELYASGLSIASIIRRLNGMGLRTVRGNPFDKSSISRIIRDERYRGVYVSKKFDVRIEGAIPPIIDDDLWERTQKVIDLNRQSRAPHSAKADYILSGKLYCGECGCLMKGICGHNPSGRVYHYYSCPGRSLGRPCTRKNMPKDVLEKLVVESTSNLLLRPENIQQLADAIVSLQQAEASRPDPERAALEQALAEIRRKIGNILSAIENGTASAALTSRLSDLEQQESALDHQLASLSTPEPFTLSRDEVIFLLEQFRVSPSERTNAYCRRLVDTFVDKVELTNRELIIHFNISKSTENKNSQSNNGCSTGNRLVGDERIELPQVESESTALPLCKSPISCCISRHRAGQRVLL

SEQ ID NO: 8696 - protein, 616 aa, synthetic construct
MSNYNKITALYSRLSVGDEDRDGGESNSIQNQKIFLENYAKGQQLTNIRHYIDDDESGRFFDRSAYSRMIEDVESGKIGVCIMKDLTRWGRDYLQVGNAMEIFRRNNVRFIAVNNGIDSENPDTLEFAPFINIMSEWYAKDISKKVKTGIKTKGMSGKPVATEAPYGYIKDPDNKDFWIIDKEAAEVVRLIFRLFLDGKNRNQIAVYLTQEQIPTPTFYMKDRGRGTCKNKTLNENNRYKWNKATLTHILTRQEYCGDVVNFKTAKHFRDKRNHYVDRSQWHITENVHEPIIDRTDFENVQRILENAPVKRPNGDGEIHPLSGLLFCKDCGAKMHIRIDYRNGGKRHVAYCSEYHKGKAKNPKCSSPHIMDADLLMQTVAEVLKKIAEYSISNRAEFEALVKKSLAMQQTDKVKKQQKRIPQITTRLEQIDKVLNKLYEDNVLGTIPQDRYEQMSQKYSEEYYSLKAELEQLREQLSAFENAGGRAQKFVKLIDRYADFTDLTPTILNEFISRIEVHERDKKRAKQAIQHIGIYFNHIGRFENELTQLAEPTEQEIRQMREEIEEARKEKSRAYHRNYSREYRARNLEKQREYDRIKAREYRAKKKAQAAAALSAP

SEQ ID NO: 8697 - protein, 554 aa, synthetic construct
MMNGYEYTDMDAILAGSFRAAIYCRLSKDDDLDGESASIANQRDMLEKYCEKQGWEVVAVYQDDGYTGLNMERPDLKRMLKAIERRQINLVITKDLSRLGRNYLQTGTLIEDFFPRHGVRYIAMNDGIDTMRENNDIAPFKNILNEMYSKDISKKVHSSYLLKAQQDQFTGCIAPFGYQKDPEDKNHLLVDEETAPIVRQIFRWALEGHGPNFIRRRLEEQKVPCPTWWNRERGFRNVRTKWEKKDPVNGRYMWDFSVIKDILMNPVYTGAIASQKKDYRFKIGTIGEKKPQDWIVVEERHEPIVDRKSFDIVQDKLKSRQRSRQTGEISLFAGLLKCGECGKSLTIRYTNDKHPKQIYSCKTYNAYGKQHCTQHRVEYETLYRLVLNKIRECAKAALMDGEAVAGRLTNTCEAEQKGQREALERSLTKHEERIEVLEKMVLRLYEDMVAGRISEANFNLMLDKTQKEQAELKERVEQGRRKLADEIRLAVDAKQWVDAIQEYADITELDAATLNRLIKEIVVHEHIDSDKTRHISIEIHFNLKPIPEVEQVTA

SEQ ID NO: 8698 - protein, 560 aa, synthetic construct
MKEKTKVYIYTRVSTAVQVDGYSLDAQKSRMKAYAEFNDFEIVGEYEDAGKSGKSIEGRLEFNRMMEDIKSGKDGVSYVLVFKLSRFGRNAADVLSTLQVMQDFDVNLICVEDGIDSSKDAGKLMISVLSAVAEIERENIRVQTMEGRIQKAREGKWNGGFAPYGYKLEKGMLYINEEEAEAIRIIFDQYVHTDIGANGLAKYLANHGINKIQRQNGKNPLFDAALIRRILKNPVYCGKIAYGRRRTEKVHGTRNDYRLVEQENYLLVDGLHEAIVSEGLWHEAQVKLLAQAKKYEKVNNGKDNKVHLLTGLLKCPICGAGMYGNKSIKHKPDGTKYKDFFYYGCKHRTMTRGHKCEYKKQINEELLDGAVAEVIIKLVSNPKFAAMMQQKINMKIDTSAIEQEIANYEKQLRQSYATKSRLIDEIDTLDPDDKHYIKRKADLDDRLYKMYDKIEDTENLLIEARAKKMAIEAEKLTADNIYKVLIYFEKLYAVMDEQEKRQIMESLISEIHIYEERQPNGQWLKSIKFKLPIIEEDMEMSLDSDTHVETVCALSRRHKA

SEQ ID NO: 8699 - protein, 557 aa, synthetic construct
MMANMTEMLSYHNVLSLDALTALYCRLSVDDANDGDSNSIQNQKEMLERYCKENGFTNYRFYVDDGYSGTTFDRPDFQRMVADVRAGLVKRVIIKDMSRFGRDYLQVGMYTEMIFPEYEVHFVAVNDGVDSQKGENDLTPFRNLFNEWYARDCSKKQRAVKRMKGMSGQRISSNPPYGYIKGEGGQLVPDPEAAWVVKLMFDLAAQGLGPVRIANILTKKKIPTPGTLAFRRTGKKRNYHPEAPYNWSDSTIANILEYKEYLGHTVNFKTYSKSYKFKKRLPTPEDQQMIFENTHPALVEQEVWEQVQRLREGRPRPTKQGEMALFSGLLFCADCGSPLRAHRGQNISKNQECYCCGKYRDRTNSCTMHYIRAVVLENLVLENLKQTVTFALENEQEFVRRLMNRSAKEQQKQIQSMKKELAAKERRIGELDNIIKRLYEDNISGKLSDERFKKLSSDYEKEQRDTCSEIADIQKQVNEAESKVIKIDSFLKMARKYTSFEELSRGMLHDLIEKIVIHEGDKSSGHRQQKIDIYYTFIGEVGATQLVAQLELKGKAA

SEQ ID NO: 8700 - protein, 523 aa, synthetic construct
MAEKHLTDGTTALTAQPRVIKIEAAEKSQNAQLRVAAYTRVSSDSDDQRNSFAAQNRYYAELISGKAEWRMVDIYADEGITGTSAAKREDFQRMMTDCRRGLIDQILVKSISRFARNTKDCLEAVRELKELGVNVRFEREGIDIANVSSELITAIYAAFAQKESESISGNMRWSYQRRMESGEFNTCRAPWGFRLDGKSLAVHEDEAEIVRRIFLEYLSGRNPREIAEILNAEDTSGRIWKYKSVDYILQNERYAGNALLQKRYTTATLPKQQKINHGEREMYYVADSNEAIIPQELFDRAKELRQRRSVGQTVTHGRLCVRMRCSCGSRIRAKQVNGRWYWCCCRHDEKGDCAIKPVPEAQTDEAFRRLYYKLKHQSLPILEQMLETLRAIRDRRLLWSEDIVSLNKKISELSSQNQTLAFLKQNGLVDPDIFISKSNELTRQLRQAKLDKEELMAAEGDATAQRTQELIALLEDGPDFLDHPDTELCGALIAEIIVESNDTLRFRLHNGLELRESIERTVR

SEQ ID NO: 8701 - protein, 539 aa, synthetic construct
MNETAPRVIKIPAKPESVRQAELQRQLRVAAYCRVSTKEEDQANSYEVQKEYYTDKIMSNPVWTMAGIFADKGITGTSVKKREDFMRMIRHCRQRKIDVVLTKSVSRFARNTVDCLYYTRALKELGIAVIFEKENINSLEEDSELRITLSGAFAQSESESISANVTWGKRRAMESGKATIQYKYLYGYRRGADDKPEIIPEEAEVVRWIYERYLAGASTRMLRDELHEQGVIYSEKSPQWTLPHIKSILRNEKYCGDVLMQKTFQQDVINRKVIKNTGQLPMYLIENHHEGIVSREKYNAVQAEMARRKAAKSPSKRASTGLSAYTSRYALSDRLVCGECGTLYRRCTWTRPDGKRVVWRCVSRLDYGKKYCHSSPTLDEAPLQQAIIAALNTVLPNLDGRIRQITEALEAEVIPFPGSGMSLGDIDRRLAELEAQFQRLLEKAADDPIAYGDQFKEILDEQTSLKELRATILAESREHAEADRRIKDAAGMLENAVSHITEWDETAIRQLVAQVKVLSKNEISVTLKSGIEIRQSISN

SEQ ID NO: 8702 - protein, 496 aa, synthetic construct
MSIKAVSYCRYSTDNQTENSIMYQMAAAEEYCKKHGMVLIDVYSDEAKTGTNTNREGLQRLIKDCDTSKFDAIIIYDQSRLSRNISDWFELRQLFSSKGKQLYSCNEQLSSDYLNSNAFLSEGIHALFAQNHVIETRRKTLDGVKSKAKQAGFCGGTPPLGYDIVNGEYVINEKEAPAIRKMFEMYALGKSYDDIMQVLYREGYRSKRGNKISSNAIYYLLRNERYVGIYYWNKYQYTVMRKRITRKENPEIVRIENAIPPIIDKETWTMVQEQLSKNKGASTRTKRQYLLSGLIKCGYCGGTYTGFASKNRRSGEETVYYTCSTKERLKTCKAKNVRGDEIESFVYYTLKDRIFNQDLAEQVADMIINQSKDIVTFDSAAVKREISKKKQAINNLFQAIENGLNAEITTDRINTLQDEIKALELSLEQSMKQNDTVIDREKLIQSLLEDAKKIDLDFEHRRAIIRKYVVKIEITDDTVNLHCIGDSSTTGGATQI

SEQ ID NO: 8703 - protein, 541 aa, synthetic construct
MEKDKKVTALYCRLSKDDGSNSESLSIRTQKSMLMEYATRNGFGNCQYYVDDGYSGTNSDRPAFQELLDDIREGKVATVITKDQSRLGRNHIETGTYMEIFFPEHGVRYIAINDGYDSNEQSQMDIAPFRNIINEMYAKDTSRKIKSALRTRKKSGKYISSGAPFGYQKDPADHNHLVIDPNTAPVVEYIYSMAEEGLGLHRIAKRLHDEKVLKPCYYKKEMFGRFIDDEKMYDWDSAYISQVLHSPVYAGHIIYEAKPTVSMKSKKRRYIPFEERAIVPNTHEAIIPQDRWENVQRILYSRSSSFMCDKTDYDNIFKGIVRCADCGRTMLVKVEHRRKRNSVLDQTFYCCSTYRKYGAKACDSHNLEARVLHEAVFADIQAHAKAAVSNREALVKKIANQMHLRVSSDRAQHKRDLKQCKARIAEIEDLYAKLYEDVSKGLLPEKRFQMLADRYDKEQAELTEKIEQYEREGRAEHDQLDKIQDFIDEVSKYAGITELNYKILHQLIDKILVSRAEKVDGEYVQKIQIFYRFIGPLDAIE

SEQ ID NO: 8704 - protein, 509 aa, synthetic construct
MPQVQVIQPIQQQPKRLRVAAYARVSTKSNEQLHSMSVQTEYYEDLIQKNPNWEFVGVYADEGISGTSIKHRAELNRLMEDCRAGMIDRILVKSASRMARNALDLLTIIRELKSIGVTVQFEKEQFDTDSATGEMMLSMMCAIAQEESLSISKNMKWGIRKKMQAGTYVNCATPFGYRQQNHQLVLERNEAAVVRLVFEKYLSGVGIAEIACYLNENHPKEGGWWYTSAVRFMLHNEAYKGDTLHQKHYTTDTLPFMVYHNEGQFPKYCAYKSHVAIVSDEEFEKVQNLLKTKQMSVPNAAPRVFTKKIYCAECGTVFAQASRANGAVAWGCRKHLNKSSLCPAKSVYETELCRTFLYMYNKLQANRAKIFQPLVDSLLQLKSQQEHQNTARESIYAEIQRLAKQNHNLERIHAQGYIEDTQYIERKTLIEQQLDEKRVQLSRTSISRNVELILKSTRQIEKILDSGPPLTYFDEQIFTEMVKKISVSNTEVEFELINGMKLSEKRTEK

SEQ ID NO: 8705 - protein, 529 aa, synthetic construct
MNNMRIVEIPASKRESAGRKNAVRKLRVAAYCRVSTEEEEQQGSFEIQKLYYTEKIESTPEWEVAGIYADDGISGVHTKKRDGFNQMIQDCKKHRIDLILTKSISRFARNTLDSIQYVRMLKQMGIAVVFEKENINTATMNSEMILTVLSAFAQAESESISQNVARGKRMGYKHGKFAFPYGRIIGYRKGADGKPEIIPEQAEIIRLIFNSYLQGDSLQSIKAKLETAGALTARGNTAWSAQSIQRILQNEKYCGDVLLQKTFTEDVLTGVHKKNTGQLPQYYIENYHEGIVSKQMFREVQAEIARRNSKSAANQRKRRRGRYNSKYALSERLFCGDCGSPYKRVTWNIHGRKQIVWRCVNRIEYGTKFCGSSPSIPEEELHNAILKAVQDLAANFTEEVAAQINGILHNIQTGESTKPNLQEQLEQTQQEFDRLLEMSLDFDEDTPFLDDRLKKLNNKIKSLKKAIEDSAARQEKLRQPEMLLSAKDLQIQEYDDALTARIIEKIVVQSRNEISIRFIGGYEKAMPLE

SEQ ID NO: 8706 - protein, 505 aa, synthetic construct
MDHRTVMDLAGTDAAAYIRKSRLEEGMDTQEVLSKHQKALVEYAAAHQIHLIEIYPEVVSGESLYARPQMLRLLQDVEEGRYDAVLCMDLDRLSRGRMKDQGIILDTFRESDTLIITPEKVYDLSDDIDEEYAELKTFMSRREYKIINKRLQRGLRQSIQAGCYVANAPYGYRKTVIDRKPTLEIYEPEARFVQMMFSLYAQGFGCTSVARQVNALGAKPHRSAEFNRSSVNMILRNPTYIGKIVWDQKKHIRKGARGNPKHITIYQPPEKWTITDGLHPAIVDRELFDRVQAIMAGRYIPSKRDGTVKSPLAGLVKCANCGMNMQRMVMKRYPYLLCTRPGCCASTKFELVEKRVLDSLQDSLDQLSVRKPASGVQDTSPLELSLLAVQKELAGANRQKNRLYELLELGEYDIPTFRERMEAVKGKIAALERKEAETRRTIDHAKTADPQALAQRIRAVLDAYGSSDNAQRNALLKSVIDQVWYSKAKKTKPNDFDIQLDLKPF

SEQ ID NO: 8707 - protein, 503 aa, synthetic construct
MRMVGYGRVSTDHEEQRDSLEHQQAFFQDFARARGHTLVRVYSDQGISGKWLKKRDGFLQMLRDAERGEFELVVVKDISRFARNTVDSLESIRRLKALGIECIFVNNSLKVLGESEFIVTIMAAIAQEESANLSKRVKFGKDITSRKGRVPPRIYGYDRLDNFTLRIVPAEAEVVREIFRLYLQGLGCRKIAQALEERGASTKLGASWNSRGVRRVLENPIYCGHYVNHKYTVSDFLSGQIQRLPPDMHYHHDRPEWAIVSPDTFQEAARLMEQRRRQSGSAPPTRYSGRYPLSTLIRCQSCGRAFTRRRVAYPSGRQYVYWHCPIHSEYAGSRCGNGTILPEEGLLDQLRAWLAAQISSPAALAEAVRLRLDARSSRPAEDPAAALRRRLDQLEGQRARYLELYAGDLLSMEELRRRLRLLAERGARLREDLDRLTRDPPRDLEAEITEQVRRVLSLEDITNGELRQLIDRITVSEKGDVSIYPARPAEEPPAAPGAFVGNG

SEQ ID NO: 8708 - protein, 495 aa, synthetic construct
MTAVIYARYSSDSQREASIEGQLRDCKDYAEKNGITVVGTYIDRAYSAKTDDRPDFQRMIKDSTKKIFDVVLVWKLDRFARNRFDAVNYKYQLEKNGVHLVSAMEPISQGPEGIMVESMLIGMAEYYSAELALKVARGERENALQCKYNGGVVPLGFTIGKEDRLYHIDPETAPIVQEIFTRYADGEPAEKIAASLNERGLRTRTGKPFVKNSFFQIFRNRRYIGEYRYKDIVTPGGIPAIVDQDLFDRVQQRFEQNRIAHGRPAKEDVSYLLTTKLFCGKCGTLMGGESGTSHMGNTYYYYKCGNAKRHGKAHCDLKAIRKEPLERFVVDTAIKVIFSDEIIERLIDLVMEAQQKENTQLPVLKDQLRDTEKRLANLLEAIEQGILTPTTKQRLDELEARKEALNTSILEEELKKPVLTREWMRFWFEKFRKGDMRDMEHQRQIIDTFVNSVYVFDDRVVLNFNFTDDSKTISREEVLGSSAVENAPPNVRPFT

SEQ ID NO: 8709 - protein, 616 aa, synthetic construct
MSNYNKITALYSRLSVGDEDRDGGESNSIQNQKIFLENYAKGQHLTNIRHYIDDDESGRFFDRSAYSRMIEDVESGKIGVCIMKDLTRWGRDYLQVGNAMEIFRRNNVRFIAVNNGIDSENPDTLEFAPFINIMSEWYAKDISKKVKTGIKTKGMSGKPVATEAPYGYIKDPDNRDFWIIDEEAAEVVRLIFRLFLDGKNRNQITVYLTQEQIPTPTFYMKDRGRGTCKNKTLNEDNRYKWNKATLTHILTRQEYCGDVVNFKTTKHFRDKRNHYVDRSQWHITENVHEPIIDRTDFENVQRILENAPVKRPNGDGEIHPLSGLLFCKDCGAKMHIRIDYRNGGKRHVAYCSEYHKGKAKNPKCSSPHIMDADLLMQTVADVLKKIAEYSISNRAEFEALVKKSLAMQQTDKTKKQQKRIPQITTRLEQIDKVLNKLYEDNALGTIPQDRYEQMSQKYSEEYYSLKAELEQLREQLSAFENAGGRAQKFVKLIDRYADFTDLTPTILNEFISRIEVHERDKKRAKQAIQHIGIYFNHIGRFENELTQLAEPTEQEIRQMREEIEEARKEKNRAYHRNYSREYRARNLEKQREYDRIKAREYRAKKKAQAAAALSAP

SEQ ID NO: 8710 - protein, 480 aa, synthetic construct
MAKKEEIKITALYERLSRDDEQAGESNSIQNQKMYLEEYARQKGLRNIRHFSDDGYSGTNFNRPGFTALLEEIEAGRVETLVVKDLSRFGRNYLQVGYYTEVVFPKKGVRFIAINNSVDSANPTDNDLTPFLNIMNEWYAKDTSNKIKAVFKSRMQKGLRCSGSIPYGYKRTKDDKQQLYVDEPAAEVVRRIFRMACQGIGTTTIAEILTAEQVLIPSAYTAKTSPENCRNKDYADPYRWSATTVGYILDRQEYLGHTVLGKSICENFKTKQRRPATADELMIFPDTHEAIIDQDTWDIASRMRSKKKPRAANGTYTHRLSGLVYCADCGGRMSYSSPEAKHSEKNYDSDSSFQCGNYRNKGTECVSHFVKTSVLEAAILQAIQAVSKYVLENEEEFIAQLKAVWSENKSKHTDIGQQELEQAMKRMTELDNLIQNLYESSVKGTLPERQAQRIARYEAHLAKRRDEYHQKKAKKEDIPA

SEQ ID NO: 8711 - protein, 518 aa, synthetic construct
MKTAYGYGRFSTDRQREESIEAQEIAIRNFCKQNNISLIAFYADRGLSGTNDNREQFQNMLDDADKGGVDYVIVHKLDRFARNRYDSVIVRKRLADHGVKLLSVLERVNDDSPEDIILLSVLEGMSEYYSKNLSREVKKGMYRNVEKGIYNGGFLPYGYKVNVNNETHFVEIDENEAAIVREIYSLYLENNGYVTIANKLNERGLKTKRGNIWTADTIGKLLKNEKYKGTYFHGKTKVIKNGRRQKVIKNKEWKQEETYPVIIDAEIWEAAKRRRTMNKPKGGKKHEYLLVGYAKCKKCGANYIGSSSAPYNDHVYRFYTCSRHNRKKCDAKIINADMLETIVIDFIKEKFFESESLDQYINDCIKLLNTDINNDDKIEAINKEIKSCTKKLDRLVELYIDDNISQEKYCDKKNELDCRVKSLEHELNLITIDRPVISKKEVKKIVNNFIKNMDDSFKYKKMLIDTFLDSVTIDDETFEITLIYNLFSKTEKIICNIDNASPYSSKKAFTASPPLQIN

SEQ ID NO: 8712 - protein, 518 aa, synthetic construct
MQYEEYLIYLRKSRSDASLEAMGVDVLERHEQILLDLAKRMNLSIGGIYREVVSGESISARPEMQRLLSEVEAGRWKGVVVMEVERLARGDTIDQGIVQRAFQYSGTQIVTPAKTYNPNNEFDEEYFEFGLFMSRREYKTIRRRMRAGVTAAVKEGKWPFNKAPYGWQRVKLEHARGWVLAPDPEEAPVVKLIFQLYTGPDRIGITNICRYLDNRGVKPRNGDTWTECSIMGILRNIVNDQRVGIGRRKIVKQVQNGSVSKVRPHSDYDFTAPGLQPRLIDHDVFLEAQTHLGKNSHKLPESYGIKNPLAGIVVCSCCGKKMMRRPASKTPGGAPYDVLKCNTRNCPTIGSALDLVEREVIQALSDWVAGYQLDPTLEVENKVPEKEQLLSSAINNHDVLLKQNGNLYDLLEQGVYTTEIFLERSHELQKRIKESEAHIEVLKKDLEYEKEKIANVENFIPSCKELLSCYWELSAQDRNKALKMLLESVEYTKTKRNKYGDKDNPTFTLNLKPRIPRI

SEQ ID NO: 8713 - protein, 517 aa, synthetic construct
MAQVKIIAPQTREAEHLRVAAYCRVSSDSKDQLHSYAAQIRSYTEEIAQHDGWELVDVYADEGLTGTRMDRREDFNRMMADCRKGKIDRILVKSVSRFARNTRDCLSALRELSTMGVSVRFEKENIDTKTLTTELMVSVSGSLAQQESISISANQKMSYQRRMERGEFITCTAPYGYRIVNKKDLEIVPEEAATVRWIFDAYLKGRSSGWIAEQLTAKGIPSQSGAECWRETGIRYLLTNEKYIGDALSQKSYSCGFPFVQKRNHGERLQYYTENSHPAIIDRDTFERVQALLQKKAQKEKKRREKSPLALKIVCGNCGTVFQRRSSQNGYVTWVCRTHDRHAADCPVGRIPEAEIHAAFLRMYHRLKSNADIILAPALRQLNTLDTILRQNHPQVLAINRAIAEATEESHKISTLRANGLLDADICAARMNAISARLAQLRGERRRLTENEAIDETIDALRKVEQTLLNGPERLDGFDEELFEHLVEKIIAESQNRIRFRLYGGLELTEQWEVAAR

SEQ ID NO: 8714 - protein, 547 aa, synthetic construct
MEATAATLERRVRVIPATRKPEELHRDHDGKMRVAAYCRVSTDSEEQLNSYEAQKTYYTQKIQDSPDWEMAGIYADEGISGTSLKKRTQFNKMITACKRGHIDLIITKSLSRFARNTVDCLDTVRLLKANGIGVYFEKENINTLTESSEFLITLFSGFAQAESESLSKNVAWGKQKSAEAGKVTFQYKKMLGYRKGADGQPEIVPEEAEIIRRIYHRYLNGCTLGKIKRELEEDGVPTAQGVERWSPSIIHNILTNEKYIGDALLQKTYVTDCINKKVKKNRGERTMYYVENSHPAIVSRDLFNQVQQEMTRRSSKRKVLQKSGKTELGKYSGKYALTELLVCGECGSPYKRVTWARNGEKRIVWRCVSRLEFGTKYCQHSPTLDEGRLHSAILAAMNEYAAIRQEVCPDVLAMAEEAKQALSQAGARLLQLKKRMDAVSREQSDVLDRLLVNMADTELNARMKALTDEKESLKAQIADAQQAEVNLEEQAARRRQMWDSIMECAAGYTEFDNELVRQVIQKITVEDAETIHIHFRDSDVVLEQEVE

SEQ ID NO: 8715 - protein, 562 aa, synthetic construct
MKKDKIKVYIYTRVSTTIQVDGYSLDAQKARMKAFAEYNDYEIVGEYEDAGKSGKSIEGRLEFNRMMEDIKSSKDSVSYVLVFKLSRFGRNAADVLSTLQVMQDFGVNLICVEDGIDSSKDAGKLMISVLSAVAEIERENIRVQTMEGRIQKAREGKWNGGFAPYGYTLDKGKLYVNEEEAEAIRIIFDKYVHTDMGANGLAKYLANHGIGKIQRQNGKNPLFDAALIRRILKNPVYCGKIAYGRRRTEKVHGTRNDYRLVEQDNYLLVDGLHEPLVSEELWHDAQVKLVAQAKKYEKVNQGKDNKVHLLTGLLKCPICGAGMYGNKSVKHKADGTKYKDFYYYGCKHRTMTRGHKCDYKKQIHEELLETAVAEVITKLVSNPKFAALMQQKISMKVDTSAIEQEIANYEKQLRQSYSIKSRLIEEIDTLDPDDKHYIKRKADLDDRLYKMYDKIEDTESLLIEARAKKTAIEAEKLTADNIYKVLIYFDKLYAVMDDTERRQLMESLISEIHIFEERKPNGQWLKSIKFKLPIIEENMEVSLDNDTQVETVVLMSKVNPGK

SEQ ID NO: 8716 - protein, 580 aa, synthetic construct
MEVKVIKADSVHDSNLKLKRVKKLRVAAYCRVSTDDVDQLKSYESMVRYYTDLIKSNSEWIFVGVYADRAITGTKVDKREEFQRLIQACIDGEIDLVIAKSIPRFARNTLDTLKYVRLLKEYGVAIYFEVEKINTLKDSEFLTTILSSIAQQEVENTSAYVKKGLKMKMSRGELVGSQGCLGYDYDRTTKELSINEEGAKIVRYIFDRYVAGAGSTVIARELNEMGSRTLRGNIWTSSTVIGIINNEKYMGDILLGKTFTVDPLSKRRLENRGEEDKFYIENHHLPIISKEMFQRAQEIRCRRSAGKKAESSSTGKREKFSRQYAFSCMLECGFCGTGLSRRSWHSKSIYQKTMWQCEKSTRLGKRYCPDSKGIPEKVIEDAFVEAYRELYNVDKSIVEDFLERVEKTLKEDTTEEKLAKLKHKEQNIRYMKEKLLEKFLENAISQPVYEVKNAEYEEKLCSVRNIIRETKEKHEKEVSLKRRLEDFKKALSKNSVLEEFDRGIFESMIEKVIVGGYDEDGVKDPYKITFIFKIGFKKTLNHTKEMFPVSRVRRQGATQLCSNSDGESKSMCCNSSDNTC

SEQ ID NO: 8717 - protein, 497 aa, synthetic construct
MTAVIYARYSSDNQREESIEGQIRECTAYAEKNGITIVKHYIDRALSAKTDNRPDFQQMIKDSEKRLFDIVLVWKLDRFARNRYDSAHYEYQLERNHVKLVSATEPISDSPAGIMVKSMLTGMAEYYSAELSEKVVRGMTENVLKGKYNGGTIPIGYTVDEEKFFQIDPLKAPFVVEVFQRYNDGATMKELMNWLNDSGVTTNRNQKFTYNSIQTLLTNRRYIGENRFKDIVMPDSIPVIIEKELFDSVQDKIAKNRRAPARHKAEDDYLLTTKLFCGMCGAMMFGECGTSRNKNVHHYYKCANAKRTKTCKKKTVRKEWLEDLVVNETMKMIRDDDSIQSIVDAVMILQEQENTVLPLLEKQMKDIENGIENLLNAIQAGVLTSSTKGRLEKLEAQQKELEIRIAEEKLAKPKVSADFVKFWLTNFRKLDPNVKSHRETLINTFVNAVYLYDEKVLITFNYKDGTKTITFDEIAVKDAPEGNGSDLGCFAPPKKNT

SEQ ID NO: 8718 - protein, 497 aa, synthetic construct
MTAVIYARYSSDNQREESIEGQIRECTAYAEKNGITVVKHYIDRALSAKTDNRPDFQQMIKDSEKRLFDIVLVWKLDRFARNRYDSAHYEYQLERNHVKLVSATEPISDSPAGIMVKSMLTGMAEYYSAELSEKVVRGMTENVLKGKYNGGTIPIGFKVDEEKFFQVDPLKAPFVVEAFQRYNDGATMKELMNWLNDSGVTTNRNQKFTYNSVQTLLTNKRYIGENHFKDIVMPDSIPAIVDKDLFEEVQQKIKKNSRAPARHKAEDDYLLTTKLFCGMCGAMMFGECGTGRNKVVHHYYKCATAKRFKTCKKKTVRKEWLEDLVIAETMKLIQDDAVIDAIVAEVMELQDQENTTLPLLEKQMREVENGIENMLNAIQAGVLTNSTKLRLEKLEAQQKELEVRIAEEKIARPRLSENQVRFWLIRFRKLDPNVKSHRETLINTFVNAVYLYDEKVLITFNYKDGTKTITFDEIAAKDAPEGNGSDLGCFAPPKEPA

SEQ ID NO: 8719 - protein, 479 aa, synthetic construct
MNKVAIYVRVSTKGQAEEGYSIDEQIALLTSYCSIHKWKIHDTYVDAGISGATIERPELSRLSRDAQKKKFNTMIVYDLKRLGRSQRNNISFIEDVLEKNGIGFISLTENFDTSTPLGKAMVGILSAFGQLDRDTIRERMMMGKIGRAKSGKPMMTSTIAFGYTYDKVTSSLNINPAEAIVVKIIYNEYLSGRSLTKLRDYLNENDLLRNGKPWNYQGVSRVLRNPVYMGMVRFRGEVYQGNHDPIIDSETFEAVQKELKKRQLETYEFNKNTRPFRAKYMLSGIIKCGYCGSPMGVTLGTKRKDGTRNIRYQCVNRFPRTTKGITVYNNGQKCNSGFYEKDDIEIYVLGQVRLLQLNKTKLNKMFETPEIINVEEIENQINSLNNKMKRLNDLYLNDMISLDELKTQTYTFLKQKDLLENELNNNPAIHQEENRKQFQKLLGTKDITQLSYEEQSFAIKNLIDKVFVKPGIIDINWRI

SEQ ID NO: 8720 - protein, 519 aa, synthetic construct
MKRITKIDAAVTAEMKKTRVAAYCRVSTASDEQLISLDAQKTHYESYIRSNDDWEYAGLYYDEGITGTKAEVRDGLQALLKDCEDGKIDLIITKSISRFSRNTTDCLEMVRKLVEMGVFIFFEKENINTGSMESELMLSILSSLAESESVSISENSKWSVRRRYQNGTFIISYPPYGYANIDGEMRIVPEEAEVVKRIFADCLAGTGTYTIAKRLNENHIPTKKNGKWHGGTVNGILTNEKYTGDVLFQKTYTDDGFNRHTNYGEVDQFFCENHHEAIISHEDFERVQEVLAQRAAEKGNGINTSRYQNRYTFSGKIICGECGTTFKRRTHYKPSGDYIAWTCGQHIENRHACTMLYIEESAIKSAFTTMMNKLVFGHQRMLKPMLSSLKGTDDRDRLIQIQRIEQAIEDSALRKQNLVSLASQGILEPAVYTEECTALALQEERLLAEKKTLISDIGGDRVKLQELEKLMQFTGKGQMMEHFDDEAFNSFAEKIVIADRETAVIHLKCGLKLKERLVR

SEQ ID NO: 8721 - protein, 498 aa, synthetic construct
MKIHKLKPQNTTLKPKLRVAAYARVSVDTLHHSLAAQVSHYSTLIQKNPTWEYAGVYADEGITGTSTTHRTEFKRLIADCDAGKIDLVLVKSISRFARDTVDCLHTVRQLKEKGIAVRFERENIDSTSEDGELLLTLLASFAQEESRSIGDNIRWGVRRRFAEGIPNGHKAPYGYQWDGEMFRIIPAEGKIVKEIYRRYLAGESAYAIAKSLAGRGITGRQGRPIEQTTVKDILSNISYTGTMALQKNYINEGRVRKRNKGELPMYLVDGVFEPLVSKADFDKAQEMRKLRAERAVNRNPVLLPFSGMVKCGCCGGGFSRRTAGKYRRWGCNTRERKGRESCDSRPIKEEELVAAVRAVMEKNNFDATELRRKVSKIVIHADCVEFHLTNGRIKKTARIYNGQRGSNPFTNKVYCASCGSKCERDTWTKGNKVWACSQPRTKCQLRRLPESELRDAAASFFGDSCEGQIVQNVERITISDDEVIFQLKEGGAYRWQRQ

SEQ ID NO: 8722 - protein, 523 aa, synthetic construct
MAKTVRVIPASPKIFRSEVTAEPRQRRTAGYARVSTDHEEQASSYEMQMAHYKNYIESRADWDFVGMYSDEGISGTNTKKRDGFNQMIEDALAGKIDLIITKSVSRFARNTVDSLQNVRKLKENGVEIYFEKENIWTFDTRGELLITIMSSLAQEESRSISENTTWGKRKQFAEGKTSVGYSAFLGYDKDFKINEEQAKVVKLIYKLFLGGRSFYAITKELEKRGLKSPSGKDKWYISTVRSILTNEKYRGDALIQKEYTADFLDKTRRKNTGEIPQYYVEEHHEAIIPPDLFDFVQTEIKARENGSKHSSVSIFSNKIKCGCCGGWYGAKVWHSTDKYRRVIYRCNKKYAHKGKPCSTRHLTEEEIKRIFVKALNSLVEVKENVIVELRSLIDGICRTEELIEEHDRAEQELRVLTEQLENLIRENARVAQDQTAYLKQENEIRRLYVEKQGHLASLDERIAERESKRNNLEGMIQAVCGIDGEQVAFDEELWGGLLDHIEVKKDGEVVVVFKGGIEIGVGE

SEQ ID NO: 8723 - protein, 551 aa, synthetic construct
MIAPVQDKKRKRFIIYTRCSTDDQAQGDYTTLDAQAHHCKNMMDAFGYELASFGDNGVVNDDGYSGKDLNRPGIQAILKDIHKTRSFDGIIFFRLDRLTRNPRDLYSMIDIFKAKEVDFLSVRENLDSSTAIGRVVIGIIGLLSAFERELTGERVKASAIARARQGKWVAGKPPFGYKQVKDGEPLPNGRQPHKNEIDETIAPHIRRIFELAADNKTLSEIGHTLIQNEVPTAKKQLWRKQTVAKILKNPFYKGTISYSGELHKGTHQAIVDDELWDKANRVITANLPGHRFKKIVKDYNQRLKGLLRCGKCGSSLVCTIAHSHNGNIFYYYECSRARQRLGCDTKRISATAFDEAVIAFFRRASKDQEIIVKAMGSAIKDNATKLDIYEKEIKTIQKKLDKAKKAAAKLLNLAIDKVISKGVTYSEKMDTYEKEVTVLEDQLSKALARRRAADMSIHSSEYLYSNLRFAMAHLDKAPAEAQITLLKALIKAIDVHDDHVIMRMHIGEPFEELTCQIDPKKQETLPVAVTSTEQGSPERQQWRRGRDSNPR

SEQ ID NO: 8724 - protein, 539 aa, synthetic construct
MAANTAVKKIRKIEAKPVQVIKGLPENAKTRVCAYCRVSTDNKEQESSYESQVFYYTNYINSRSDWTLVDIYADDGISGTSTAKREDFKRMIQDCMDGKIDMIITKSISRFARNTLDCLDYVRRLKEKGIAVFFEKENINTLDSKGEVLLSILSSLAQDESRNISENTRWGIVRQFEKGRVLVNTTRFLGYDKNEAGELIINEEEAKIVRRIFREYLEGKSYNAIAKGLMKDGIKTVTGNTKWWDSTISGILENEKYYGDALLQKTITVDFLRHKRVDNKGQAEQYIIEGNHPPIISKEIFDRVQAEKARRAAKYNNIEGDRQKYSNKYPFSGKVFCGNCGNIYRRRQWNSNNPSRKFVWQCKTYIMNGKKACAAKAVDESVLKDAFVRVFNQLYENREDFIKTLIENIEKVLLHKPSDREIEALENKIEELKTELKRLIRFQTNNGMDDEVYREEYKRISDELEKLREKRAEVDKDSILKESLKGRVDEIIEVIKGRQEALEEFDEGIFNALVEKIEVVSPTHFVFELKSGVRVEERI

SEQ ID NO: 8725 - protein, 520 aa, synthetic construct
MKSRKAILYIRVSTDEQAEKGHSLAHQEEMLRRHCAVNNIEVVAFFKEDYSAKTFERPQFKKLLEFQRKNKGIADLLLFLKWDRFSRNAPEAYTMISKLHSLGLEPQAIEQPLNMEIPEQKFLLALYLTAPEVENDRRSMNILAGVRKAMKEGRYMGSAPYGYKHGRTENNKPTIVPSKDKAMVLQSFEMMATGLYQIEELRRMLNKKGMPLGRTRFWYMMRNPTYIGKVFIAAHKNEPASLVKGVHEAIVSESLFYEVQDILDGRKKKEQPVTICQKDELPLRGFLLCAQCGKHLTGSASKGRSARYYYYHCKFGCKERFRADEANSLFNDVLHAVSNNDKVYRSLELILGGENKEEAEIRAKELAELKNKLETYEQRMERAQVLMLDGKMDFVDYQPIKAKLEEDAHRLKLKIEAIEELQPKDENDVMEFGFYFLSNLGKLFTSAALEVKQQIIGSTFPEKLIYENNQFRTASDNNVLLLIAAPSKAFAVKKESRLEFSNLLSRRVEAHGIEPRTPCL

SEQ ID NO: 8726 - protein, 565 aa, synthetic construct
MNPTQTIAIYARVSTSNQEDQKTIQAQVLALKEYAQKNDLCIVKEYMDDGWSGDSLVRPALDQMRMDAKLNIWDGVLLYDPDRLARRYSYQELVGDELKEAGKKLLYVTTPAPQNSIEKILFGVQGLFAEYERAKIADRFRLGKIRKLTEGHVMTTEAPFGYTFIPNQGKKGDLSFQHGFYKINPEEAEIIKNIFEWVAYEKLTISSVIRRLRDLGIEPRKSKRKVWATSTLSTLLKNKTFIGEAHYGRLIAVVPLRPLKQETYRKNKKSSRKIAPESTWYKVKVPAIIDEQLFYRAQEVIKENFAKCVRHTKNQYLLSGKIYCICGSRRAGEGPQKGKHLYYRCTDKVKRFPLPRQCFEKGVLARLSDDLIWDYILNFLKTPQQVALQATRNINTLQLNSPKPEVKTDKIEAELKKYQSQIERYTQTYVTGIITMDKLLDYTNPLKEIIKKLSQQLDAAKSEIEKPPSIPFARIEELQPLSDELLKKLENLSFIEKRYIIDLLIIKVIACKKELKLKGHVPTNLNEYVELFTNCRYSWESIRHFPPVDRATVPFEFIIDTTLDY

SEQ ID NO: 8727 - protein, 509 aa, synthetic construct
MKKRKAILYIRVSTDEQAEKGHSLAHQEEMLQRYCTVNNIEVVAFFKEDYSAKTFERPQFKKLLEFQRKSKAVAELLLFLKWDRFSRNAPEAYTMISKLHSLGLEPQAIEQPLNMEIPEQKFLLALYLTAPEVENDRRSMNILAGVRKAMKEGRYMGSAPYGYKHGRTENNKPTIVPSKDKEKVLQSFEMMATGLYQIEELRRMLSKQGMPLGRTRFWYMMRNPTYIGKVFVAAHKNEPACIVKGVHEAIVPEALFYEVQDILDGRKKKDQPITICQKDQLPLRGFLECARCGKPLTGSASKGRNARYYYYHCKFGCKERFRADDANSLFDDVLHAVSTNEKVYRSLELILGGENKEEANIRAKELAELRMKLDMYEQRMERAQLLMLDGKMDFIEYQPIKAKLEEDTHRLKLKIEAIEELQPKDEDNVMEFGFYFLSNLGKLFTNAALPIKQQIIGSTFPEKLIYENNQFRTASGDNVLLLMAATSKAFAIKKESRLENSNLLSRRVE

SEQ ID NO: 8728 - protein, 482 aa, synthetic construct
MRAAMYLRKSRADHEAEMRGEGDTFDRHRKTLTELAKSKGYKIIRTYEEVVSGDSIEKRPQMKRLLHDVRNRMYDAVLVMAIDRLGRGALEDQGVILKAFKESATLVVTPFMTHDLNDEVCEEHTEFQAFMARREFKLINRRLQMGRLAAAREGRFISPTAPYGYRKINKNELEIVEEEAKIVKMIFDWYIDEHIGAIKIAKRLNSMGILSPKGGKWASSFVLQILKNPVYIGKVKWGGIEADGTHSPIIDSERFELVQNNRKKQLTPKHSTDLKNPLAGLVFCGKCGRAMSIKYGNTQTYLYCRGRATGTGCPTKNVRLDHLEQMVLYELKGWLKDYQLNPKITRQQENKLEELSFRLEMIQKEMKQLKKQLNNVFNLYERGKYTDEIFEERSTALNKQLNELRETYGETEAEYLKVNESVEANRTVIPKLTHVLDIYDRLRPLQKNILLKELVEKIVVKKEFLRAPIQMVVYPRLLKGGD

SEQ ID NO: 8729 - protein, 527 aa, synthetic construct
MTYSLTPQSDPAFSGQKALIYCRVSSIKQTVDGSGLDSQEHRCRRYAEQHGYVVEKVFTDDVSGGGDFLKRKGMVALLEYLRRRRTTDYVVIFDDLKRFARDTLFHLQLRAQMDRYNARIECLNFRFEDTPEGKFVEIIHAAQGQLEREQNGRQAVQKMCARLEQGYFVFHAPIGYRYEKVGHHGKLLVLNEPYASVIKEALEGFASGRFQTQSEMRRYLEGCECIPKNAQGLIAKKRTTDLLTHPVYAGYVEHERWGISFRKGQHEPLISLETYRKNQERLNGKPLVPTRKDLNKEFPLRGFVVCGDCGNPYTASFTKGKTKYHPYYVCQRQGCASYGKSIRRADLEGAFETVLKQMTPSKEVLNLALAMLKDQWNKREEIEIAQVKEHQKTLAEIEQKIEKVIDMMIDANSEIVRQNLSKRLAQLEKDKLLAEGQIAEKVQPLRPLATIARTSLDFLANPHKLWGSERLEDKRAVLKLAFSEPWAYHRIEGARTPNFSLPFKTLGEISPSQKEMVPKERLELSRA

SEQ ID NO: 8730 - protein, 416 aa, synthetic construct
MAQVSVVTPVRPLAPKLVNVAAYARVSTNGAEQLASLSAQVSYYSRLIQSTPGWAYAGVFTDEGVTGTSMKSRQGLADLMNAARAGKIDLVLCKSISRLARNTVDLLATVRELKDLGVAVRFERERIDTLSADGELLLTLLASFAQEESRSLSQNVKWAIRNRYKNGGTNSFVVYGYSWADGEFTIIDDEAKIVRLLFANYLDGISPEKTATMLNDQGKRSRGGGRFYGSVFRRMLENERYKGCQMLQKMYRPAIQAPNRALNDGELPRYWVEQALPPIIDKSVFDAVQAEIAYRREIGPAATPSKNTGVFTGRICCGACGKNYQRKTRTYKSGTSYKFWRCWSACTGNGNPCRGHNLRETLLEHACADMLGTQSFDPVQVGEQIVMIEAFPHQLTFHLADGTMTPVGLTSEGRLA

SEQ ID NO: 8731 - protein, 525 aa, synthetic construct
MSRTVTAIPATKKVRSAAASSGVPARRRVAAYARVSTEMEEQTSSYEAQIDYYTTYIRSRNDWQFAGMYCDEGISGTSMKRREGFQTMIDDALAGKIDLILTKSVSRFARNTVDSLTTVRKLKDAGVEVYFEKENIYTFDAKGELLITIMSSLAQEESRSISENVTWGHRKRFQDGKVMVPYKSLLGYKKGEDGSLVIDETQAPTVRLIYQLFLDGMAISEIKTELAARKILTPRGKEVWSTSTVRSILSNEKYKGDALLQKTFTTDFLTKKMKVNEGEVPQYYVTGNHEPIIAPRIWDQVQYELTTRHGNISSAKVGLFSTRLKCAQCGSWYGRKTWASNTKYKYTVWQCNHKYAGEHPCSTATVKDEHIKNAFVQALNQLIARQPRQSHLLQIFDSMLDTSRMEEQAAACQTKIVELTEQIEALIAENQQRALDQDAYQNKYTELDTAYRKTLARKTSLEADIAANTAKHAAVTTALDDLAGEPVSEFRPAQWSALIDHAIVDEDTIRFVFRTGEQVSMTLQG

SEQ ID NO: 8732 - protein, 413 aa, synthetic construct
MSVKKIRVNRQKHRKRVCAYIRVSTTNGSQLDSLENQKQYFENLYSNRDDIDFIGVYHDRGISGSKDNRPNFQAMIEDCRRGKIDVIHTKSIARFARNTVTVLEISRELKAIGVDIFFEEQNIHTLSSEGEVMLSVLASIAEDELRSMSGNQRWAFQKKFQRGELVINTKRFLGYDVDENGELIINPEEALIVRQIFALYLEGYGTHRIAKLLNEKGVATVTGAKWHDTTIRQMLSNEKYNGSVLLQKYFHDGVNGPKKLNQGELEQYFIEDNHEPIISMEDWQTVQEKLNSRRWQQGRNKTYKFTGLLKCQHCGSTLKRQVSYKKKIVWCCSKYIKEGKAACQGMRVPEVDISNWTVTSPVKVIERDRDGEKYYSYSCQESAEQRSTSGQKENQCSRILPSVHRSRRTAIKL

SEQ ID NO: 8733 - protein, 428 aa, synthetic construct
MSTDQDEQLSSYENQVNYYRDYISKHEDYELVDIYADEGISATNTKKRDAFNRLIQDCRAGKVDRILVKSISRFARNTLDCIKYVRELKDLGIGVTFEKENIDSLDSKGEVLLTILSSLAQDESRSISENATWGIRKRFERGEVRVNTTKFMGYDKDKDGNLIINREQAKVVRYIYEQFLKGYTPESIARDLNDQEVPGWSGKANWYPSSILKMLQNEKYKGDALLQKTYTVDFLTKKRTENDGQVNQFYVANNHEGIIDHEMWETVQLEIARRKAFREEHGIPFYHLQNEDNPFMTKVFCAECGDAFGRKNWTTSRGKRKVWQCNNRYRVTGVMGCSNNHIDEEMLEKAFMKAVSILNDHKTDVLDKLERLSKGDNLLHKHYAKFMNQLLDLDHFDSTIMCEILDNITISESGEIRISFLEGTQVDL

SEQ ID NO: 8734 - protein, 430 aa, synthetic construct
MSTDQEEQLSSYENQVNYYREFISKHEDYELVDIYADEGISATNTKKRDAFNRLIQDCKAGKVDRILVKSISRFARNTLDCIKYVRELKELGVGVTFEKENIDSLDSKGEVLLTILSSLAQDESRSISENATWGIRKKFECGEVRVNTTKFMGYDKDENGRLIINPQQAETVKYIYEKFLEGYSPESIAKYLNDNEIPGWTGKANWYPSAIQKMLQNEKYKGDALLQKTFTVDFLTKKRIANDGQVNQYYVENSHEAIIDKDTWELVQLELARRKAYREEHQLKSYIMQNDDNPFTTKVFCKECGSAFGRKNWTTSRGKRKVWQCNNRYRVKGQIGCQNNHIDEETLEKAVVMAVELLSENVDLLHGKWNKILEENRPLEKHYSTKLAEVINKPSWEFDSYEMCQVLDSITISEDGQISVKFLEGTEVDL

SEQ ID NO: 8735 - protein, 413 aa, synthetic construct
MSVKKIRVNRQKHRKRVCAYIRVSTTNGSQLDSLENQKQYFENLYSNRDDIDFIGVYHDRGISGSKDNRPNFQAMIEDCRRGKIDVIHTKSIARFARNTVTVLEISRELKAIGVDIFFEEQNIHTLSSEGEVMLSVLASIAEDELRSMSGNQRWAFQKKFQRGELVINTKRFLGYDVDENGELIINPEEALIVREIFALYLAGNGTHRIAKQLNEKGVATVTGAKWHDTTIRQMLSNEKYKGSVLLQKYFHDGVNGPKKLNQGELEQYLIEDNHEAIISKEDWQAVQDKLNSRRWQQGRNKTYKFTGLLKCQHCGSTLKRQVSYKKKIVWCCSKYIKEGKVACRGMRVPEVDISNWEITSPITVLERDRNGEKYYSYSGQESADQRSSSGQEENQSSRILSSVHRPRRTAIKL

SEQ ID NO: 8736 - protein, 695 aa, synthetic construct
MKSELVTPSHLARKAVVYIRQSTPHQVVSNQESLRLQYALRKRARELGWREAAIDVIDADLGLSGASTAHRNGFKELVGRVGLSEVGLILSIDVTRLARNCTDWYPLLDICGLRGCLIADRDGVYDPGTPNGRLLLGLKGSISELELHTIRSRLTAGLLAKAERGELAVMLPIGLMRDPSGVVVKDPDMAVQGRLGLVFQLFLQLRSVAKVMRALNERDLELPRRDRHGDLCWTRATLAAVAAVLKNPAYAGAFVYGRTRFQPPKREGALPQKAPRPMEEWRIVVKDRYPAYIDWPIYEKIRAVIRDNRAEYMRIKTRGAPRNGELLLHGIAWCARCGHKMYVRYKGGGEYVCNHLRTQEGQPTCQHIRANRIDEAVGEAFLTALAPAELDALSHSRRVQQQMNNALRSSAERELERKRYTAALAERQFNRADPDNRLVASELERRWEAALNDVRAAEEALARQTPSKAITQVAISKELDNKVISLTGRLPQIWADEAISDAHRKALLRCLIEKVVLDRGEHDLALARIVWRGGAVTELEVKMTVSSVTRLTRGTEMRERLLALARDGVPDDEIAAILTQEGHRSPHCPDKVLPITVGRLRRAAAIKVTTQRNRWEHEASLLSPPELARTLKIPVNWLYVQIRSKRLLIDRQPSGAYLFSNTPSVLGAVRDLRNHVIAQLDLRICQPNKEGHQHG

SEQ ID NO: 8737 - protein, 580 aa, synthetic construct
MPRQSSQALNGKTPEMFVGQRAALYLRVSTGRQAEHDLSIPDQRNQLRAWCRSSGIEIAAEFVEPGASATDDKRPVFQQMIERACDGENAFDLILVHSYSRFFRDSFGQEFYLRKLAKHDVRLISITQPLGNDDDPAQAMMRKVIALFDEYQSKENAKHVLRNMKLNAEQNFWNGSRVPLGYKLAEVEKRGTKIKKTLAIDPVEAETVKLLFKLYLHGDGTSGAMGIKEMVKWLNSRGYRTRMGNTFGVGMLHRMLTNSVYIGESRFNQTSAKTGKRKAEDEVVISKVPAIIDRPTFEQVQRQLHARSPKVIAPRVTTGPILLTGIAVCASCKGGMTLRTGTSKTGRIYRYYTCGTCASKGKTSCKGRSVPMDKLDDLVTAGLVNRLFEPARLAGILSALTARRTEKANAANNRILELQHIVSDAEEKLKRLYKLVEDGVAEIDDVLKDRLNSLKAERDTTKAALERAKASGSAPILIDPALLERFGRNMREHFTSGSIPFRKAYLQSLIDVIEVDDHSIRIMGSKDVLERAVLAQQPPRSEGSQMSTRWRSLGESNPCFSLERAGIFLSARSRPFAKIQ

SEQ ID NO: 8738 - protein, 548 aa, synthetic construct
MKAAIYARFSTDKQRDASIDDQVRECERTAKAAGLEVVSRFEDKGISGGTATRPGYQALLTAARRHEFDVIVTEDISRLWRNRAEFGPRSAELEDLGVHCLTCVGDDTRRDGWGLVIQIKQAVAEHARREASYRTRRGLEGNAIAGKSTGGRAFGYIAARDSSTGQIEIHEEHSQVVRRIFQLYADGMAPRSIAALLNEEGIPSPGASWNRSERRTDGKWLASAIHGDVTRGTGILNNRRYIGVVTWGRSEWKRSAADSKKRKHKMLARGVAHELVEERLRIVPQELWERVKARQKLRSHTIGANVKGVLRQRAAGGGRPQRHLFSGLLRCGKCSAAFVISNGERYQCASHLNGRCCDNTISVKRSLVESILLRNVRADLQDPELIAEVERRVAKALAARTKPKADNRKRVSELSKEIENLTDAIASGMLRASPALAARLASAEGELSRLQAAERPGASVVGRIAPNVPRIFATLVEQLEESLKKDPQRARTALAQIFGERVVLEPDESGRFLWADYGIGAALPIIPSESSVLMVAGARFVLNRLHCN

SEQ ID NO: 8739 - protein, 562 aa, synthetic construct
MNGVSMTLTSWSLRGGELQLNAVIYCRASSGEQIDSCDQQERACRERAKELGLSVSECYRDDGISGSRHNRPAYQHLLAAAERKEFDAILLWKQSRLGRDQPEIERAMRRLEELGLRLITIDGYDTRANSLKTRKMIRVVRGAMDEAYLDDLREDTLRGLEDRFDEGYWCGGRPYGYRLVEVASDTEKDAYGRPKRIGSRLEIDPAQASVVREIFRRYAAGDSPQGIAADLNERTVASPGSTWNRTKRRCGGWARSGIWQMLRNPLYSGTYYWKRVEWQRTEKGRKVRARSETDWKGRAGNAPGLAIVDPAMWQSVQKRLAVNRGKNPDVRLKSGGRAVYMLSGLLQCGKCGAHFVMDSATHYRCGSVVDGKACNNDIRVRRDLAERVILQPIVEELLSPAMVEAMIREMRVYYDERMSEIRSQRTRVPAQLEELNRRISRLQERLKSGDPDLTADELLGIIQKAENKRTDLLAAEPGAERIDKVLAAVPAFATQYRAQIAKGLQGHRDEAARARMAVRKLLGDKISLVPAECGTHLVAHLQFKRAALLAEGVGTVGSGGRI

SEQ ID NO: 8740 - protein, 601 aa, synthetic construct
MRLAIYARVSTEEQREGQTIDSQIAELERFAREQAWVITDTYTDAGWSGGIMARPDLDRLRDDARKGLFDGVLINDVDRLARDVSHLGIIKRDLEKQGIRVIFRKLPSEASPTYNLMVNILGSFAEFERELIADRTRRGRRHKIEVRKQYLGSNTAYGYRWVPADKQTGTDGHLDVNAVEAATLRRMFEWVDKEGLSARRVIVRLNELAIPSQKGKRWSRSSVLKVLHNEMYAGTWHYNKLQGCEPIKPACNARYRRHMKSSRRKRPREEWLALELPPSLRLVARDRWERVQERLRQNIAFSPRHEKHFYLLKGLVLCGGCGARYVGEPSHGKFYYRCAARCRLVPTVRETVLDGTVISVVEQLITDPSLVLDQVERQKRNGTAARANRLALLAEVRKELRQIDGEESRLLEAYRSEIITATQLATELAKLNARRTDAAESRKAAMQHAQLRLAPEQIQKSVEEYCREVRQNYNSFAPNELREFLRTVIQNAVFDGQRLKILGHLPANTSSAESTKHKIDNPSGGGHHDANAAAPSPAAMDRESIDRIPHPADQGIVQATQMQAVRAMGITWSRTVPLYGNDDRSSRLHSCRQNITKPRQL

SEQ ID NO: 8741 - protein, 588 aa, synthetic construct
MGLFVKPRAYSYLRMSTDLQLKGDSRRRQLEASRAYAEAEGLELADDAQLEDIGISAFKGANVRVGALGQFLAAVKTGSIERGSYLLVESLDRLSREEILTAHTLFLSIVQAGINLVTLTDKRVYRAETTNLVDMITSLVIMERAHEESKTKSVRIGAAWKNKRNRASNHQPMTKWCPAWMQLSADRQNYALIPERVEIVRKIFEETASGVGMFVIAGRLNKLKVDSFGGPNGWHQSYIAKILGNRAALGEFQPHTKIDGKRVADGEPIPGYFPAIITEELFFQAQYSKSQRKVGGSGAGRKGPGYTNLFTGIARCAYCRSIMAYENKGVGPKGGTYLVCDDAQRGRGCVGTRWRYRDFEASFLAFVQELDLESIINATDDASKRKNLEAELSAIQGELSSVADLMEKTYQVLSAGGAPEFIAGKLNELTARQSDLNARLAAKEVERQEFDARESRFYTSKEEIKDLVGRLQGAPTDELYKLRAQIASRLKVLVETLLIAPIGELPKMKKSIEQLKEIVDDPSDDVVAHMEKVAAHPDQSRRYFAVGFRDAAVRAVFPTYGDPLRFVQQVVAGQGSSAIIHPENPLPA

SEQ ID NO: 8742 - protein, 564 aa, synthetic construct
MTRVALYARYSSDNQRDASIEDQLRICREKAEREKWTIVSTYKDAGISGASMILRPGIQTLLQDAQRQQFDVVLAEALDRISRDQADVATLFKHLRFAGVPIITLAEGEISELHVGLKGTMNALFLKDLAAKTHRGLRGRVEDGKSGGGLCYGYRVVKKLDERGELIRGDREIDQAQAIVVRRIFREFASGISPRAIARALNAEGIVGPDGNLWNDSTIRGHVKRGTGLINNELYVGRLVWNRQRYVKDPSTGRRVSRMNTESEWIVAEVPELRIIDDELWQAVKTRQGEIADKYVNVTEAIREAQSNRLNGLRRPKALFSGLIRCGVCGGPCSLRGQDRYACSARVTNGSCANTRTITRSDLEQRVLAGLKDRMMAPEMAAEAMRAYAEETNRLNRERRASGEGHRSELAKIHRTLKQMLSAIEEGGHTRGMTERMRELEAREDVLKALLAEEPADIPDIHPNVSGIYRKKVERLTEALNTPEDRNEAAEAIRALVEKITLRPGPNRGEIDATLHGELGTILGWIAAQAIGKTRKRDTPAAFATGVSVSVVAGIGFEPMTFRL

SEQ ID NO: 8743 - protein, 568 aa, synthetic construct
MKVAIYARYSSDNQRDASIADQLRICRLHAEKQGWQVVEEYTDHAISGASLLRPGIQALISDATRGRFRYVLAEAMDRLSRDQEDIAGFYKRMAYSDVKIVTLSEGEVTHLHVGLKGTMNALFLKDLADKTRRGQRGRVELGKSGGGNSYGYDVVKKFDASGEPVRGDRTINEVQADVVSRIFRDYAAGKSAKRIAFELNKDSISAPGGGDWGFSTINGNPKRGNGILNNEMYVGKLVWNRQRFIKDPDTGKRQARMNPEADWIIQDVPELRILDDDLWQAVKKRQQAVKQNRSDDGETENHFRERRRPKYLFSGLTKCSCCGGGYSMISADLVGCSTARNKGTCDNRKNIRRDQLEARVLNALRHHLMDPELFKEFCDEFTREMNRLRMEGRASIDAAEAEVKRIDRELDTLLNLILKGGAADRLNEKMVVLERRQKELKAFLREAEEPPPLLHPNMAHHYHVQVDELYAALQEDSEAKRMTAADLIRSLVRDIILTPEDDELKIDVRGDLAGILAISLKSKRPAGGAGQSQVEMVAGTCKRVCYNFRPRRPPTAGGKVENGHKLAA

SEQ ID NO: 8744 - protein, 557 aa, synthetic construct
MKIADLYVRVSTDEQADKGYSQRGQEELLRRYCEMKGITIRHIIYEDHSAKTFNRPAWKKYLIELRRHRGKTDYVLFLKWDRFSRNAGDAYQMINVLRKLGVEPQAIEQPLDLSIPENKMMLAFYLAAPEVENDRRALNVIHGMRRARKEGRYMGLAPIGYANKTDETGRKYIAPKEPQANIIRWAFEQIAEGIYNTEQVLKLAREKGFTGTKSLFWFAIRNPVYCGKIFLEKYKEEEAQIVKGLHEPIITEALYYQVQDVLDGRKRSPYKPKIYTNEHLPLRGFLICPECGKLLTGSTSKGHTKYYTYYHCTTGCTCRFSATTVNERFLYRLKKMIPRPEVEDVCKITLTESWHHHVGVKDDREQIIDEIKEIEKRLSKARELLVSGELDGIDFREMKSEYNARLEKLQAKLSACNNDQLDFSGLLDAGLKTLFRLDNVYENGTIEKKREVISSMYPEKITFDGDDFRTTRVNEAARLIYSLGEAFSENEKGQSENIPALSCQVGKTGFEPATPWSQTRCATGLRYFPIPCNPAHQATGCKCRHFTPKTLTNSTNN

SEQ ID NO: 8745 - protein, 587 aa, synthetic construct
MRGAIYSRVSTEIQDYGKQTDELKDYAARNNIEVKYIFEEKVSGFKDDRTEFKKLEKLTKNDIDIILVWELSRLSRRSIFIQQTVKNFANKGICIFTKKEGLYTLNDDGTENKHAMFTIGVISMIAEQEIETLKERTISSKRRYILKEGHSYTPIAPYGYNYNLTTKQLTINEDEAEVVRRMYQLSIDGVSTNRISKILTSEGIKTKKGNPNWSLATVRDILHNPVYKGVPKYTMTIRNKKVVELVSAPPIVSEEVFEQSEKELTERRNRSKSEMVNKPLLRALIFCTDCGRRYICNSGRSIYACQTRFDNIRANYVADCHSAGISATNIEPIIWNLVERLFKSTIASSKAQERIEPYQEQLSKLSESKNNFEMQRDKINKDAAKLFDTLLLIRDTNPTVFTSKMEDFNKMSTEANDYQKEIDIIESKKQAIQRRIKAIEEIKDIDITDESEKYDILHKVIEAIKIYSVKTNQKVFTVLFASGLEYNVLYNVNKPKFRIEYAFASDETITFNKKDKLLINKLYSSVRDILPDFSITAGNNDMFDNDVCGDYSFQEVWDLLEKYNKTEVLREWKPDYTKRTINRRSKK

SEQ ID NO: 8746 - protein, 568 aa, synthetic construct
MGKSSQQKAVIYCRVSTKRQRTEGGGLDSQEHRCREYARKKGWEVVAIFPDDVSAGGDFMERPGMVALLAFLDAHPLESFTVLFDDLKRYCRNTEFHLRLKREMAARNAKRECLNFKFENTPEGDFIETIMAAQGELERQQNRRQVIQKMHARVEQGFWVFKAPVGYKYVRSKQGGKILVADDVLGPVVKEALEGFASGRFASQTELRRFLESHPYFPKDLPNGTLRPQTIPRLLGRAVYAGYVEAPKWGISLRKGQHQGLISFECFQKIQERLEKGVYAPTRKDIKDDFPLRGAVECSCCGTPLTAGWSKGKYKKYPYYLCRKKGCAQYGKSIARDKIEGEFAELLANMQPSETLLKLISRMFQDAWEFKQAQRNAMKDVFKRDAKALDKKIDELLERILESTNQRVIDAYEKKIDSLEMEKMVLLEKAQKSSFQKYTYRELFELSMKFLSSPYKLWASGKLELQRLVLRLTFSETIPYQKGEGFLNTKKSHLFNVLENFSMRKEEWCCQRELNSRPLPYQGSALPLSYGSIPRCFDRALNVAPMRAVSRAASATLQACFLKKTAFL

SEQ ID NO: 8747 - protein, 448 aa, synthetic construct
MRAALYIRVSTQEQVENYSIEAQREKLEAFCKARGWTIYNTYIDGGYSGANMDRPALQQMLADLKNIDVVVVYRLDRLSRSQRDTLTLIEDYFLKNNVDFVSITETLDTSTPFGKAMIGILSVFAQLERETIAERMRLGQIKRAEEGLRGMGGDYDPSGYARVNGQLIVKPDEAEHIRKLFDLYEQLHSITKVQRELKKLGFPVWRFRRYRDILSNKLYCGYVRYAGEYYKGQHEPIISEEQFERVQVLLSRHRGHNAYKAKESLFSGLIRCGWCGEPFVSYRTSTSKYGVYRYYLCRAKRFPSEYDRKCTNTTWPVAKLEDLVRRELAAIVIEKEAIESEPERFDYSRLIKNIDGKIERVLALYADGEIDRELLDRQIERLNAEKQRLLHEWKAQEEAQKKQVTKEELERYKIDLAKADFATKRAIVEKLIRSITINGKSVTIEWLF

SEQ ID NO: 8748 - protein, 547 aa, synthetic construct
MKPAAPAQQPATGRAALYLRVSTGRQAESDLSIPDQRRQGIAFCKARGWDVVAEFVDAGLSGTNDNRPEFQRLLDLATNGAPPFDVVVVHSFSRFARDAFLHEMHLRRLAKAGVRLVSMTQELGDDPMSVMIRQIFALFDEYQSKETRKHVQRSMNENARQGFWNGAAAPFGYKVVAAEQRGAKTKKKLAIDPVEAETVRLMFRLLTEGDGTTGPMGVKATACWLNERGYRTRGGARWGIGPLYGLISNTVYKGQAVFNRMDSKTRQRKPESEHIIVAVDPIIDPAVFDALQTQLKDRNPRVMPPRVVTGPILLTGIATCASCGGGMTLRTGKSGRYRYYVCAAAAQKGKTACPGRSVPMDRLDNAVMDRVADELLMPGRVADMLRGLMDRQTKRDEDYGNRLTALRGVLAEAEGRLGRLYQAIESGVADLSDGTLKDRIGAVKTERDIAQAAFDRAVAEMRPEARITEERIAAFVGTMRENVLSGDTPFRRAWLRAVIDGVEVDDREIRIHGRKTVLERLVMAGGAAPAGVPSFVRKWRTRQDSNL

SEQ ID NO: 8749 - protein, 548 aa, synthetic construct
MNVHASVALASSRSAALYLRVSTGRQAEHDLSIPDQRRQLQAYCQAKGIAVACEFVEPGASATDDRRPEFQKLMDEAAQKPAPFDAIIVHSFSRFFRDQFQLEFYVRRLAKNGIRLTSITQDLGDDPMSVMMRQIMALFDEYQSKENAKHTLRAMRENARQGYWNGSRPPFGYRTVAAEQRGARIKKKIEPDPEQAETVKLMFHLARVGVENGPMGARQIADYLNERGIRTQTGGRWGTGAVHQILTRETYIGRHRFNVSSWRKKERKADAEVVEVAVAPIISEDEFAEVQSIIRSRSPQLKAPRFVTAGTLFGGVCFCAGCGGAMTLRTGKNGQYRYYTCCTKARQGQTGCRGRTIPMGELDTLVVSHLEDRLLVPQRLAELLAGPLARQEAQAERLKGRIAELRSQAADAETKLTRLYEAIENGLAELNDSNLKGRIAELTRTRDAARADADRAEHREEGSGNSLTSELLGRLGSEACKKLRASDGSFRRHYVQTLAQRIEVGDDEIRIKGTKPGLIQALVAAGGSARVETAGSPVPSFVPRWLRG

SEQ ID NO: 8750 - protein, 495 aa, synthetic construct
MKVVLYLRVSTIEQAEEGFSIRAQKTQLLDYCRVNDYEVVEIYIDDGYSAKDTNRPALKQLLKDAEKGQFKAVLVYKLDRFTRSVRDLYDLLGYLSGFGVDFVSKQEKFDTTTAMGRAMIGILGVFAQFERELISERVRMGQEQKVKEGKRHGGRYPYGYDNEGKVIPHEFEVLRRIRHMYMKERMSYKKIAIQLNQEGITRRGYEWRASTVAMTLENPFYAGIIQYGERMANGKFPQRYRDKKVEVIRSIGDHEPVWTMEEYEEHYRLMHMRKGSGYSRKLEYWFTGLLRCGRCGAAMHGRLTTSRKRKDGSIVRTPYYICNRRKDNDTCRMPIFRQKHIEHLVMEYINNLQIDQELKESEQRKIKKQQANTEKQIQKLKRDLESIKGRKKKWQYMFVEELITADVLRERLDEENSKEVELQKKLDELQSRERETPAIQNMLISMADLWPVMNDEEKKEMLYTIFEEIRVHTTEENPKGVKNKFFDAYIQVKYR

SEQ ID NO: 8751 - protein, 572 aa, synthetic construct
MKNKTVRIIQPKTHYTLDQINNPLTRKRVCAYVRVSTDNIEQKTSYEAQRDEYTQRITKNPDWIFEGIYADEGISGTSTKNRKQFNLMIDKARAGQIDIILTKSISRFARNTVDALNYIRELRQINVEIIFEKENISSLDPKVEFLLTIMSSMAQEEARNVSENVKWNVQRRFREGVPIINHQRFLGYTKDKKGGNLVVVPEEAQIVKLIFNLYISGVGPAKIAEQLVEMGAKTGAGKTEWRLSTITTILKNEKYMGDMLQQKTISIDYLSHARVKNTNHAPTYYTENSHEAIIDRETFELAQRIRKDRAKVRIGEDKNLSKYSRTYPLTAMIICSECGRTLKRRYWNYGKPSQRVMQQCGSYIDGKANCNAKASRQDLIEATTIHMLNKVFLKDLDIMSTIQRVIKSTIKVDDVQNIIEKLTLERDENEIALSNLIDTKVKAPDIPESIFNAKYREYSDRLKVLTAEINKLELEHVKNYDTRKRMDKINEILGKKNLVIDELDSEILSTFIYKMISVSPNEIVYCIAGIKNYSDNEFKERRFEFLKTEPIIVETYHAPDGLAKMLYRVVVI

SEQ ID NO: 8752 - protein, 572 aa, synthetic construct
MQNKQVRVIQPKPVFDLSGTIPKNLKKRVCAYVRVSTDNEEQKTSYIAQTDEYTERIQNNPEWTFCGIYADEGISGTSTKHRKQFNNMMDAAKRGEIDLIMTKSISRFARNTVDCLNYIREMRAINVEIFFEKENIYSSDPKVDFLLTIMSSIAQEEARNVSENVKWNVQKRFNNSVPIVNHNRFLGYTKDKRGGNLIVVPEEAKIVREIFQMYVSGIGPMKIAKHMESLGATTGAGATKWSMSTVAVILKNEKYIGDLVQQKTLTVDYLSHKKVKNKELAPMYHTENAHEAIIDRETFLLAQRIREDRSKVKVGKDKNLAKYNFTYPFSAFIVCSECGRTLKRRYWNYGTPAQRVMQQCGGYIDGKAHCKAKATYQEMIEGATVKMLNEVFLQEKDIIPNIQKIIKSTIRVSDVEIKIQKLQTQGDELERMISNLIDVQVKNPNLSQEDFNSKYQSLTLQLHNNKTEIRKLEGEYLTNYDTRSRLAKIETTLNNLLEPIQEVDSDTLRSFIYKIISVTPENIVFCVAGTKNYTDKEFSENRHTFEALKPLATGTYHNEKYDKIMNYKVVII

SEQ ID NO: 8753 - protein, 413 aa, synthetic construct
MSVKKIRVNRQKHRKRVCAYIRVSTTNGSQLDSLENQKQYFENLYSNRDDIDFMGVYHDRGISGSKDNRPNFQAMIENCRKGMIDIIHTKSIARFARNTVTVLEISRELKAIGVDIFFEEQNIHTLSSEGEVMLSVLASIAEDELRSMSGNQRWAFQKKFQRGELVINTKRFLGYDVDENGELIINPDEALIVKQIFALYLEGYGTHRIAKQLNEKGVATVTGAKWHDTTIRQMLSNEKYKGSVILQKYFHDGVNGPKKLNKGELEQYLIEDNHEAIISKEEWQAVQEKLNSRIWQQGRNKTYKFSGLLKCQHCGSTLKRQVSYKKKIVWCCSKYIKEGKVACQGMRVPEVDISNWTITSPVTVIERDRDGEKYYSYSSQESSDQRFSSGQEENQGSRILSSVHRPRRTAIKL

SEQ ID NO: 8754 - protein, 510 aa, synthetic construct
MKSVKEFEFLAKGKQLTTQSGNKCVIYTRVSTKEQAENNMSLDTQRRACELYARKQGYKIMAYFGGTFESAKTDEREEFNHMLSFVRSSREQVSYILVYSVDRFSRSGANAIYIKEQLKQHGISILSVSQPTDVSTPSGSLQQNIQFIFSEYDNQLRREKTVAGMRDKLLRGEWCGQVPRGYDIIVINGKHSIKLNAEAEHIRKAFLWKFYERITNTVIEERLQGMGIKITRAHLSNIFRNPFYCGIITNKLLEGKAVIGKHEKLISKEVFLAVNELINNDYKKGQIKHLHDNIFLPLRRFVICKKCGGRMTGYLALKKNLYYYKCKKIGCGVNINANTIHNLFLEILSRVKYKNNSNQTLKKLLLTEVVNTENINIKSEAIYKGKLTKLKNALDEIEERFVFGKISESMYNKQTQKLFADIKEIEILIDKAKAGLAERNYIKEESEQGIIKIANVWLKGDLNTKRIIQNTIFPDGATYDKALNVLKINGLSEDFYLDNTCNPNTTNTVV

SEQ ID NO: 8755 - protein, 522 aa, synthetic construct
MVLGMKTQAIATHRQAIIWGRFSSAKQEDGDSEASQNRYNRECAKRKKIQVIAEHFDRGISVKAGPTPNFRKILKDLPTGVGIICRDLDRISRGHVIDAMAYLKNEIVSKGHFVITSTDDIEYNEETINQTSTLVVGSTKATIAYGENEKRIRGVRDAKKAAYQLAREGKPAPLGPWIPPHLKYDFETKQYVQRHDKGSPLPNKQVIEKIFNAYVKDNGVVAICKMLNDENIPTFRFKKAKGWSQATIWQLLRYEGLIGVLNIKGERIPKAFPPAISEDLFYKVQRILGTHKHGNYSAENVRNVFRGICHCKKCGVSMRVLNGDYLQCRGSMLGKCDINQVVKWTEMEMALLYWFVEEAGPSLLKRDNDTQSAIQTLDAKKNTLARRIGATIDLLDAGLAVNEVRKRLERLEAEKRDIEAAITTQKAKASDEKAMPETFGALYDYVERAMDGDKAVRKEIAAIVPTIVKDVRVDLSDKWFPSFDVELVNGTIHEWQYDVQEFAIDTKGKYHVTEGGYVGKAE

SEQ ID NO: 8756 - protein, 601 aa, synthetic construct
MKTVEIIKGQGTTAPRRGHGQEIERLRVAAYCRVSTDSEDQLSSYKSQVQHYTEFIKSKSEWVFSGIYADEAITGTQIKNREDFQRLINDCMNGEIDMIITKSISRFARNTLDTLRYVRMLKEKNIAVFFEEENINTLTMDGELLLVILSSVAQQEVENISANVKKGLHMKMQRGEMVGFQGCLGYDYHPEDKTLTVNEEEAKIVRYIFQRYIEGAGCTIIGNELENLGYKTKRGHTKWPPSTVINIIKNEKYKGDLLLGKTFTVDPISKRRLENFGEQDKYYIKDHHESIVSEEVFSQAQEILARRGHPRRLNTDGKREKYSRKYAFSSMLQCGFCNTNLNRRSWHTGARHKKIIWQCTLATKKGKRFCPESKGIEESIIENAFLEAYKLLCGNDKTIVDEFLTLTEETLSEENVEKTIRKLEKDLLTADHKKSKLIDLRLEGTIDEESFSKKLYEIDSNIESLNLTLNDLSATRDQQDELRSRIQSFRSTLEKQPILDKFDRLVFESIVEKAIIGGYNENGQPDPGLITFIFKTGFKEKLHKSNFEVLRRQFDSDGNQIVPCTSSTNEVESVPSYNSINTRWLLDQLPHRYLQLHRDFE

SEQ ID NO: 8757 - protein, 594 aa, synthetic construct
MPKISRIEPIVPAIKPLKKVAAYARVSMQSERMMHSLSAQISYYSKIIQKNPDWEYAGVYTDDFISGTNTVKRDEFKRMLSDCEAGKIDIILTKSISRFARNTVDLLETVRDLKAKGIEVRFEKENINSMSGDGELMLSILASFAQEESRSISENIRWATKNRFEKGIPNGKFRIFGYRWEEDQLVIEPKEAEIVKRIFQNFLDGKSRLETEKEFAAEGITTANGCRWVDSNIKVVLTNITYTGNLLLQKEFIEDPITKRRKKNRGELPQYFVENTHEPIMDMETFQYVQDEIARRKELGALANKSLNTCCFTGKIKCSSCGVSYMHNKRTDRGSVLEFWCCGSRKKKGGRCEVGGSINHEKLKQACTEVLRLTEFNEDAFLEQVDVIYVPKRYVLEFHMTDGRVITKDCPNTGHKDCWTAEYRAKTSEKRKKNGTNCIGASGFTGKLKCRNCGCNFRKATQPSATAKDGKAYYWRCADHGKGCKTIGLREDVLKPLFADALGMAEFDDALFRKKVDFVWVMSKTELEMHLSDGSVQTLLYEPPKRKGLPRTEEQKEHMRKVMQSKWTPERKAEMSERMKQMRKERGENWRKEK

SEQ ID NO: 8758 - protein, 527 aa, synthetic construct
MAKRKVTAIPATINKFTAAPVNSRQKRRVAGYARVSTDHEDQVTSYAAQVDYYTNYIQGREDWEYVGIYTDEGISATNTKKRDGFNRMVADALAGKIDLIITKSVSRFARNTVDSLTTIRKLKEHNVECYFEKENIWTFDSKGELLLTIMSSLAQEESRSISENVTWGHRKRFADGKVSFAYSRVLGLEKGPDGNIVVNQEQAEIVKLIFRRFLEGMTPHSIAAELTDMGIKSPGGKDKWNSATVRRMLSNEKYKGDALLQKEFTVDYLQKKTKRNEGEVPQYYVEGNHEAIIEPSVFDLVQTELAKRSKKSEARYSGVSIFSNKIKCAECGSWYGSKVWHSNDKYRRVIYRCNHKFDGNRKCETPHVTEEEIIAAFIKAMNTVITEREEIIGNIKLIRQTICDTAGLTEEQDKLRSEMEIVVELTQSCVAENARTAQNQEEYQKRYDGLVERYEKVKSRYDSVAEAIEEKQAHYEKLGIFIQTLEEHGEPITEFDAGMWGSMVEFITVDKNKNMTVTFKDGSEIAV

SEQ ID NO: 8759 - protein, 575 aa, synthetic construct
MVVKANQGNVKRVATLYRVSTKKQLDRSSTDNGGDIPSQQKACKEFIERQPGWTLVEEYYEKGVSGFKKRAADRDVIQQAKEDALKGRFDVLLVFMFDRLGRIDDETPFILQWFVEHGIEMWSVVEGQQKLNEHVDKLINYIRFWQASGESIKTSIRVNEKHSQMVEEGIYRGGSVPFGYKTLKSGIFNKKGKELLKVVIDEEQASIVRLIYDLVDLEGYGQYRIAKYLNEKKIPSRTGKRWTSAAVGAVLRNPMYKGYMVYARNTDKEVFSKKPNPELVIIDEAKWERVRLFCNGRSPEKVKKEKQNLVIKSTKSSLLLVGLVRCGHCGKPLTTTYNRKYYMKKDGTKKEYKLPKYRCSGKAQLAVKCDGQTLYSPKKIEGVVLDEVFGYLDNLKKTNFSQQIEEFKKNNMAEEVKAVRRLQRQIDEACNKLSALTEEVPKAILGESAFKPELLSSLIEKTETEIVELKSQLAQAEQALASKKIELNEMEEVQKYIPVWREVFENASIERKKMMLSSIIEGITVHRDKVEINFKLHIREFIGVMTNGSIPTNVTNPSNLILNKILSHHTLAVNA

SEQ ID NO: 8760 - protein, 496 aa, synthetic construct
MVISTRRAAIYIRRSTEEQSEYSTEAQERHCRSYAEILGFEVYRIYIDDDYSGRRADRPSFNEMIRDAHLKRFSCIIAHKIDRLARNTALLLKLVEDMEAIGVGVLSVSEQIDFRTPMGKVSLAMLASFAQYYSDNLGTETKKGLQEKAMQGGWVGPVPYGYERDGASLRPSNDAAAVQLIFSLYTSGAHSYSTLADELNQRGWRTLDWQTGERGIFGRESIRYILRNNAYIGLVSINGQAYPGKHPALVSKETFELAQSIREQRTTKKARFSVSLPQSGGLLTELVWCAKCGERMWRHTSAGDGNRKRRIYYVCSGRSRRTCDAPFVSAQVVEGQAISILQQLAIPTDWRDRILTLAEGMIVSTQEVKTISPEQIAEQKRRLSLAFSLGGIDEITYRRQLEGLQALQTSSPKTLQQLDLASAVNTLITMGDALKQADIEMQRLLVRRIIDRFWLAKGETNSIEAITPTGAYAPLVEATTSMLSMGWLMGLEPTTT

SEQ ID NO: 8761 - protein, 557 aa, synthetic construct
MRKNQIMRAAIYARYSSELQREASIEDQHRICRRLIDERGWSEAKLYTDQGLSGSSHLRPAYQAMMMDARAGKFDVLVAEGLDRLSRDQEHIAALHKQLRYLGIPIVTVAEGEISELHIGLKGTMSALFLKDLAQKTHRGLEGRIRDGKAAGGISYGYKVVRQPLPDGTFTTGERAIDEQEADVVRRIFRDYASGISPRAIAARLNAERVPGPARASWGASTIHGNWRRGTGILNNELYIGRMIWNRQHFVKDPETGKRQARPNPETEWVIQEVPELRILEQALWDAVKERQSVTRRVMETQDRALRPERARRTRYLLSGLLTCGCCGGAYTLVGGQHYGCASARNKGTCDNRRMIHRSRLEDRVLGGLRDKLLHPDLIATFVEEYQREYNKAMQADLAIRRIREAELTKVEQSIAQIVDAIADGMYHPSMKEKMAALEARKIAIRDELSELGEEEPLRLHPGLSGIYRRKVAALTEALNKDETSRNEAVEVLRGLISTIRLTPDGEGELQVELVGELGAIMLLAEEDSKKPRRAGNGAYSITLVAGAGFEPAAFRL

SEQ ID NO: 8762 - protein, 490 aa, synthetic construct
MRTVIYLRVSTEDQAKEGFSIDAQRRKLLAYAESQDWDVVSVLVDEGYSAKDLNRPAMQELLEKVRNNEIDVVLVYKLDRLTRSVKDLYHLLDEFARHDVGFRSSQEQFDTTTTMGRAMIGILGIFAQWERETIAERVRLGMEQKVREGKKPGGKYPYGYDQNGNLIPEEALIIRRVRDMYMKENLSFLKIAERLTLEGIKRRNFEWTRNTVALTLENPFYAGIIRFGSKMKNGKYPQRKRDLRVSYIDVPGEHEAIWTLEEYEEHLRLMRMRSIGNNSRKLDYLFSGLLRCGRCGSTMFGRLTTQRSRKNGELVRTPYYFCGKRKDNKNCDMPMFRQKHVEHLVMKYIESIRLDKSKLDLKQNNNDLDRRIRQLNTDLNRLRERRKKWQYMFVNEMISEFELRQHLEVEKAQEEKLISELQELENQRKEEFIYPTRLLEIVDVWDSIDNQQKRELIWTIFNEITLFTDEKNVKGVKNKFFPAWIEVKYN

SEQ ID NO: 8763 - protein, 566 aa, synthetic construct
MKKAILYARVSTAMQERDGTIESQIEELKRQIAKDGNVLVKQYVDNGYSGARLDRPALDHLRQDMKTNLFDTIYFLNTDRIARDVTYQNIVISEILKNKKQVIINGKDYIHNPENKFSLTVLGAVAELERAKIIERLTRGKMHHLRQGKLLSQGHNIYGYNYIKKTMDSPPRYEINIEEAKIVKLLFEMYAEGKYGIMRICRHLEEIGAPRKTGRKPWHTTQLAYMLKNEAYTGVKYFNTEHYVREYANPIHGIKHTTGKVVKTPREEWIGIKIPQIIRQSLFDRVQAKIEYNKQHYRNPRQPQLLSNLVRCGLCNYYCFSYQRRFRDPRRKKDPEKVFHKVAYKCRRRAEYRMHAKNDPGRCGNPEIASHLLEDCVLRMIRETMAHPDKLKKCLEGASDKTHLTQARMEKKLKAVDDAIKDLKKQKKRILDLYATGDLDRGRYAQKSLWYDNEINKKGIERQELITKIPILHKKEVVDVSIRRFCDELQARIEICNDFNTKRQLFLDYIEKIVYKVQVKDGEVNLYGSIPVHLEAYNNPDQPSEVSKIGFCIEGIIPRRQSPTKS

SEQ ID NO: 8764 - protein, 499 aa, synthetic construct
MNVVAWARVSSREQREGYSIDAQLRAMRDKAAKSGSTIVREFVVAESAKRGAERIAFNQMFKWVKANAKREKIDAILSHKLDRVCRNMRDAVRLQELEDACGVQLAFVENQFGPGAAGALSFNVMAAVAQYYSDNLRAEVLKGMDEKVRQGWPTGLAPYGYMNVDDRNEPVVPHPEKSKTVVRIFELYASGQYTFKSLADKLAAEGHTLRPSQPRFNRTSLSYILNNRFYVGELERNGQVFKGSYRLLIRRSTFEACQDILNGRNRRTGHPDIMLSGCVLRCGVCDHAITGERIRRRLRDGDCNTHVYYRCGNNHPDDGHPKVRWREADVENAIIQEFETFRFPDPVTADWYRESVQAAFEDVSSTTAMRRKMLSKRQTELTNMQERLLNGYLAGIIDERTFQLKSADLKSQLEEVERQLDEADEFDPAFGQTALAVFDFSQNLVPIWLGSNSARKRTILECVSLNRTLTDVTLVLTKRKPFDFLAERPFLKSTRGDWI

SEQ ID NO: 8765 - protein, 526 aa, synthetic construct
MAKNVRTIPATISRFTATPLTAKEKRKVAAYARVSTDHEEQQSSYEAQVDYYTNYIKGRDDWEFAGLYSDEGISATNTKHRDGFNSMVQDALAGKIDLIITKSVSRFARNTVDSLSTIRKLKENGCECYFEKENIWTFDAKGELLITIMSSLAQEESRSISENTTWGQRKRFADGKVTVPFGRFLGYDRGPDGNLVVNEEQAKTVQLIYKLFLDGYSCGKVAKKLTELGIPTPGGKKNWSSSTVRSILTNEKYKGDALLQKVYTTNFLTKEKKKNNGEVPQYYVEKNHEAIIDPRIFEQVQAEMERRTNSEGRYSGTGIFASKIKCGDCSGWFGSKVWHSNDKYRRVIYQCNHKFKNGCKCKTPHLTEDEIKEVFIKAVNQYLSEREALMENAETILHLLSDTAELEKRLDESAVKMNALVEQTENIVAENARVALDQTAYNKRYDSLISQYEAEKYTYDKLESEIADKKARHQQLQDFIIAVKETAQFQTEFDKGLWCALVDFLTVKSKDEITVTFRDGTEITVE

SEQ ID NO: 8766 - protein, 633 aa, synthetic construct
MRKISKIEPKAAAIKPKKKVAAYARVSRDTERLLHSASAQVSYYSSMIQKNPDWQYAGVYADYGISGTKVAKRDEFCRMLQDCEDGKIDIILTKSISRFARNTVDLLETVRHLKSLGVEVRFEKEHINSMSGDGELMLSILASFAQEESRSISDNCKWGIRKRFQSGEIGMANKHLSGYQYDEKQKCYMVVPEEAEMVRWMFRMYLDGTTLRNIAKNMNDAGYRTINDKLFNKSTVRQLLHNDIYAGIIRRQKSYIPDPILGKKVINDGVLPQYIIEDAHEAIIDKETYELVLAEHRRRESMQNPTYPFTRKIKCGICGRSYARVAAAKETQCARWLCRSKKEKGMNCGSQSFTEPKLQEICAELMGTDGFDEQKFNEAVNSITVLDGGDVQMQFKGGETKTWKMPPKPVKVKKEKVLKIPHNLLDGKIFCGMCGKRYGRAISTTKDGGHLYWSCRAKHQHGITCDSVNYADTEIREIFCKVMQKKSFDDEFFTATVEKMVVQKTGSIDFYLKDGMVKHFETLKLRVNVHQSTSTDEFIGKIRCGICGNVLRRYCSYGKYHYWYCPGKSKVRTECNAQDLADCNLRTVSAYIMGTEEFDASEFAKQVKAIIVQKDGSLKYYFYDGSEKTWQKM

SEQ ID NO: 8767 - protein, 430 aa, synthetic construct
MKKIIMKKETIVAMPSITKVAAYARVSSGKEEMLHSLAAQVSHYSGYIQRQPGWHYVGVYADEAATGTKDNRPEFKRLLADCRSGGIDLVLTKAISRFARNTVDLLETVRELKSIGVDVFFEEQNLHTMSGDGELMLTILASYAQEESRSASENCKWRIRKRFENGELANLRFMFGYHIVKGKIEIDPEIATIVMMIFRDYIGGMGGGKLAKKLKQMNIPRPFNGEWCAERVIEIIKNEKYTGNALLQKKYVADHLSKKLVHNNGQLPKYYAECTHPVIIEQETFDTAHAILNSRRIKSETKNSTCNRYPFSSLLQCGLCGKKYKRKDRKGKVAWYCSTFLRKGKTVCPSKQVPESVLYSLGTEALGLEEFSADAFRKEISEILVPEPGKLIFVFHNGHTVEKLWQHKSRSESWTEEMRDTTRSLTKRRH

SEQ ID NO: 8768 - protein, 525 aa, synthetic construct
MASNIRVIPATIQRTSAQSMNPSAKRRTAAYARVSTDSEEQMTSYEAQVDYYTRYIQKRTDWVFSGIYTDEGISAVNTKKRDGFNKMVTDALAGKLDLIVTKSVSRFARNTVDSLSTVRKLKEKGVEVFFEKENIYTFDGKGELLITIMSSLAQEESRSISENVTWGQRKRFADGKVSMPYKRFLGYEKGEDGTPKIVESEAEIVRLIYQLFMEGRTSSAIAKYLAASGILSPGGKQKWQVATVNSILANEKYKGDALLQKRFTVDFLTKTIKDNEGEVPQYYVQNSHPGIIVPDEFDAVQAEIDRRKQLGRPAACQSPLSTKLVCGDCGGFYGSKVWGSNTKYRRTIWRCNEKYRGNTKCNTPHVTEEEVKVKFIQAFNSILEYREELIANCHLAQESICDYTDIDVELDALRREMEVVAELSRKAIYENAHTVINQEEWHERNNGYLERHRMASERVIELEEQKRERQRKSLMLDGFIQNLATCGKALETFDERIWMAAIDKVAVQSDGKLVFRFKDGTKIIR

SEQ ID NO: 8769 - protein, 504 aa, synthetic construct
MPDKYLMYLRKSRSDGEHESVEEVLAKHYKILQDYARAHLGGAVPEDMIYREVVSGETIQDRPEVNKLLARIQSEELDGVIVVEPQRLSRGDLSDCGTIIRAFRYTSTPIVTPTKTYDLTDKFDRKFFEMELMRGNDYLEYIKEIMLRGRLASVNEGNFIGSVAPYGYDKVKDGKANTLVPNSEADTVRLIFELWTKEGLGTTTIANRLNALHIKPRKTELWSTASIRDMLKNPVYIGKIRWNWRKTVKKYEDGEIIASRPKSAPDQWLLVDGKHEPIISEEIFNASLDRFGKLPKVKAKSGLNNPFAGIMHCSCGRPMIYQPHKKCEDRLHCAYQMHCGNRSATYNEAEEEVIKALRKLAADMKKMLDNSSEKLPSAHEAVSKNLKKELNALETQQERLYEFLEQGIYSSDVFVKRNASLAKRRQELQEAIAEAQSQEISVTDYKQKYIALQEAIAVLEDKAASAEEKNRLLRLSIKDIVYHRETAVRDKWHPVPFSLEISLV

SEQ ID NO: 8770 - protein, 518 aa, synthetic construct
MSRTAANTPVTFRCAIYTRKSTEDGLEQEFNSLDAQREAGEAYIASQKSEGWVCLPDHYDDGGFSGGNMDRPALQRLLADIEAGKIDCIVVYKVDRLSRSLIDFSKIMEVLERHKVSFVSVTQQFNTSTSMGRLMLNVLLSFAQFEREMISERTRDKIAATRRKGKWTGGMPLLGYDVDTRGGRLLVNEEEAARVREIFELYLDRQSLITTAAELERRGWTTKRWVTKKGREMGGKPFGKNNLFKMLTNRIYLGKITYKDEVHEGEHPAIVDEEIFERVQRMLKRNGRTGGAHVKNRHGALLKGLVRCVTCDCAMAPAHTVKNGTKVYRYYCCTNAQKRGWHVCPTPSVPAPELERFVIEQVKVIGKDTDLLAETLAESRRQREEAIGKLEVEKRALERELQRHNNELRKLAGKDGLATDRMADIQDRIRTAEQRATQVREQIIALSRELVDAREVGEACSLFDPVWETLSAREQARILHLLIERVDYDGPNGKVAITFHPTGIKTLADELSQQEAKV

SEQ ID NO: 8771 - protein, 525 aa, synthetic construct
MARTITMIPATVTSRFSNLAVSVPKQRRVAGYARVSTEKEEQQSSYEAQVDYYTKYIKERPDWDFVFVYTDEGISATNTKKRDGFNQMIKDALDGKIDLIITKSVSRFARNTVDSLTAVRKLKAANIEIYFEKENIWTFDAKGELLITIMSSLAQEESRSISENVTWGWRKRIADGKVSMSYGQFLGYAKGTDGTPQIVPEEAEIVRLIYTMFLQGKTPTAIAKHLTAQGIPTPGGKERWQCNVVESILTNEKYKGDALLQKTFTTDFLTKKMKPNEGEVPQFYVTDSHDGIINAEDFDMVQAEFARRRALGRSYNCMSCFSAKLVCGDCGGFFGSKVWHSTDKYRRVIWQCNSKFKNDEKCTTPHLTEDEIKERFIRAWNDMQDITDEVILECRLALTELFDSDAIDDEIAAKNAEAEVLIEMNRKHIAKNASTAQDQKTYKKRQDELVSKYNAVAKRIDELKTEKEKRKMQRTVLTAFVDTMEQQRESLTEFDESLWLAVVEKATVYNGGRIVFILMNGTEIE

SEQ ID NO: 8772 - protein, 430 aa, synthetic construct
MANSRITQIEFTQRDHFSSKRVAAYARVSSGKDAMLQSLASQVSYYSDLIQKHCDWEYVGVYADEAKTGTKDSRESFQRLLSDCRAGKIDMIITKSISRFARNTVTLLSTVRELKALGIDVFFEEQNIHSLSADGELMLTILASYAQEESMSASENQKWRIKRNFEAGKPWDCTILGYRAKNGVFEIVLEEAETVRLVFKWYLDGLGRQAIANRLNELGVPTRFEKTWHQDTISKMLRNEKYAGDLLLQKTFRTDHLTKQTRINHGELPMYHVQDAHEPIIDRATFEAVQQELARRTESIPIKSGSATAFTGKIRCGICGKNYRRKTTHTGIVWVCATYNTKGKKYCASKQIPEETLKAVTAETLGCDSFDEDAFSERIAFITALPNNTLEFTFADGHSEKAAWEDRSRRESWTADKRQAAREKATRRNG

SEQ ID NO: 8773 - protein, 548 aa, synthetic construct
MKETTAAARFVLYARKSTESEERQVQSIEDQTRLCRDLARREGWRVVREITEARSARKQGARPGFAEVVAMLERGEADGVLAWHPDRLSRNAVDGGWILDLLDRGRLRHLRFVSYTFENTPEGKFMLGMLLTKSKYDVDKLSVDVRRGMDSKRRLGHFPHRAPEGYVNDLATRTIQPDPERFPVLRQAVELVLAGAVKPPQVLRALNDEWGYRTKKTKKSGGGPLSRAAWYRLLTSPFYCGECREKGDTYAGSHRPLLTREEFDRIQALLGRAEKPRQVRHRHPLSGLIRCGRCGCMVTATISKGHTYYHCTNGRGTCDRKGVREEVLLSQVEEKIAAVSIPEWTEPVLMEAVRRFAEAESGKKREVKSNRSQTLEGIERQRQALVGMRLRELLSDEEFVREKARLAEEAARLERAEADAEGERERALAAAEGVISYAAWARKSFAGAGADERRRLAGLLGTNHCLTGGNLLLEVNPALTYLAAQAAKIEAFKPTENGSGKAKRTVSYEKVLHGWACETAVKLCSLLASRPGQSQACQPADDALDYEP

SEQ ID NO: 8774 - protein, 689 aa, synthetic construct
MTDHQPNDRGLSYNSGGQIAAPVERPEGLDFLPVQSDHPRAGLEPDPAGPLSAKEGGSLSMSEATINKPRVTDVAGLEHLAKPRPSRSGRGTVSREAIADGCAVLYLRVSTTRQMNTGADVDEDGNSIATQREWVTSKANKLKAPIVEEFVEPGQSAQTISKRPIFRQMLEYLDEHPEVRYVIIYMRSRVFRNFTDAAITKRALLEKGVRLISAKEEFGEGYMADAMEAITDIMNEVQVRMSGEDIKIKMRHKVEQGGTVGMAKLGYLNVPKLHEGRRMNTVEIDPERGPLIQRAFELYATGEYTVRALQEELTTQGLTTRPTVRYAAKPISHSRLSALLSDPYYVGVIRYKGELYPGRHEPLISKDLFLKVQDILRERVHNTSRERVNHHFLKGLLYCDRCEKAGRSSRLIFTRARGKAGELYDYYLCRGRQQGSCDLPHLAVSQVEDAVMRAVGAQRLDPEFAQVLDDEIGLALDIGQEGDRARREHLQREIKKLTVKEEQLFDLAADERLRSQNLKDRLLKISLERGRLEEQLEMTDATAARGAAALRSTVELLKVPSGYYRAADSTMRRQLIETFFDRLFIDTDYEVTATGSEQPAVREIHHAEAAFRAGEEPVARTSESPRPQTGAILESNVAQSLAVLLLTGCSSKKQLVPLEGLEPPTLSLGRSCSSIELQRLTARVYRAAA

SEQ ID NO: 8775 - protein, 525 aa, synthetic construct
MKKITVIPQTINPLTLTRFDSTAKRRVAAYARVSTDSDEQMTSYEAQIDYYTHYIQANPEWEFVKVYSDEGITGTNTKNREGFKEMINDALNGEIDFIITKSISRFARNTVDTLVAIRKLKEKRVECYFEKENIYTFDSKGELLITIMSSIAQEESRNLSQNVTWGIRKNFSDGKVMVPYKNFLGYRKGENGRPEIVPEEADVVRRIYRMYLSGKSTAQIAEALMNDGIKSPAGKDKWLRQTVQSILKNEKYKGDALLQKQFTVDFLEKKTKVNEGEVQQYYVENSHAAIIDPVEWDMVQDEFERRANLGKQFSGSHVFASRIVCGDCGGFYGQKVWHSNTKYRSYRWQCNKRFTNRKDGDPCDTPYLTDETIKASFIKAFNKLNKNNVINHCLEIIAILDNLDELNTLISEQTIEVEVVAKMVKALIEENVTTALEQDNYRIKYNQLERRYQEVQDKLNKLLNEKERKITQKIAINNFLESYKELPEILTSWSDDIFILMVDTVIVDNNGTMKFLFKSGDRVRV

SEQ ID NO: 8776 - protein, 447 aa, synthetic construct
MNPTKSEYVNGGAGKMENIKIKKVKHKRKLERKKNVAAYARVSTNKDTMLHSLSAQVSYYSDLIQRTPGWLYAGVYVDEGITGTKSARPKFQQMLEDARAGKIDLILTKSISRFARNTVTLLETIRELKSLNVDVYFEEQRLHSISENGEMIISFLASYAQEESRSVSENMKWSIRKGFKQGLAWNTKVIGYQFNKGTFVIIPDEAKIVQEIYNLYLSGKGKLTIAKILNERGVLTKTNKQWRPSSVGYVLQNYLYTGNLLLQSTYKDSFITKQKTINDGVLPKYHVENNHEAIVDIDTFNKVQAEIKARQEVRKPQQAGNTPTIYKGLLVCGHCGKNYRRKKTKDKAYWMCATYNMLGKGHCPSQQVPEEILNEIVAKTLGIKILTNETLKKKVSSIVLSNDQSITINLINGGVVTKFWQHKSRRESWTEEMKEQARVKAKKGQNQ

SEQ ID NO: 8777 - protein, 499 aa, synthetic construct
MRIVIWARVSSREQSQGYSIDAQLRACRDRALKNGWTVLREFVVAESAKRGVERAAFNEMLKWVRDNARKEDISAILSHKLDRVCRNMRDAVRLQEMEDVCGVLLAFVDNQFAPGAAGALSFNVMAAVAQYYSDNLRSEVLKGMDEKVRQGWPTGHAPYGYVNVADRDEPVQPHPVDSKTLARLFELFSSGQYTFKGLAKRMHDDGYVYRPSTPRFNRSSLSHIFANRFYAGELIRNGQVYPGRYRLVVERRVFDACQDILKGKSRRTGNPAIMLSGGLLRCGICGYAITGEHIRRKLRNGDCNVHVYYKCGNNQMHDDHPPVRWREPDVERMIVADLDSFRIPASDAQSWLSDLIASKFADLGAAAYERRTRLTKRRTELVGMQDRLLTAFLQRVLDEAVFNAKGADLKSRLAEVEAQLEAADMATEDDGRLALSVSDFSQDLAAVWVRSVASDRRALLECISSSRCLTDSSLMLVMRRPFDLLKDGVRRVSSKPAST

SEQ ID NO: 8778 - protein, 429 aa, synthetic construct
MPPLDTPLKYCLYARKSTESDERQVQSIDSQVKEMLQIAERENLEIVDIRRESKSAKDSGNRPIFKELLKDITEEKFNAILTWAPDRLSRNAGDLGSLVDLMDEKKLMSIRTFGQTFSNSPNEKFLLMILCSQAKLENDNRGINVKRGLRARCERGLWPTCPPTGYFKEKRVDHKGQCLVDPDRGHIIRQMFEKVAYEKWSGRKLYNWLRFDLNFRTALGKKHLSLGNIYRLLENTFYYGPFEYPRGSGNWYQGKHEPLITKELFDLVQDQMKNSQLVRRENIEFAFTKIMTCGLCGSGISATEKFKKLKNGGYNRHIYYGCTKAKDKNCKCGYISEEDLIKQLQKQIDKLDFKKLPVQDKIEGEIKRFKKFQMMATGKNQNIDVSEVDVKNYIKFLLKEGDDQEKRELLTYLNGEIKLSNKEIIIEAN

SEQ ID NO: 8779 - protein, 524 aa, synthetic construct
MSKTTEKPPTVRCAVYTRKSTEDGLEQEFNSLDAQRQAGEMYIASQVSEGWVCLPDRYDDGGFTGGNMDRPALQRLMADIEAGQVDSIVVYKVDRLSRSLIDFSKIMDVLERHKVAFVSVTQQFNTSTSMGRLMLNVLLSFAQFEREMISERTRDKIAATRRKGKWTGGYPMLGYDVVENGGRLRVNEDEAARVRDIFELYLDRQSLLTTSTILEERGWRTKHWTSTRGREMGGRPFDKNSLFRLLTNRVYLGKITYKDEVYDGEHPAIVDAEIFDRAQHLLKRNGRTGGAHVKNRHGALLKGLVRCVTCDCAMAPSHTVKRLSDNGGKVYRYYCCTNAQKRGWQSCPTPSVPAPELERFVVDQVKSIGRDTNLLNETLVECRRQREEAIGTLETEKRTLERELGRHNADLRKLIGKDGQATDRLADVQERIRNAEQRATEVREQILALSRELVDAREVGEACALFDPLWETLSAREQARILHLLIERVDYDGPNGTVEITFHPTGIKTLADELKRQEATTCDR

SEQ ID NO: 8780 - protein, 514 aa, synthetic construct
MAMSTRRAAIYIRRSTEEQSEYSTEAQERQCRSYAEILGFEVYRIYIDDDYSGRRADRPSFNEMIRDAHLKRFSCIIAHKIDRLARNTALLLKLVEDMEAIGVGVLSVSEQIDFRTPMGKVSLAMLASFAQYYSDNLGTETKKGLQEKAMQGGWVGPVPYGYERDGSTLRPSNDAPAVQLIFSLYTSGSHSYTSLADELNQRGWRTLDWKTGERGLFGRENIRYILRNKAYIGMVSINDQEYPGKHPALVSKETFELAQSIREHRTHKKARFSVGLPETGGLLTELVWCAKCGERMWRHTSAGDGNRKRRIYYVCSGRSRRTCDAPFVSAQVVEDQAISILQQLAIPTDWRDRILTIAEGMIGATQEVKVISPEQIDEQKRRLSLAFSLGGIDEATYRRQLESLQALKTARPKTVSQLDLVSAVNTLTTIGDALKQADPEMQRLLIRRIISKFWLSRGKEETNSIEAITPTGAYAPLVEATTSMLSMGWLMGLDLAYSPTFRPFWNTYREPIVL

SEQ ID NO: 8781 - protein, 536 aa, synthetic construct
MAKITKIEPQIPALPTRKKVAAYARVSMETERLHHSLSSQVSYYSELIQKNPEWEYVGVYADEAITGTIAKKRDEFKRLIADCDAGKIDIVLCKSISRFARNTVDLLETVRHLKELGISVRFEKENIDSLSGDGEVMLTLLASFAQSESESISNNVKWGVRKRMERGIPNGHFRIFGYRWEGDQLVIVPEEAAIVKRIYQNFLDGKSRLETEREFAAEGITTREGCRWVDSNIKVVLSNITYTGNMLLQKEYIADPISKKRKKNHGELKQYYVEDTHEPIIDMETFQYVQSEMARRKELGALANKSLNITCFTSKIKCEKCGKSYVRNTRKNRAKVSQLGDQLVGWVCGSSKTKNGKCKAMEIPEYILRQKCAEALGLEEFDEDAFAEQVEVITVPEQGILNFHMADGTEKTLTWVSTAKKDAWTPEARKKASSYRRNHAMKRDDVTCFTSKIKCADCGNNYRRQTRTKASGEKYHLFVCATTNTCSNNCIHEDTLRELTAQALGQQELDEAVFLKEIDHITIAPGGHITFCFYDG

SEQ ID NO: 8782 - protein, 511 aa, synthetic construct
MAAMNLPFMDENSRYDVRVVAKYNRKSRGDSEEDLIKHDYILTEMCKRHNWKFVDYPEIGSGDSIELRPVFQRLLQDIEDGLFDAVVVVDWDRLGRGDMGDTDRIKKALQKSNTLVITPSKWYDLNDDDDDFNVDAKAFIARQEYKMIKFRLSRGKKIGARLGRWTNGTPPFPYDYDPMRKGLVVNEQKRIVYRFIIEAALDGHACEEIAWELNKQGIPSPRNKKWTGTTISRLLRDETHLGKIISNKSEGDGHAKKRPNAKKWRKIPKHLWVIVENCHEPVKTQEEHDKLMYLLMKRRKVPTAARAGKHALSGLIRCAICGSVMQIYKTTTKVPQVRTCQHHDHYGNKCRNKGGSAEIIINEIQVKLKQFEEQILSKIESVEGDESKILRDSIQQKYREIKKKEEAIERLEEGFEAGLYTAERARQRKIKLEEELNALHEELGVLEKRLKSQESVTNEERLYYIRYFWEQMRNSKTMSDLELNQCYKEIIDSIIWKREDNGPPSIEINFL

SEQ ID NO: 8783 - protein, 437 aa, synthetic construct
MTKKTVTKVNALPKLASKMRVAAYARVSSGKDAMLHSLSAQVNHYKKLIHDNSEWSFAGVYADEALTGTKDSRLEFQNLLEDSRAGKIDMIITKSISRFARNTVILLETVRELKSLGIDVFFEEQNVHTLSGEGEMILTFLATFAQEESRSTSENMKWRIKKDFEQGILWGGKPCLGYALEDKRFIVIPDEAKIVQQIYQLYIAGYGADTIGKILDERGIIPKNSAKWNRSSIMTILSNYNYTGDLILQKTFRENHLSKRKIINSGELDQYAVKKNHEAIISKDLFDKVQEIRKQRAERIKPRINKKPQAFKGMIKCGICGRAYTHKTTPHNEIWKCSLSVTKGIEACPSKQVPDREIKKAAKTILKIRSFDEEVLKSKVKQVLVMPENKLIFQFKDETSVEQSWNKSSRSEAWTPEMREKAKQRALKQHQGGVHHG

SEQ ID NO: 8784 - protein, 527 aa, synthetic construct
MAKVTVIPSTIHPLTQMPLNQMAVKKVAAYARVSTNSDEQYTSYEAQVTYYKKFIEDKPDWEYINVYADEGISGTNTKRRVGFNKMIADALNGKINLIITKSISRFARNTLDTISYVRKLKDNGVEVFFEKENLWTLDPKSELILTIMASIAQEESRSISQNVTWGKRVGFQQGKVSFAYKSFLGYKKEDEKIVIDEDQAEIVKMIYKMFLVEGKTATGIANYLKSKHIKTPTGKTTNWTKNTVNSILTNEKYKGDALLQKTFTENYLDHKMVKNNGQIPQYYVENSHPAIIDRDMWELVQIEIERRDKIGAKYSSSDVFASKLICEDCGGFYGKKKWHSNSKYSRFVYQCNNKFHKHKDKCRTPNLAEEDIKLKFISAYNLSMEDKERIIQDSNEVIELLTDTTKIDDEISSINDELIITAELVNKLVKENSKTSISLDDYNKKYDELSNRYEKLQTKQEELLKVKSNKQGQALKMKSFLANLSQSEDKLDDWNESLWMLMVDRATVHRDSSITFRFQNGNDATIQ

SEQ ID NO: 8785 - protein, 409 aa, synthetic construct
MKITVIKPEDVKKGKKRVAAYCRVSTFKEDQEESFDSQVAYYKKLIGNNLNYEMAGVYADQGISGTKTENRPEFKRLIDDAMAGKIDVIYCKSISRFSRNAAQCQEIVRELKTKLVEVIFEREQLSSFNPMSEMVFNFLTILAQEESRSISENTIWALDKLAERGIRRIGSHAVFGYKEVKGVLTPNEYAPAVKMVFEEYAAGTPVKDIIRYLEQMGCTKLKAKGKKFNHHDISRMIREIIYKGDRLIQKKPHPNYLTHKPDYTREFNQYYIEEAHEPIVSKELWDKCQVELLRRAKLTHYKLPKERLPVAFRHDSHQLFGRIICADCGSPYERVTQQYKGKSRKVWRCKKKNGECHNHSIDEAKIIEALNGEDYEFVDKVFVKPTGDVEVTFKKRYFPLFQTASIECE

SEQ ID NO: 8786 - protein, 531 aa, synthetic construct
MAEKDIEFVVEVSPLDETVEVYRRKAEETDCFSQGFKPKRVAAYCRISKNVELMQTSLKTQVEAFQKYISEKPEWQLVDIYYDRGISGLSTRKRSGFQRMIDDCQAGKIDIILAKSVSRFARNTVDTLKYVRLLRDMGVTIRFDKEKIDTADLISEMLLSVYAAFAQEESLSISENVRRGFRQRFLTGTAKYFKVYGYYPDPEDKTKWHINEDEAKVIREIFSKFINGVSVGQMRKEFMERNIPAPECGKWYASSIFVMLKNERYVGDFLMQKTVIVDVFNHVSKPNNGIAPMYLKKDHHPPIVSREDFELVQRMMVLRYNEAGYHQYPYYDYMRCPKCGKQMVQFLNLHPRYPACWICSDHKNCTSLYVMNRYVDDAVRKAIETMDDSDSGYDGFVKEAKRHLSNGGAVELVHLRKLIGKIDIIDSYTALRITYAKGGKYVYRIRFVRPTDHPDPKVENIDGLVYINGIHYLNKIDVKICKAIKEIRRFCKEIEIVSPKDEGDVFRVKTDRRTWMKQAKEDKDEDNGHKA

SEQ ID NO: 8787 - protein, 566 aa, synthetic construct
MLSGQSNYIVEKSSLDDTVEVFRKKITTSTDIESKSYKPKRVAAYCRVSKNIELQKTSLETQIDSYQRTIAERMDWQLVEIYYDRGITGTNASRRPGFMKMIEDCKEGKIDLILAKSISRFARNTVDMLEYTRMLKRIGVSVYFEKERIDTGDLTSEMLLTVYAAFAQEESHSISENTRRGYRQRFQMGIPKYNKVYGYRSDVDDKNIWFIEESEASVIREIFHRYLRGERIQKICDDFNARGIPSPNGDTWYQTSMGMILKNEKYVGDVTMQKTVVTDLLNHVSKPNKGLVPMYRKKNHHEAIISRDDYETVQRMLVLKDVHHGSQQYPYYDYLKCPHCGAQMVQFMTNLPNAPTAWICKDHKTCRHNAILTKYINRAVIKAINELPSCLSGYEDAIRDAKENFARGGSVELYFLKKLIEKIEISEDYESIIITFKFGKEYTEKFKFDRPSEHPNPIIEYKGNRLFINGRFFQPREGLRVTECITKVQLLNKNLEVYLPDGGDGVFRIDNSKSGRSNWKKRFEAKEAGNSETAQGEVPFDSDASKQNRFGIGGKRTMHMGTNEPF

SEQ ID NO: 8788 - protein, 524 aa, synthetic construct
MSKTTETPPTVRCAIYTRKSTEDGLEQEFNSLDAQRLAGESFIASQKSEGWIALPDRYDDGGFTGGNMERPALKRLMANIEAGQVDCIVVYKVDRLSRSLIDFSKIMDVFERHKVAFVSVTQQFNTGTSMGRLMLNVLLSFAQFEREMISERTRDKIAATRRKGMWTGGCPMLGYDVVEKGGRLRVNEDEAARVREIFEMYLDRQSLLTTSAILEARGWRTKHWVSTRGREMGGKRFGKNSLFKLLTNRIYLGKMTYKDEIYDAEHPAIVDAEIFERVQLLLKRNGRTGGAHVKNRHGALLKGLVRCVTCDCAMVPSHTVKRLSDNGGKVYRYYCCSNAQKRGWHVCPTPSVPAPELERFVVEQAKGIGRDTNLLAETLTECRRQREDAIGRLEVEKRTLERELQRHDAELRKLAGKDGQATDRMADIQDLIRNAEQRATEVREQILALSRELVDAREVGEACALFDPLWDTLSAREQARILHLLVERVDYNGPKGTVAITFHPTGIKTLADELKRQETTTCKA

SEQ ID NO: 8789 - protein, 523 aa, synthetic construct
MREGLRSRDDETLRRCAVYTRKSHEDGLEQDFNSLDAQREACEAFIRSQAVRGWELASGHYDDGGFSGGTMERPALKRLLKDVDAGAVDTIVVYKIDRLSRSLLDFFRMVELFEERGVSFVSVTEQFNTTDSSGRLMLGILMSFAQYEREIAGERIRDKVAAAKRHGKWCGGPPPLGYDVDRPNKRLVVNEEEARIVRRIFRRFNQTGSTLQVVRELNADGLTTKAWVTKKGKRREGHAWDVPAVGRLIRNRLYTGELEHNGNVYPGEHEAIIGKELWERTGELLSENHRTRRMTGRLTTDSPLRGLIRCGHCGCAMSPTYTKRHGRQFHYYLCKTAHRRGAGACPVSRVASGEIEKVVVEQLGAVFRTPALVAKTFMAARAQEDEERERLNAKREHLKNELSGVQDEAVELIRAGGAPARIMELNENASSIGTQLDQIERKLDGLGGERITEHDVAEAFGTLEELWEVLFPTEKHRLIHMLVERVTVWLDGLDLKLKAVGVTGLVADLTGYAEETRQRGGET

SEQ ID NO: 8790 - protein, 532 aa, synthetic construct
MKKALIFCRVSSKEQEETGYSLPAQKKLLEDYSREHNLDVDKTFSISESAGGDKQRKIFNEMLVYLVKHDIEILVVEKTDRLTRNHTDAVEVDKWINKDPNRQVHFVKENFILHKDSKSNEKFIWNIKVSVAQYYIDNLSEEVKKGQKEKLAQGWLPTRPPLGYRTIGEKGHRTHVIDDATKNFALKMFKYYASGEYSLYKLANKLYEEGLISEKGHKIPKSRIHEYLSDPFYIGMNRWNGKITIGSQETFIEKDLFEKVQLTLKGKTTPKINKHNFPFKSLIKCKECTGTITWEIQKGTNYGHCNHYRSCTQGKWAKEKDLEMQVLPSFEALKVRDARLLDWIKRALKETHTQETQQFTQVQDSLNKREEQIKKRLSALYDDKLDGKITEEFYSEKSQEYNSERAEIISQRKRLNAKDSNFYEKSVTLYDVAMKAGEIFQNAKEDKKRRLLRAVFANMKLDNCILSYDYSHPYEVLYKAIQETNSSKVSGNEQLMNNIFELKDFSEVKANKGFLGPECSTWLPRVDSNHEP

SEQ ID NO: 8791 - protein, 548 aa, synthetic construct
MKKALVLCRVSSKEQEETGYSLPAQEKFLKEYCQRNDMDVAKVFAISESATGKKQRQLFNQMMQFALKQDIKMIVCEKVDRLTRNFKDAVMIDEWLEKDEMRQVHLVKDALIMHKNSRSQEKLNWGVRILFAKNYTDNLSEEVKKGQKEKLSQGWLPTKPPMGYKTIGEKGHRIHVADETTKPLAIKMFKYYVSGNYSLEKLSTKLYEDGLRSVNGKKVPKSRIHEYLSDPFYIGMNKWNGKQSIGNQEIFIEKDTFNKVQLMLKGKTTPKLNKHDFPFKGQVKCAECKGLVTWEIQKGTNYGHCNHYRPCSQLKWVKEKDLETQVTPSITALKVKNERLLDWIRRALKETHYEESRQYENVSKSFNERDEQLKKRLGALYIDKLDGKITEEFYQEKFQEFTGERNDLVEQRKKLNTKDNSFYEKTTALYDVAQRGVEIYEESKEFRKRRLIKLIFKDMVLNSGKLDFAYTEPYKILRRAVEETNGSKIAENPTFMENIFELKDFSDITAKMKPLGVDCSLWLARWDDFRTMEIESYVFEEAQTILAS

SEQ ID NO: 8792 - protein, 554 aa, synthetic construct
MINYADLFCRVSSKEQELEGYSLPSQEKLLKEYCLQKGFGVGKVFAISESAGGQKQRKLFNEMLKHLEKSNTSVLVVEKTDRLTRNHSDAVEINKWIEKDSNRQVHFVKESFVLHRDSKSNEKLVWNMKVSIAQYYLDNLSEEVKKGQKEKLEQGQLPTRPPLGYRTIGEKGHKIHVPDEKTMHFVLNMFNYYASGNYSIIKLTKQLYSEGLRSINGRRVPKSRIHEYLRNPFYIGINVWNKKQYPATHETFIDRKVFEKVQQMLSGRNTPKYARLEHLFKGYIKCGECAGTITWEEHKGFEYGHCNHYKDCTQEKWVRESEVEQQLLPGFDALQIKNQRLMEWVKKALKTTHKTETEQFSSILEQLNAREQQIKVRLSRLYDDKLDNKVNEEFYNQKFNEYSKERSEIEDQRKRYNTGDKKYYELGSTLYDLAQKAKDIYISADMEKKRKLIRLVFADMKLNEGALTYAYSKPFQLLADAINGTNSSKLSETKRVLEKTFELNSLVDTKGNNDASVVARPLWLPLVDMFCNHKIDLSYVSVPSLEMLVGVNST

SEQ ID NO: 8793 - protein, 413 aa, synthetic construct
MSVKKIRVNKQKHKQRICAYIRVSTTNGSQLESLENQKHYFENLYSNRDDIDFVGVYHDRGISGSKDNRPNFQAMIENCRKGMIDIIHTKSIARFARNTVTVLEISRELKAIGVDIFFEEQNIHTLSSEGEVMLSVLASIAEDELRSMSGNQRWAFQKKFQRGELVINTKRFLGYDIDENGELIINPEEALIVRKIFELYLEGYGTHRIAKLLNEKGVATVTGAKWHDTTIRQMLSNEKYKGSVLLQKYFHDGVNGPKKLNQGELEQYLIEDNHEAIISMEDWQAVQVKLNSRRWQQGRNKTYKFTGLLKCQHCGSTLKRQVSYKKKIVWCCSKYIKEGKAACQGMRVPEVDISNWTVTSPVKVIERDRDGEKYYSYSGQESADQRSTSGQKESQCSRILPSVHRPRRTAIKL

SEQ ID NO: 8794 - protein, 519 aa, synthetic construct
MKKITKIEGNKVASIIKPKLRVAAYCRVSTGSDEQLVSLQAQKSHYETYIKANPEWEYVGLYYDEGISGTKKENRTELLRMLSDCENKKIDLIITKSISRFARNTTDCLEMVRKLLDLGIYIYFEKENINTQSMESELMLSILSGLAESESISISENNKWAIQRRFQNGTFKISYPPYGYDNIDGQMVVNPEQAEIVKYIFAEVLSGKGTQKIADDLNQKGIPSKRGGRWTATTIRGILKNEKYTGDVILQKTYTDSRFNKRTNYGEKNRYLIENHHEAIISHEVFEAVEAALNQRAKEKGIEKRNDKYQNRYSFSGKIICSECGSTFKRRIHSSGTRKYVAWCCSKHLKQITECSMQFIRDEDIKTAFVTMINKLIFGRKLILQPLLDALRGMSNSDNLSRIQELEKQIEKNAEQRELLVKLMAKGYLEPALFNRENNELQMEADNYMGQKEALIHALNGELSKVQEVSNLIKFTNKAEMINTFNEQIFNDHIEKIIVYSRVEIGFVLKCGITLRERM

SEQ ID NO: 8795 - protein, 560 aa, synthetic construct
MNAVIYARYSSDNQREESIDAQVRAIKDFATREGYNIIRIYADEAKSATTDQRPQFLDMMKDAESGLFQVVIVHKLDRFSRDRFDSAYYKRHLKKCGVRLVSVLENLDDSPESIILESVLEGMAEYYSKNLSREVMKGMKETAYQCKHTGGIPPLGFDVGPDKTYVINETEAEAIRLIFNMYADGHGYGAIIDTLNSKGYKTKRGNTFGKNSIHELLTNEKYIGTFVFNKASKMFNGKRNSHRLKPDDEIIRIPGGCPAIISNELWERVQARLKANKRASGAYSAKIVYLLSGRIFCGSCGGAMVGNRAKMGRNKTEYAYYGCSNRKTKRTCDMKAVNKAFIEEKVLDALYENLFADHVIDLATEMIYNHAATQNTEIPKQIATIEKQLGKVEIEIRNIVNAIAAGMFHESMKEKMDELEATKSTLRIRLEEAKLQQQTHSLSREQIRSFLARYRNIKEMPPEEQKKAVQVFVERITVYDDRIDMDILTIPSNSPSEKKNKKTASRPTGGYDETTQESGSGPLGSSLDLLVEAARHPSSPKSQQPLRIQISIPLDGYRRD

SEQ ID NO: 8796 - protein, 519 aa, synthetic construct
MKAVIYARYSPGPDQREESIEGQIRECTEYAEHHGITVVGHYADRGISGRTDNRAEFQRMLKDCEKRLFDAIIVWKINRFGRNREEIAINKVRCRKHGVKVLYAKEHIPDGPEGIILESVLEGMAEYYSANLAQDVKRGMKENALKCMSAGGTTLFGYRIGADRKYEIHPTNGPIMQWAFEQYDSGRSLTDIVNEMNARGVKSATGKRFTTNSLRTAFRNRKYTGVYIFDDVEIEGGMPALVEKDRFERVQRRLDMNRRAPARNKAKVDYLLTGKVFCGHCNAPMVGESGTGRGGKTYNYYKCGKAKKDHTCNKRSERKEWLEDLVVRETVEKVLVDDVIDMIAENVERIQEAERKDSDLQYHEERLAGTEKAIRNLLKAIEQGIFTPSTKDRLDELEQEKAEIENAILQAKSTARVTVTKDQVKYWLKRFQAGDINDPEYRQRLVETFVNAVFVYDEDSDQGNGDKKIVITYNYTGGQTTAIGSDLAQEYPPRLISFLSVKCEGVGTGRRAGLRIQCP

SEQ ID NO: 8797 - protein, 537 aa, synthetic construct
MKKRVCAYCRVSTDKDDQINSFNSQKQFFEEYIRKNEEWELVDIYADEGITGTSTEKRTEFLRMIEDVKYKKIDLILTKEISRFARNTLDSIYYTRKLKSMGVGVIFINDGINTLDEDAELRLTIMASIAQEESRRISQRVKWGQKRQMEKGVVFGRELLGYNLKDGVLTINEQEAEIVRMIFHKFTNEGKGTHVIARELYEAGIKTKRGNLNWSNTTILRVLRNEKYVGDLCQKKTITPDFLTHKKKYNNGEEEMVYIKDHHEPIISRELWEATQKELEKRTITKEQKSKYSNRYWCSGKIFCGLCGSRFVGRIKKLKNGDTYRAWRCQKAAEHGREKIDKWGNTIGCNQESINHVVLGEIIGYILKNIIVENKEEIINDLKSLIKKYEKPVKIKNTDTLLKQIESINTKKQKLIDSMLEGIISKQDMVLMNEKYDKEIEELKQKVKEIEEANINNQKQADRLKSYIDRLNEIVNDFDNCNPDELYKRTVEKVIIHKGKIIEVYFTCLVNPIKVRYSATGKLNYKIEVDWLNSEQF

SEQ ID NO: 8798 - protein, 523 aa, synthetic construct
MGNLKNITVIPARARVGNTVKAEDRPKLRVAAYCRVSTDSEEQATSYEAQVEHYTNYIKGNSEWELAGIYADDGITGTNTKKRDEFNRMIEDCMEGKIDMVITKSISRFARNTLDCLKYIRQLKDKNIPVFFEKENINSMDSKGEIMLTIMASLAQQESQSLSQNVKLGFQFRYQQGEVQVNHNRFLGYTKDENKRLVIVPEEAEVVKRIYREYLEGASLLQIARGLEGDGILTAANKRKWRPETLKKILQNEKYIGDALLQKTYTVDFLSKKRVVNNGIVPQYYVENSHEPIIPREIFMQVQEEMVRRANLQVGKSGKRRIYSSKYALSSIVYCGECGDIYRRVHWNNRGCKSIVWRCVSRLEERGSDCSSRTINETTLQEAVVKAINEVLGSKNTFLPILRENIETVLGEDNDQTTQEIECRLNELQQELLRLVNAKADYQKVADEIYRLRELKQNILAENAEREGKRERIEEMMKFLHEQSVELQEYDEQLVRRLIEKITIYDEKLIIEFKSSVEIDVEV

SEQ ID NO: 8799 - protein, 519 aa, synthetic construct
MKKVRKIEPNSKIIKPKLRVAAYARVSTDNDEQLISLEAQKTHYESFIKSNPDWEFAGIYYDEGVTGTNKENRSELQRLIEDCENRRIDFIVTKSISRFARNTIDCLELIRKLSDLGVFLFFEKENINTQSMDGELMLTILSSLAENESISISQNNKWSIQRRFRNGTFKLSSPPYGYDYEDGVLTVNEEQAAVVRRIFSEALSGKGAQKIADDLNADGITPKKAVLWNASTILGMLSNEKYTGDVVLQKTYTDDHFKRHRNNGEKDQIMIRRNHEAIISHEEFDAVNELLRQRGDEKGIEKGNGKYQKRYPFSGKIICSECGSHFKRRIHSYGGRKNIAWCCSKHIHDTAKCSMRFIREDDIHQAFIAMINKLIFGHEFILRPLLKSLRSINYSENLTEILELEQKLEENMERSRVLTNLLTKGYLSSSLFSEQSNELRAEAAMLKEKKKALSRSVNSGMTAITEVEQLLKWASKADMIDGFDEAIFSRYVENIIVYSQEELGFKLKCGLTLKERLVR

SEQ ID NO: 8800 - protein, 521 aa, synthetic construct
MAVNKNVMIIPAIKRVGNNRKEDETPKLRVAAYCRVSTDSDEQASSYEVQIEHYTEFIKKNSEWEFAGIFADDGISGTNTKNRDEFNRMIDECMAGKIDMVITKSISRFARNTLDCLQYIRKLKDKNVAVYFEKENINTLDAKGEIMLTIMASLAQQESQSLSQNVKLGYQYRYQQGEVMVNCSRFLGYTKDENKRLVIVPEEAEIVKRIYREYLEGSSMDKIKKGLEADGILTGAGKKRWHTSTIRKILSNEKYIGDALLQKTYTVDFLTKKRVVNNGIVPQYYVENNHEAIIPREIFMQVQEELVRRSRGHISTSGKKRNFSSNHVFSQIIFCGECGEIYRRVHWNNRGKKSIVWRCVSRLENTGLACHSRTVLEDMIGIATVDAINKLIGQKDGFLLTLKENIETVISETDNNVVSEIDKKLEELQKDLLRLANSKEDYNDIADEIYRLREERHKALAEEAGKKGSKQRLEDMEKFLNEQSTLLEEYDEQLVRRLIEKITVYDDKLTIEFKSGVEVDV

SEQ ID NO: 8801 - protein, 436 aa, synthetic construct
MERIIRKIKPQASMASKRKRVAAYARVSSGKEAMLHSLSAQVSYYSNYIQLHSDWEYAGVYADEALTGTKNSRPDFQRLLKDCRAGLIDMIITKSISRFARNTVTMLETLRELRQLEVDVYFEEENMHSIGGDGEFMLTILASYAQAESLSVSENCKWRIRKRFQAGEIVNLRFMYGYNIKKGEITVDHKEAEIVRMIFADYLSGMGCDRIAGKLNRLGLRTVRNNPWSGKRVADIIKNEKYAGNALLQRKYVTDHLSKKLVINKGKLPKYYAEGTHEPIIDLPTFQKAQEIMALRRENRNVKQNSANRYPFSGLIHCPRCGKNYRRVTYKGHAAWNCPTFIHSGKDACPAKQIPEPILVSLTAEVLGLEQFDEVVFRSLVKHMQVPEANKVIYIFHNGREVETVWQNRSRKFSWTEEARLEARDRALAYQKGVKI

SEQ ID NO: 8802 - protein, 531 aa, synthetic construct
MSVARAVTVIPAKVSLVSHTVKNISKKRVAAYARVSTASEEQLSSYEAQVDYYTRHIKANPDWEYVEVYTDEGISATSTKKRDGFKRMVADALDGKIDLIITKSVSRFARNTVDTLTNVRKLKDRGVEIYFEKENIYTFDSKGELMLSILSSLAQEESRNIATNVTWGLRKRFADGKVSLPYKRFLGYEKGEDGLPQIVEAEAKIVRLIYKMFLEGKTPSGIASYLTKKGIPTPSGKQNWQHSTVKSILTNEKFKGDAILQKMYTVDYLTKKMKVNEGEIPQYYVENSHPAIIPPETFELVQEEFRRRKAGGRYISGISCFASRIVCGDCGSFYGRKVWQSNSKYARTIWQCNRKFKDQDICTTPHLKEENIKKAFLEAFNSLIDNKDEILANYDGIIIQITDCKRQERELAKIDEDCAAIELLIQKLIAENARSVIEQSEYNRKYGGYVTRYNELQTRRQELNTDITMRQARRNQMKAFIKQLTKQEQLLTEFDEGLWAATLNAMVVKSEQEVVFQFKDGTELPWRMESK

SEQ ID NO: 8803 - protein, 400 aa, synthetic construct
MRTVTEITRRQKPLFLTTQLKVCAYVRVSTDSREQLSSLENQTQYYERLISSNPDYEYCGIFSDAGISGSKENRPGFLAMMEKARSGEIDLIITKSISRFARNTLMLLKYVRELRDIGVGIIFEEEKVHTLKAEGELLLSVLAAIAEEERKSVRGNVQWAMQNKCKRGEVMVDTKRLLGYDKDSKGNLVINEAQASIVRYIYQLYLEGISGYRIAQILNQNKVPTYTEKPWKSHRIVSIIGNEKYCGDCLMQKSYVADNGKQIINRGQMDKYFIQDNHPAIIERKDWEAVQIIRENRRKKTYPLSSMLRCPWCGATLIRVVQERKLVKWVCATYLHKGKKECLGIRITDEILEELIGDTSITEPMVVEGVNYGKARQKRSKENFRLIPAAQYSGFKSKRP

SEQ ID NO: 8804 - protein, 480 aa, synthetic construct
MAAYCRVSSGSEEQIGSLNTQVNYYEKYINDNPDYIFVGIYTDEGISGTDLKKRDAFNRMLQDARAGYIDMIITKSLSRFGRNTLDCLKCLRELKSLNVDVFFEKEKIHSLTSQGEVLLTLISAVAQTESLAQSENVKWGIRRKYERGNVKSIPSGKFLGYDKDQQGNLIINPAQAETVRRIYQEFLDGYGTFQIARRLTDEKVPMACGGKEWCASHIKKVLTNEKMKGDTRFQKTYNADYLTKRRAKNRGELPQYYMEGTHPGIIDRDMWECVQLELARQKRYCQDHHISTYHWSNEKHPLSARITCSTCGCTFMQIKSKKKGEEGKKYWRCSSIVGKQGAEIEGRTSTIIRPDRGSTKPYNIRRRKKPEERPMLCTDILIPAGEPELAFIKAWNQLVGERERYLPEWQHALDGNDLLKAYRTRELMRLVKQVGHIDAMPYDLMLKTLDHIEHGVDGSIKVIFLAGFMVDKGKIQIQLS

SEQ ID NO: 8805 - protein, 509 aa, synthetic construct
MIQAAPKTIRCAIYTRKSTEENLGLDYNTLDAQRDACEAYIKSQKSLGWVCLPDQYDDGGYTGGNMDRPAFQQLMADVEDGKIDCIAIYKIDRLSRSLMDFAQIMEVLERKKVSLVSVTQQFNTTTSMGRLTLNILLSFAQFEREIISERTRDKIAASRRKGKWTGGHQVLGYDLQQKPGGNCLLVNQEESYQVQQIFKLYLESGSIMDTLRALREKGIMTKQYSTKTGNSRGGAPFDKTTLHRTLTNVTYLGKVRHKDQVYEGEHEAIIDADTFHQVQGMLKRNLRSGGKYSSNKYNALLKGLVRCKHCGSAMIHHFVQKPNKRYRYYVCLKAQKQGWDTCPSPALPAAELEQFIVDQIKVIGKDLAVLEDCIKKTQAHMQEQIERLKDARSEKQKLIQELSQQIGEAAAQVGFDGTAAGRIELCQQQIKDIQVEMASLNSEIVSIQRQMLNPDELVGNLESFEPLWDAMRPRQKEKLIHLLIKQIEWDSETDNIFIAFHQTNIEVLN

SEQ ID NO: 8806 - protein, 528 aa, synthetic construct
MPKTTKKITTIPATLTRFTATPITEQKKRRVAGYARVSTDHDDQFTSYEAQIDYYTNYIKSRDDWEFVDVYTDAGITGTSTKHREGFKRMVADALAGKIDLIVTKSVSRFARNTVDSLTTIRQLKENGIECYFEKENIWTFDGKGELLLTIMSSLAQEESRSISENCTWGQRKRFADGKVTVPFNRFLGYDRGPDGNLVVNREQAAVVQRIYAMFLQGMTYNGIAQQLTDDGILSPGGKPKWNTSAVKSILSNEKYKGCALLQKTYTVDYLTKKKKVNEGEIPQYYVEDNHEAIIDPDTFEMVQREMEKRGKGRKYHSGVHTFSSKIRCGECGSWYGSKVWHSNSKYRKVIWQCNHKFDGDKHCSTPHLTDDIIQQAFLSAANKLLATKDTVIADGREMMAMLFDTTDLEREQEELQQETQVVSDMVQQCIYENAHVALDQTEYQKRYDGLTERFEKAKARLDAVTAEIHQIQTQRASIEDFLKAFAAMPDELTEFTLESWHGLVDYGTVYAADDIRFTFKNGQEVKA

SEQ ID NO: 8807 - protein, 578 aa, synthetic construct
MRKVSKIEPISPSLPTRKKVAAYARVSMESERLNHSLSAQVSYYSKLIQSNPEWEYAGVYADNAVTGTKSSSREEFQRMLEDCEAGKIDIILTKSISRFARNTVDLLETVRHLKELGIEVRFEKEHINSLSGDGEVMLTLLASFAQEEVRSLSENVKWGTRKRFEQGIPNGRFLIYGYRWEGDHLVVEPEEAKIVRLIYDNFLKGLSAEATEKQLEEMGVKSMKGMHFPNSSIRAILKNITYTGNLLFQKEYTLDPISKKTRKNHGELPQYFVENTHEAIIPMETYQAVQAEIARRRELGALANWSINTSCFTSKIKCGLCGASFVRNTRKNRAKTSQLGERYTFYGCGTNKRKGEHCSSGTIREDVLKDECAKALGLPEFDEETFSERVEKITIPTTGTMLFEFTDGSSLEHHWSRNAKKESWTAERRKAVSEYRRSRETGWKCYHTFTHFIKCGRCGGNYRCQTHKRVDGTVVRSWYCSSPTAVGCSKVGIREDTLKALIADVMGLPEFDEELFNQHLAYATVPADNQIVFHFRDGREVSRTFVQKRQMPRQTEERKKHMSEVMKAKWRERHAEND

SEQ ID NO: 8808 - protein, 532 aa, synthetic construct
MSEQKFIRAAAYARFSSDNQREESIEAQLNIIKNFAAQNGYEIVREYTDEAKSARTDNRPNFLAMIRDAEAGLFDAIIVHKLDRFSRDRYDFAFYRRILRKAGVQLISVVERFDDSPESVILESIIEGMAEYYSRNLAREVMEKGMLPNARACRHNGGRPPIGYRVNKDGYYEIEESEAEQIRLIFEMYARGEGYGAILDELARRGYLITRTGRPYSKSLLYDILNNEKYAGVYIYNRAASKNAEGKRNNRASKPSDEIIRIPGGMPAIVSRETWERVAERMRNNRHKGARNKAKRQYLLSGKLYCGKCGGAFVANTINSGKNKTEYSYYECSAKKRTRTCDMKAIGAQFIEDEVIKLLYSELFAPEAVNSVADEIVAYIQERDKGLSKRIKELEKQINTTEIEIRNIVDAVAKGISTDALLKRLQELEQYKADMQARLDDAKSKTDATSFTKEHIVAFLSSFQDILDAPFERKRLAIELFIDKVYVYENNFDADIVVPALRKLKESISKSEGKSSEAGVFGYEPLLVASTK

SEQ ID NO: 8809 - protein, 523 aa, synthetic construct
MGNLKNITVIPARARVGNTVKAEDRPKLRVAAYCRVSTDSEEQATSYEAQVEHYTNYIKGNSEWELAGIYADDGITGTNTKKRDEFNRMIEDCMEGKIDMVITKSISRFARNTLDCLKYIRQLKDKNIPVFFEKENINSMDSKGEIMLTIMASLAQQESQSLSQNVKLGFQFRYQQGEVQVNHNRFLGYTKDENKRLVIVPEEAEVVKRIYREYLEGASLLQIARGLEGDGILTAANKRKWRPETLKKILQNEKYIGDALLQKTYTVDFLSKKRVVNNGIVPQYYVENSHEPIIPREIFMQVQEEMVRRANLQVGKSGKRRIYSSKYALSSIVYCGECGDIYRRVHWNNRGCKSIVWRCVSRLEERGSDCSSRTINETTLQEAVVKAINEVLGSKNTFLPILRENIETVLGEDNDQTTQEIECRLNELQQELLRLVNAKADYQKVADEIYRLRELKQNILTENAEREGKRERIKEMMEFLHEQSVELQEYDEQLVRRLIEKITIYDEKITIEFKSSVEIDFEI

SEQ ID NO: 8810 - protein, 573 aa, synthetic construct
MSNNKVEVIEASLDRIDRKNSKEIKRLRVAAYCRVSTDSNEQLESYQSQVRYYKDLINSNENWEYVGVYADEAISGTQVRHRQGFQQMINDALDGKIDLILTKSISRFARNTLDILQYVRLLKDKNVAILFEKENINTLDMAGEMLLTILSSLAQAESESISRNVKLGLRMKMKRGELVGVHGCLGYDYDPETKTLTINEKEAEIVRYIFRRYVEGAGCFTIAKELTQLGFKTKNGNSTWHESSVRRIIKNEKYKGDVIMGKTFTVDPISKRRLENFGEETMYRIRDHHEPIIPREVFDKAQEILQKRSARHSNKGRGEKYSRKYAFSSLIQCGFCNSSFTRRTWHSGTKYEKITWSCVTAIKKGKKNCPHSKSIAEKDLESTFIDAFNLMISKNKQITEEFIKNVETTLSNSGTIKKLKEIEIKTSEIEKKIDNLMNLYLEGTLRKENFEAKYAELSNELEKVKVREKELQSIVNEEGDLKNRIAAFRKLFEDNKFLEEFDREIFETVIDKILVGKIDEEGVVNPYSITFVFKTGLEIEKKDIDNNLYLHSTHDTCGVHSVDTKGNYIEILR

SEQ ID NO: 8811 - protein, 574 aa, synthetic construct
MNAVIYARYSSDNQREESIDAQVRAIKEFAAREGINIIRIYADEAKSATTDQRPQFLDMMKDAETGMFQAVIVHKLDRFSRDRFDSAYYKRHLKKCGVRLMSVLENLDDSPESIILESVLEGMAEYYSKNLSREVMKGMKETAYQCKHTGGIPPLGFDVGPDKSYVINEWEAEAVRMIFEMFADGKGYSAIIDALNAKGYKTKAGKPFGKNSIHDLLLNEKYIGVFVFNKVYNKINGKRNGHKMKPDDEIIRIPGGCPAIVSQELWERVKKRLEANKRASGAYSAKAVYILSGRIFCGKCGAAMTGKRARMGRNKSVYSYYECSARKSKRTCDMKPINKEFVEQKVIDALYENLFCDEVIEAATDMIYKHAASRNTEIPEMIKKYEKQLQTVEFEISNIVNAIAKGMFHESMKAKMDELEASKAQLKIRIEEAKLQQQSHSLTREQIYAFLARYRNIKEMTPEQQKTAVQVFVERVTVYEDKIDMDILTIPGKGPGPDKNKKAASGNTDSSIDSKTPENGHSGLSGDSCTLMVEARGVEPLSETISTRTSPGAALILKFPQPNAQGQALDIGIL

SEQ ID NO: 8812 - protein, 572 aa, synthetic construct
MFNKSKNNKVAIYVRVSTHHQIDKDSLPFQKKELINYCKYILGIDEYEIFEDAGYSGKNTDRPAYQEMMSRIRNGEFTHLLVWKLDRISRNLLDFCDMYEELKKYNVIFISKNEQFDTSTAMGEAMLKIILVFAELERKLTAERVYGIMLSRAEKGLWNGSPVPLGYDYDEDTKYPVINEEEAKTVRFIFDTYEETRSTGEVKHRLELAGIKTKRNGTWTTKTIADIIRNPFYIGTYRYNYRYSPHGKIRPEEEWVIVEDNHPAIISKEQYEKCNAIMDSNIRARGVKRTDHIHVFRQLIECEKCKKNYIATVDRPRADGYRPSTYRCYNYVHSKKAYRKCKGTISEVKLGPFVINYIANLVKANEYINMYGAKGNEKQVEKILLHGPAFKDVVGIVPEDLTRTYNIMLSNTGDILFDRIDSSKEIEKDIEMQNLKAEKKKLERALKRLEDLYLFSDESMSEKDFLIRKHDLDSKINEVNNKIKKRSIEFSRELPGHDLNFIKKATQYLLAQNLVGDRPIKYNKLVKVVDKKLLQDFMQSIIKKVTVREDKTITSIEFVNGITHKFIYRDGK

SEQ ID NO: 8813 - protein, 518 aa, synthetic construct
MNKTTKSTIRCAIYSRKSSEEGLDLEFNSLDAQREAAEAFIASQKAEGWVALPARYDDGGYSGGSMERPALDRLLKDIASGGVDCVVVYKVDRLSRSLLDFARIMETFDKHKVSFVSVTQQFNTTHSMGRLTLNILLSFAQFEREIIGERIRDKLAAQARKGKWTGGAPILGYDVDRSGPSPKLAINTPEAQQVKEIFHLYEQHAALLPVVRELAERGWVNKSRITKKGKHLGGRPFDKASLHALLTNPLYVGKMRYKDELHPGEHEAIIPPEVFDRVQRQLKHNGRTGGAEVRNKYGALLRGLLRCRCCDSTMTHTFTSNNRQRMYRYYRCNRTIQSGQAVCSTGNLPASEIERMVIDEIHGLARDESLLKQVLEEAHATLAGELKELRQTQNDLTQQRERHHGELQKLTSQRQPSANATNRMAALHEQLLDIDQRLPTIEERITELVAQAISDKEARTVFSRFDDLWNNLTPREQARLLNLLIEKVEYDGKAGTVSVTFRPTSIRTLINHQLEQAA

SEQ ID NO: 8814 - protein, 413 aa, synthetic construct
MSVKKIRVNRQKHRKRVCAYIRVSTTNGSQLDSLENQKQYFEKLYSNRDDIDFIGVYHDRGISGSKDNRPNFQAMIEDCRRGKIDVIHTKSIARFARNTVTVLEISRELKAIGVDIFFEEQNIHTLSSEGEVMLSVLASIAEDELRSMSGNQRWAFQKKFQRGELVINTKRFLGYDVDENGELIINPEEALIVRQIFALYLEGYGTHRIAKLLNEKGVATVTGAKWHDTTIRQMLSNEKYKGSVLLQKYFHDGVNGPKKLNKGELEQYLIEDNHEAIISKEDWQRVQDKLTSRRWQQGRNKTYKFTGLLKCQHCGSTLKRQVSYKKKIVWCCSKYIKEGKVACRGMRVPEVDISNWEITSPVTVIERDGNGEKYYSYSGQESADQCSSSGQEENQGSRILSSVHRPRRTAIKL

SEQ ID NO: 8815 - protein, 430 aa, synthetic construct
MSTDQEEQLSSYENQVKYYREFISKHEDYELVDIYADEGISATNTKKRDAFNRLIQDCRAGKVDRILVKSISRFARNTLDCIKYVRELKELGVGVTFEKENIDSLDSKGEVLLTILSSLAQDESRSISENATWGIRKKFERGEVRVNTTKFMGYDKDDNGRLIINPQQAETVKFIYEKFLDGYSPESIAKYLNDNEISGWTGKANWYPSAIQKMLQNEKYKGDALLQKTFTVDFLTKKRVQNDGQVDQYYVENSHEAIIDKDIWELVQLELARRKAYREEHQLKSYIMQNDDNPFTTKVFCKECGSAFGRKNWTTSRGKRKVWQCNNRYRVKGQIGCQNNHIDEETLEKAVVMAVELLSENVDLLHGKWNKIIEENRPLEKHYSTKLADIINKPSWEFDSYEMCQALDSITIVEDGQITVRFLEGTEVDL

SEQ ID NO: 8816 - protein, 562 aa, synthetic construct
MGRRAVIYVRTSSEQQGEKCSPVEQEADCRQLADKQGLVVVNVYRDIERYRVKNKWVEPSGTRYDRPGLLAMLRDAADDQFDIILAWREDRLYRGMRVMLMVLETIQQHNLNIQLALESFDLATAPLKAWLAQVELDNIKERMTMGVKARLKAGKANSGQDRYGYKRIGERIEVVPEEAEWVRQIYAWYIEGVPATIMRRHLIAANAPQKETTANRRILWSISSIQGILASGEAYASGIKITRREGESFSMRADPILDKETYQRYLEIRQTHVRLPTGISRDGFLIRSLLYCPCQYKMQSSFSSSARRAAIEGQMISGNYVCRCQHDELLSPDCPRFINSRQADEDVWNQVCHVIKNPDALIEQARIMVDELRNSALTQSADQEHIERELDALASNRQWVITQARKGSITEQEMDRQLSEMSVQEVAMKRELFSAREIMDTSVIENWEPHVRQYLEDMLEGIAGLNRIPIDPQEERENQALKRHIIETLVEKVVVDRNQTFTVTIRLNLLQILEGALGQGGENGTDGHWPNGNPNSHFGSSIKKSGFQARMGLVRVSAIWQA

SEQ ID NO: 8817 - protein, 464 aa, synthetic construct
MKHRAVIYIRTSSEHQGEKSSPAEQESDCRTLADEKGLTVVKVYRDIEKYRVKNKLVEPSGTRFDRPGLVAMLNAAARGEFDIILAWREDRLYRGMRSMLTVLETVQEHKISILLARETFDPKIAPLRAWVAQMELDGMKERMTMGVKARLKAGKANTGQDRYGYRRVGDTIEIVEEEARWIKLIFAWYLDDVPLMEIRRRLIEANAPQKGSSRPRRIQWARSSIQAILKSAREYASGIKIQRRKGEAFQIPVKPILDPATYDRFLRLRESKKTHPVRNIKHDYLISGLLFCACNRKWVARTNNKRHNRKGELVERKTPIGIYYCPQFHHEYVSSDCPRSISSARADAQVWDKVCMAIDEPEYLFSQARDFVEQLRKSADNLDADQARLENEIKALAEERQWVITQARKGKFTAFDMETQLNGLTMQEVNLKRELSSLGQAISINALNDWEAKVEEYFADLQAG

SEQ ID NO: 8818 - protein, 562 aa, synthetic construct
MGKRAVIYVRTSSEQQGEKCSPVEQEADCRQYADKQGLVVVNVYRDIERYRVKNKWVEPSGTRYDRPGLLSMLRDAADDQFDVILAWREDRLYRGMRAMLMVLETVQQHNLNIQLALESFDLATAPLKAWLAQVELDNIKERMTMGVKARLKAGKANSGQDRYGYKRIGERIEIVPEEAEWVRQIYAWYIEGVPASTMRRRLIAANAPQKDTTATRRIPWSISSIQGILASGDAYASGIKITRREGESFSLHADPILDKDTYQRYLEIRQSHVRLPTGIPRDGFLIRSLLYCPCQYKMQSSLSSSSRRAAIEGGMVSGDYSCRCQYDEIRSPDCPRRVNSRRADEDVWNQVCHVIKNPDVLIEQARAMVDELRSSAATQSADQERIEKELDALVSNRQWVITQARKGSITEQEMDRQLDEMSLQEVALKHELSSVREIIDTSVIENWEPHVRQYLADMLEGIAGLNTIPVDPQEEKENQALKRQIIQTLVEKVVVDRNQKFTVTIRLNLLQILEGVSGKDGGHGNDGHWPNENPNSYLSAPIKKSGSQTRMGLVRVSGIWQA

SEQ ID NO: 8819 - protein, 629 aa, synthetic construct
MGSQVAIKAQLSTALAAPAAGGAAGAHKVAVGLCRCSTDMQDHSIKDQEAEIVAFCAKEKLQLVGLFKDEGISGSKIDRPGLNALRAFLATSPLKGTVVVWKRDRLVRPEDPLDGLLLEREIRVARWKIHYLAGSNAVGNPLVDSILGLVEHHAGGEYLRKLSQDSLRGQLRRVLSGEVPGAKIPYGYAKQVLDGSGKLLRTIPRGEKHRKMRGEVTRLVPGDAAEIDIVRWMFSEYAGGLKSLNKLAEELNARQITGPGGGVWRSASIHELLENGVYVGDRVWNKESSAKFFRLKSGEIQVQDAAHPSRTTGQTINYAPNGAEDHVVIPDKYPALVSREVFDRVQAVVRQRAEAFVGSEGVGGRWSQRCYVLTGLVYCANCGHRMTAIPTVSRGKQYHRYLCSGYQQARVCMPYWFAADVLERAVIQRLKQHLRLGEHPVDQLRPILVKAIQAQVGGPLSSLDQAALKRERGKLERQVEQALTNLAVVPAEIATQLGEKIKGWQARVAEIDRAVAAARDRTQQKLDVDRAADEAMAMIDQLDRLTEDVSREERRAFFLRAVERIELKFETQAPRAGGKHRKHRFVEGTIRTCAQLSIAGAAMGQGQIEPVLSLAAPPGRATGANTPPR

SEQ ID NO: 8820 - protein, 514 aa, synthetic construct
MSRRPPRSSVEPETRRVAIYTRKSTTMGLEQEFNSLDSQRESCLAYIQRQPGWKLVDERYDDGGFTGANIDRPAFTRLMADVEAGKVDVIVVYKVDRLSRSLLDFVKVMERLGAAGASFVSVTQNFSTADAMGRLTMNMLMSFAEFEREMISERTRDKIAGARRKGKWTGGPVPYGYSVKDKKLLVNELEARVVREAFDLFLMHRQQAKVAHLLNERMLLPRGSKVTKKLAWSKEGIGRILKSPIYAGFMMYGDELHPGEHPPLIDESTYRAAQAILAGTSRVVRWTGTNPDYVLRSLVRCALCGEMMCPGSTTKPSTGKTHRYYRCSRREKYGKDQCAGRPLPAAALEEFVVARISNATADGSLAERVAKHLETLTAGKGEDFGKLRAELATKIAECSANASRLTEELVRLDGRARELVEQKLGIEADRLAASEQQLRDLERDAAELEIARKDHAWFVAALRDFAKVWVNMSPDNQGRFLRALIDKVVVDEDKGTCRVELIDFGAASGTKEAA

SEQ ID NO: 8821 - protein, 537 aa, synthetic construct
MSRQYERNITPTHQSMENRRATVRCAIYTRKSTDEGLDQEFNSLDAQRESAEAYIASQRHEGWLCIADRYDDGGFTGGNMERPALKRLFADIEAGDIDCVVVYKVDRLSRSLLDFARIMELFDKHAVSFVSVTQQFNTTSSMGRLTLNILLSFAQFEREIISERTRDKMAAARKKGKWVGGMPVLGYDLDRKGGRLVVNEEEAQQVRAIYDLYMEHKALMPVVQELERRKWGVKKWTTQKGEERGGNLFNKSSLFRLLTNIIYTGNINYKGTVYPGEHERIVAPDLWQRVQDTLRHNGRSGSKEIRNKYGALLRGLLYCAPCGTAMVHSYTARKGKHYRYYVCLTAQQRGWASCPTKSLNAYEIEDAVVDYIRGLGANQEVISKTASQVRIQSEKRLAELETERRAHERELKRLDARLRALVGDLPSSGTDQGLATDQMADLQDQIRSLEQRMTVIREETIAVQRETLEDEDLEKALAAFDPIWQSLAPGEQARVIKALVERVAYDGRDGKVTVTFRSPGIKAVCLGQAALGKENRI

SEQ ID NO: 8822 - protein, 525 aa, synthetic construct
MARTITMIPATVTSRFSNLAVPVPKRRRVAGYARVSTEKEEQQSSYEAQVDYYTKYIKERPDWDFVFVYTDEGISATNTKKRDGFNQMIKDALDGKIDLIITKSVSRFARNTVDSLTAVRKLKAANIEIYFEKENIWTFDAKGELLITIMSSLAQEESRSISENVTWGWRKRIADGKVSMSYGQFLGYEKGADGTPQIVPEEAKIVQLIYAMFLQGKTPTGIAKHLTAQGIPTPGGKERWQCNVVESILTNEKYKGDALLQKTFTTDFLTKKMKPNEGEVPQFYVTDSHDGIIDAEDFDMVQAEFARRKALGRSYNCKSCFSAKLVCSDCGGFYGSKVWHSTDKYRRVIWQCNNKFKKGEKCATPHLTEDEIKERFIRAWNDMQDITDEVISECRLALADLFDSAAIDDELAARNAEAEVLIEMNRKHIAENASAAQDQKAYKKRQEDLVSKYNAVVNRIDELKAEMEKRKIQRTVLTAFIDTMEQQHGILAEFDEHLWLAVVEKATVHADGRLVFTLMDGSEIE

SEQ ID NO: 8823 - protein, 430 aa, synthetic construct
MANSRITQIQFAPRVPFEGKRVAAYARVSSGKDAMLQSLASQVSYYSDLIQKHCGWEYVGVYADEAKTGTKDSRESFQRLLADCRAGKIDMVITKSISRFARNTVTLLSTVRELKMLGIDVFFEEQNIHSISADGELMLTILASYAQEESLSVSENQKWRVRKNFEEGKPWDCTMLGYRVKDGVFQIVPEEAKTVRLVFSLFLEGYGKQAIANRLNEMGIPTRMNKSWCQATISKMFRNEKYAGDLLLQKTFRTDHLSKQTQINRGELPQYFVQEAHEPIIDRATFEAVQEELSRRAAAVTVNTGSETAFTGKIHCSICGKNYRRKTTPTGFVWICATFNTKGKKHCASKQIPEETLKAECAAILGTDGFDAAAFSERIAFITAQSNNQLEFHFKDGTAATTQWQDRSRRESWTDDKRQKAREKATRRNG

SEQ ID NO: 8824 - protein, 515 aa, synthetic construct
MDIQKEVTENQEQYIRFVANYLRKSRGEGTKDLDKHRSVLNELCEKNKWKYVEYSEIESGDSIAVRPVFQKLLKDIEDGLYDAVCVVDIDRLGRGDKGDQDRIQKTFMKTNTLIATPNKVYNLVDEDDEFVVDMKGFLARREYKMIVKRLSQGKKVGSKRGDWTNGTPPFPYEYERYKDAYNPKGLVVNEEKLKTYRYIIDCIVNEKISPGEIAWDLNRQGILSPRECQWHENTIYRIALDETHLGKIISNKTKGDGHIKKKPSSQPVEKLTKKEWVIVENCHRAVKTNEEHEEIIMFLNRKIKTPVRKTTVIKPLSGLIKCKKCGHTMNILTRSNRKTPECLKPCWYKDMYGNKCGNRGGSTQAIYDYIRIGLDEYEEELREEVSKDEGDEVSNIRTHMNKTLRDIELKEKALRRIQEAYEAEVYTISEFKTRKVIIDEDLVRLEDELREVSSQLKKESLITNQDRLNGIAVFKEKIKNDKLSDNEKNILYKSILRSLEWERIEDEIKIKANFI

SEQ ID NO: 8825 - protein, 475 aa, synthetic construct
MNAIYARVSTEDQARTGYSLADQVHQCRQKLINMGLTNIEEYIDDGYSGEFLDRPHLDRLRNDLRNKLITHIAVYDPDRLSRNLTNQLLIADEIEKANAQLMFVTGDYDASPEGRLFFSIRGAISAFEKAKIRERTMRGKRSKALSGKLVQNDELFGYDYDSENSMYMINPDEAEIVKLMFHLYTTRMYGISSLRAELKAIGVLNRKGNPFDSSTLHKMLCNETYAGTKWTFKTYDKTIAQKKRQKTARDQSEWIAVTVPAIIDQDTFNKAVDCRRLNKVTAKRNTKTEYLLQNIIRCDACGYAMRGVRYPRKDKEYMYYVCTAYVNNIDCNDSKSIPVKELDEAVWTEMQAAAKKKQGLNIFRPKDLQPVPGKSKMESQLAKLKKRQAAILKWVADGTIEIDAAEKDLQGINKEMNAIHNALGKIAEPSKAKEIDNDLFINAQTFEQKRYALLQSGIKVFARRENGTTSYAIRL

SEQ ID NO: 8826 - protein, 528 aa, synthetic construct
MISANAINDTEVVTEIAVRCAVIARVSLDRQSESVDNQVSLLREFVRSRELGVIPDDCIYEDVGVSASKFSIWQRPAMKRLLLDANTGKFQIILFKGISRFARNTQEALDVLDRLKAKGLRVISYEENYDSEKENSNFMFTMHAAIAEYEAEKIGIRVRLGNKEKSRSGKWVGEPPFGYLLKDRKLVVDESVRHVIQTIFNLYVKEGFGVFKVGQYLNLNSWFTKSGARWSRKTIANVLRNEAYIGNIVYNKTKLNRVRDYDSAIEGKKKWVRKANAEEEWIVANNAHEAIIERELFMKAREKLNIAGNPKRAANDARNAPNAQHPLTGILYCRKCGVNMVCQKRTVGGKVYRYYICKTYHKYGRTYCDQANVNAALLEPYVAEMLTIQLNEVANRQLLTNQITMKDAEAERLERELTELVRKSEKINRDTADLFLQRGNFIDGQYEHLQKRLKDDAIGLQERKKDIEKQLNEKINEETVSHEIMRNITEFLNVDRADTKKMRRLFGYFLDRIDVEGSHVDIFYRFDK

SEQ ID NO: 8827 - protein, 539 aa, synthetic construct
MTNFEARVYSYLRFSDPRQGTGGSADRQLLYAQRWAADKGLELDESLSMRDEGLSAYHQRHVTQGALGVFLRAIEDGRIASGSVLVVEGLDRLSRAEPIQAQAQLAQIINAGITVVTASDGKEYNRAGLKAQPMDLVYSLLVMIRAHEESDTKSKRVKASILRLCQAWQAGTYRGLIRNGKDPQWLRWTGSAWEMIPERVLAVRRALALYQEGMGAARATKILHAEGLDYSASGISKQQIYRLIKLQALRGAKCLSVDGEDFILEEYYPRLLSESEWADLQHLAGQRLRRRGHGEIPGIITGIGLTYCGYCGTALVGQNMMTRQRADGTIADGHRRLHCVSYGVNGGCTAGGSCSVVPVERALLTFCSDQLNLQRLLKVGDDGQGIRQQLAVARSTAEKLSVQLGRITDALLADDSGTAPTAFIRRARELEAAQAEAHKKVQQLEYELATVSGSGKPAQAERWVELAELVRNGDYSAREKVRQLVMDTFERIVVFMRGMNAEDRSGKFIDVQLLSRTGQQRLLQINRKTGAWVASEDWD

SEQ ID NO: 8828 - protein, 540 aa, synthetic construct
MKNQVADQSKVAALYCRLSRDDGSDAESNSISTQKLILSKYASDHGFTQTRFYIDDGYSGANFDRPGFKRLIADAEAGQIGTVICKDMSRFGRDYLNVGLYTEMRFPEMGIRFIAVNDGVDSADDSTSDFTPFRNIINEWYCRDVSKKIKASMKARATAGQHLTAYAPYGYRKSETDKNQWLIDEEVADVVRDVFSLFIGGMGAAEIAEEMNRKGLLPPREYKESKGYPNRGKRLTIEDAPVVWRNTSVLRILDNYAYAGHTVSCRSESVSYKSKKHAAIPKEDWIITRNTQEPIVDEDTWQTAHRIREQQGRRRPAVMHDKGALNGFLFCSDCGNRLHFHFSSRLKNTNGTFSCCYHTGYHLCSPHYIQRGVVEAAVLDNLRTVTSMAKDHEAEFIHTIQRKSSTSNRDVLRRSKKEQGTILKRLEEIDRIINGLFESKVSGELSAERFTRMLNAYEEEQAKLRARNAELMELITAEQESSDGANQFVSLVRQFTDIQALTPEIVAAFIERVYVHDAVVVDGKKQQEIRVVYNFIGDVK

SEQ ID NO: 8829 - protein, 577 aa, synthetic construct
MNDLTVFRPGSKVVVYLRDSGGPHQEQSVPQQQAVLKTWALEHQVTITAFYIDAARTGRDTVGRGNFMRMINHFRQPMVEEDGVLLWSFSRFARDNNDAGYFKYDLRRRGFIVAAIQDPVPEGVDGIVHEALIDWKNARYSLDMIEDVKRALHLNFEDYGAIGGNPPPGFKRDEFVISNHRDHTQRKVSKWVPDPDKWDICKLAWQMRAEGKTYKEIHQATHLYGSINSYVDFFQNDIYRGILHFGEKTVPGYVDAMIDEDTWNTVRSFDRKHNNPMGGQDNKRHPRRLNSDYLLTGIVYCARCGAPMYGKDVTATEGYKYQYYKCSRSDRRLDCDALQIPKEALERSVLNQVQNYILNPEMVYQRQMEVLEDRASQASELNIRKRDLNHQIGIINKQIGNVTEVIKTSGTSAISLVTTLEDLEKTKKDLENNLFQILDEELFEVGSLSAEEARANANLIKREMMKKDPREMKEMLRNLISHISAEKDSYWVRGLIQFYGPPDKLASGKDNNGPDDEELDKKYFMRKGGTGPGAPDHTHKKALRSSVRITDIIKGQVDNLAFYILFHSTFPQIRPAA

SEQ ID NO: 8830 - protein, 530 aa, synthetic construct
MSHCLYLRKSRADLDAEARGEGETLARHEKALLELGKRQKLNITQIYREIVSGETIAARPVMQQLLSEVEQGIWDGVLVMEVERLARGDTIDQGIVAQTFKLSGTKIITPVKTYDPNNEYDEEYFEFGLFMSRREYKTINRRLQRGRIASVKEGKYIGNKSPYGYVRKKLEHDKGFTLVPEPEQAPILKMIFELYTRGEQQPDGTYADMGVSKIVRKLNNLKILPANGDVWVNASVQGMLRNPVYIGKIRWSARPLKKKMIDGQLVTERPRAKQEDWIMADGLHEALIDTATWELAQQKLSTNLSRPCPKQYKTMNPLAGLIVCGVCGRKMVRRPYTNCNYPDTLMCAVTSCNNISSQLDYVEERVLQSLQQWLNNYKLTYGKQPVAASQMSIKKKALKNTQTELKALEKQRDNIYDLLEKGVYTTDVFLERSQSINDKICELQSSLSKINAEIEREALTEQSQKTIIPKAEHVLSEYKKAKTAAEKNDLLKSVIEKAVYTKTVNGRWHNKPDEFELILYPKLPTNNASH

SEQ ID NO: 8831 - protein, 531 aa, synthetic construct
MANVRVIPAVTPIISAQERNSMVRRRVTAYARVSTDSAEQKTSYDAQVDYYTKLIKSRPDWEYITVYTDEGISAVNTKRRDGFNQMVEDGLAGKFDLIITKSVSRFARNTVDSLTTVRKLKEVGCEVWFEEQNIFTLDSKGELLITIMSSLAQEESRSISENVTWGQRKRMADGKVSLPYKQFLGYEKGEDGLPKIVPAEAEIVRFIFKLFMEGKTFSAIAKHLGDHGISSPAGKRTWQPAVVQSILTNEKYKGHALLQKTYCADFLTKKMVKNDGRIQQFYVEDSHPAIIEPDEFDAVQLEIERRKGLGRPTSCTSIFAARIVCADCGGWFGKKVWGSYKEDRTRRREVWQCNDKYKRRGVPGSGCQTPHITEEDVKVRFLTAFSILMGDRNGLIEDCRLAQSVLCDTSEIDAELAEVRSEIEVVSELSRKAIYENARTAISQSEWSERNNSYLERHKQASHRLEELEVRKRERLGKGKILEGFIRDIQNRELAITEFDEKLWLTVVDQVLVGRGGEMTFRFRNGAEVEA

SEQ ID NO: 8832 - protein, 437 aa, synthetic construct
MNKKITKLDLAPQILTRQRTAAYARVSCGKDEMLHSLAAQVSFYSELIQSRAEWEYAGVYADEAETGTKDSRPEFRRLIDDCRAGKIDFIITKSISRFARNTVDLLQTVRELKALSVGVFFEEQNLNSLSGDGEMLLTILAAYAQEESRSVSENCKWRIRKDFKEGKAAGHMRIYGYDCKAGKLTINPAEAEVVRMIFADCLGGMGRNAIMKKLTALGIPAKNGGRWSESTIESILTNEKMIGDMCLQKSFVDNHLTKRHKQNRGELTSYYVEGTHEPIVSAETFKAVQAEIARRAAKAKPSRKQTFSEFTGIIRCGRCGANFHKKVNAAGTKYAKTTWACATYTNRGKAECPAKRIPEDILKQKCAETLGLAEYEAESFTRRVTSITIPDDGVLAFVFKDGTERTLTWAPPSRRESWTDEMRAAARENFMKGEQHG

SEQ ID NO: 8833 - protein, 520 aa, synthetic construct
MNGVIYARYSAGPGQTDQSIDGQLRDCKKYAKDNDITIIDTYIDRHISGTDFENRTEFNRLLKDAVKHQFSVVIVWKIDRFGRNRQELAISKVKLKKMGVKLMYAKEHIPEGPEGIIMESLLEGMAEYYSAELSQKVHRGLRESVLKGHILGANACLGYKLVDKKYVLDPATAPQVREMFERYAAGDTAQEICDDWSRRGLRGRGGARYSHNTIYYMLRNKKYIGIYQYGDIIQENVIPRIIDQELWDRVQKILAANCRNRSLHKATAPEEFLLTGKLLCGYCGRGIAGDSGTGQHGETHHYYKCSSRKKKTQPCELRTYRKEELESLVIDSTRQDVLTDDVIDYLVGKLLEIQKEDAVSTELQRLYKCKKEVQKSIDNMVRAIEQGIITDSTKGRLVELEQQRTDLDTEIAREEIQKPELTDRQIRYWLLSFRQGNEDDPEFRTKLINTFVNSIYLYNDYMIIVYNFTVNADAQKHAISQDELKKIAKDRYHCLISSDGTGRVPATGVEPVRDLSPTGF

SEQ ID NO: 8834 - protein, 457 aa, synthetic construct
MRIKVIKSTAAAERKRLKVCAYVRVSTDSDEQEDSLDNQTEYFRNYIAANPGWEFVGIYADQGISGFKESRPQFQQMIADAKAGLTDLIIVKSVSRFARNTETVLKFSRELKSIGVGIFFQLQNINTLSGAGELMLTVIAAFAQAESEGASDNAKLTYKRKFMDGIPASGLERTFGFKQSADGDITIDELQAATVRLIFDLAAQGVWPSKIRGYLNEQHIPNGTKTAWSDSRVFRILHNTAYKGDLVLQKTYLDSRRKRHKNIGQTDQWYIAGNHEAIVPPEQWDAVQEILFKRSEQLAPTPPQKPAERRSSRNQYPLTNKLFCPFCGAKLHHRWSNGGKQEYWTCSTNIKVSASACKGVSIPAAIANGWGEITEPITVIAYTDEYGMRQFTAYPKDEYEASAECPYTKGQNDYGKRNRTHSCTAGFEQQGSDDHPQNSGRRILPSIDRAGRAAQQL

SEQ ID NO: 8835 - protein, 519 aa, synthetic construct
MTNPVKTNPGAIRCAIYTRKSTEEGLEQEFNTLDAQRESAEAYIASQRHEGWACLPDRYDDGGFSGGNLERPALKRLMADIETGGIDCIVVYKVDRLSRSLLDFSRLMEVFERHGVSFVSVTQQFNTTQSMGRLTLNILLSFAQFEREIIAERTKDKMWAARKKGKWIGGMPVLGYDVAEGGGRLEINAEEAARVRAIFQLYLEMESLLPSAQELERRGWNNKRWVTRKGKERGGKPFNKSTLFRLLTNPIYTGKVLFQGTTYDGEHEAIVDMETWNKVQGILRRNRLNGGTLVRNKYGALLKGLLFCTPCGTGMTHSYAKRKNGKCYRYYVCQTAQQQGWAKCPTKSVNAYDIESAVVEHIKGLGANPAILSATLTKATEQAKARLNELEMERKSAERELKRLHAQIRKLLGGALPDGASEIATDRLADLQERIRTIEQRMKAIQEEILVLGKTTIKENDLTQALADFDAVWNSLSSKEQAKIIHLLVERVGFDGRDQSVTVTFRSEGLKQLCQRTAA

SEQ ID NO: 8836 - protein, 597 aa, synthetic construct
MRTITKIESTIPTIKKRKKVAAYARISMESERMNHSLSAQISYYNNFIQKNPGWEFAGVYADNGISGTSTVKRDEFRRMIADAEQGKIDIILTKSIQRFARNTVDLLETVRHLKNLGIEVRFEKENINSLSGNGELMLSILASFAQEESRSISDNVKWGIRKRMQEGMLNASGHFNIYGYEWQGDELIIVPKEAEVVKRIYQNFLDGKSRLETERELEAEGIRTRQGCVMRDSNIKKILTNITYTGNMLFQKEFISDPINKKRKQNRGELPQYWVEDTHEAIIDLETFQYIQDEMARRRQLGALANKSLNISCFTGKIKCPYCGVSYMHNTRKPRTPNGKRLEFWVCGSRKKKGGHCEVGASINQDNMKKVLAEVLDIDEFDDEVFLDKVDFINVPKRYTLEIHLQDGTIVTRPCENTGHQDCWTKEYRDKVSKQRRKKNTNPKGASVFTSKLKCKHCGCNYRRCTQPSTSSEDGKFYYWRCAERTACKAQGLREDFLKSQLAEVLGMAEWDEKVFAEKVEQINIDGYQLEVVGKDGIVTPMTFEPPKRGGRHCSEEQKEHMRQIMKEKWTPERKAEMSQRMKNMRKERGRNWRKEK

SEQ ID NO: 8837 - protein, 559 aa, synthetic construct
MKTKLYSYIRFSSMRQNDGSSYERQIRMAREIAAKYDLELVNDYQDLGVSAFKGANSKTGALSRFLDAIGRSVPVGSWLFIENLDRLSRADIVSAQELFLSIIRRGITIVTGMDNKIYSLDTVTANPMDLMFSILLFIRGNEESQTKRNRTNSSALIKIKAHQENPQNPAVAIEEVGKNMWWTDTTSGYVLPHPVFFPIVQEVVELRKNGRSTAEILDHLNETYTPPPAVSNKKHSKWSRAMVERLFHTRALIGIKEVSVDGVNYELNNYYPRVIDDPTFYHLKKNIGARAWNFGDKEEVKPIPLLSGIGLLKCDHCGCAMVKVKGTNKRSDQYRYTCDATRSRRLDCEHPNWSFRGDQLEKAVLQLLADKIWIAEDKANPVPALKVQIDEISRKIDNLIALSAMTGATKELADQITALNSERETLYNQIKMAEEEMYSVDSQGWEKLAEFDLEDVYNEERIKVRFKIKQALKRIGCSRIDRNKNLFVLEYIDGKTQRVVIENSRGTRKGQIFVDLKTINDRQILESNGLVLHPCLDMLTDKDWKPEEEIPGPLQEFGI

SEQ ID NO: 8838 - protein, 588 aa, synthetic construct
MAEIIKIEAKKSPLPNRKKVAAYARVSMETQRLHHSLAAQISFYSDLIQKNPEWDYAGVYADEGISGTSVEKRPEFMRMMKDCKAGKIDLILTKSISRFARNTVDLLKVVRQLKDLNIEVRFEKEKINSLSDDGELMLTLLASFAQEETISISNNVKWTIRKRMSEGNPNMRNIVYGYRWKDDTLIVVPEEAKIVRRIFQNFLDGKSRLETEREFAEEGITTRKGNRWTDSNIKVVLTNVTYTGNLLCQKEFVEDPITKKRKKNRGELPQYFIANTHEAIIDKETFDYVQEEMARRRALGPRANKSLNIYCFTGKIKCELCGKSYMRNVRNNRAKHSNLGNKVISWVCGSSKKKYSTCSAKAIPDRILKTCCAKVLGLEDFDDAVFNEQIDKITVPKQGVLIFHFKDGHSVTETWENNAKKESWDDAARKRTSEYRRTHAMKRSDVTCFSTKIRCEHCGCNFRAQTQNCSTSPSGKRRYWRCAEHNGCDTRGFRDDLLRSLTAEVLGLDAFDDAIFLSKIDHISVLSREDLIFHFYDGKEIARKLIQPTHEGHKWTEEQHAKFKASIKECYASERHKPIRKEKLWPNK

SEQ ID NO: 8839 - protein, 546 aa, synthetic construct
MSFFGNKLPERNEIAVVYCRVSTDGQAERGTIESQITYAKDYAKFKGFEIKDFYCDDGVTGMMPLAERPEGKRLTEDAKAGKFNVVYVYKIDRLGRSARETLNAIYSLKESGVILRSLTETFDLETPMGQFFMQLLANIADLDRNNFLERSRLGTERLVKAGKWVGGIVPYGYEINDAKELVLNTRPFPDSDLCEAEVVRMIFDMVGKHNKSSVEVARLLNALGVPTSYSRSTGKRRKKTIGIWRSNTVLRIIRNTTYKGIHYYGKRSGYYSTPIAREVTPIVDEKIWEQANAEIDKNRKSSFRVPASEYMLAGLIKCGVCGANYSGTRNNRDGAYYRCSSRMRKHKIEKNKCNSRYVNSDLLESIVWNELIDLLGNKKTLRAAVKNSLTEMEKKQRNIEPDIEKAEKALQDKELEKSRLIQLYTKGTLSEEDVIAPLDDLKNELEGLTEHLSSLMKEKANIDKAQIIEKEDIDLYVDKIREFLSECNDAKTKKRLIQTLVKKITVISPTDRKKPIEFDIEFRLKVPAHKVYSDGAKKHTDTDSSH

SEQ ID NO: 8840 - protein, 520 aa, synthetic construct
MKRVYCLYRVSTKGQVDKDDIPMQKTSCREFAERNGWTILKEFQEKGVSGFKVSARERDAIQDLKTAAENKEFDVLLVFMFDRIGRIDDETPFVVEWFIKHGIEVWSVNEGEQRMDSHVDKLMNYIRFWQANGESQKTSARVKTRLNQMTMDGKFTGGVAPFGYKLIKSGEINKKGKELMDIVVDDDEAVIVKKIFDMTVKEGYGSYRMADYLNSHGIRTHNNSKFQCNTVNRILKNRLYCGYFVSGGVESPYIEKLQIIDENVFDQAQFILKQRSSKNEEKKQIARTTKGSTLLSGNIYCTHCGQKMVSTSYIDRYDRADGSQYRVRRQRYICTNKAMKRGACDGQSAYVAHKIDGAVLATLKDYLAKIKSTPKDIALEKRYKSEISEYKRKQTKLEKEIDKLKRQVVELSAEIGRSLLGESRFTPDMLSTSIDNTNDILHKKEIELSDIKYKLTNQQNAMGKLDFYYSQFRTWADEFDNSTMEQKKMIVCQLIKEVRVARGYELEIVFDLNYEQFLSK

SEQ ID NO: 8841 - protein, 416 aa, synthetic construct
MEICKLPPKPAQLRLTRVAAYVRVSRESERLTHSFSAQVSYYNKLITNTPGWEYAGVYSDYATTGTSTTGRGEFNQMIEQALAGSIDIILTKSISRFARNTVDLLTTVRALKAAGVSVRFERENIDTANAEGEVLLTLLASFAQAESESISANAKWGIRKKYKDGLLHSRHPYGYRYHHGQLDIIEEEAMIVRRVFAEFLEGISPEKTCKQMNQEGLRSRGGGKFSASVTRDWLENPTYIGTAILQQYFSAHAGDNTPTLNRGELDKYIVEDSHPPIIERSVFDAVQAELARRRATGGRGLTPTGGSSALTHRITCTICGRNYHRRTRRLAHSTYKYWWCESATKGKGNPCHAHQLREENLHTIIKRLLGLHAWDDQQVVDRIERIEASPNWLLTIHLSSGNTTMIDYLTGEEVTA

SEQ ID NO: 8842 - protein, 522 aa, synthetic construct
MGNVMLIPARRQVGNTARKQEDEKPKLRVVAYCRVSTDSDEQATSYEAQVEHYTEFIQKNADWEFAGIYADDGISGTNTKKREEFNRMIDDCKDGKIDMIITKSISRFARNTLDCLKYIRQLKDMNIPVQFEKESINTMDAKGEVLITIMASLAQQESQSLSQNVKLGLQYRYQQGKVQINHNRFLGYTKDADGNLVIDPEQAEIVKRIYREYLEGLSMDKISAGLEADGILTGAGKPKWHTSTINKILRNEKYIGDALLQKTYTTDFLNKTRVKNNGIVPQYYVEGNHEAIIPKDIYLQVQEELVRRRVVKTSANGKKRSYSCNHCFSQMIICGECGEMFRRLHWNNRGCKSIVWRCISRLEPTGQECHARTVNELVLQDVVVAAINQMLGDKSGYQAQLQLNIAAVIRASQATSLDNIDSKLMALQQELLQKANSKEAYDEIADEIFRLRELRQQTTVDTAARDEQIKRINDLQDFIAQQTAHLTEFDESLVRRWVKQITVWDDHFTIELKSGVSIDIDA

SEQ ID NO: 8843 - protein, 559 aa, synthetic construct
MKTKLYSYIRFSSMRQNDGSSYERQIRMAREVAAKYDLELVNDYQDLGVSAFKGANSKTGALSRFLDAIGRSVPVGSWLFIENLDRLSRADIVSAQELFLSIIRRGITIVTGMDNKIYSLDTVTANPMDLMFSILLFIRGNEESQTKRNRTNSSALIKIKAHQENPQNPAVAIEEVGKNMWWTDTTSGYVLPHPVYFPVVQEIVELRKNGRSTAEILDHLNETYAPPPAVSNKKHSKWSRAMVERLFHTRALIGIKEISVDGVNYELKDYYPRVIDDPTFYHLKKNIGARAWNFGDKEEVKPIPLLSGIGLLKCDHCGCAMVKVKGTNKRSDQYRYTCDATRSRRLDCEHPNWSFRGDQLEKAVLQLLADKIWIAEDKANPVPALKVQVDEISRKIDNLIALSAMTGATKELADQITTLNSERETLYNQIKMAEEEMYSVDSQGWEKLAEFDLEDVYNEERLKVRFKIKQALKRIGCSRIDRNKNLFVLEYIDGKTQRVVIENSRGTRKGQIFVDLKTINDRQILESNGLVLHPCLDMLTDKNWKPEEEIPGPLQEFGI

SEQ ID NO: 8844 - protein, 455 aa, synthetic construct
MANEIKQVALYIRVSTDQQAKHGDSLDEQQYTLNEYVRQQGNMRVFKTYIDDGISGQKLYRDEFQKLLDDVKKGRIDTILFTKLDRWFRNLRHYLNIQEILDKNNVTWLAVTQPFFNTETAMGRSFVNQSMGFAELEAQMTSERIRAVFDNKIRKGEVVSGKVPLGYEIKDKHLVPNEKAEIVKEIFQYYLETGSMRATVRHLENHFSMTRDYQSVRQMLTNRKYIGELRDNKNFCEPIIDRDVFERVQLQLSKNIRMNKKRDYMFTGLLVCSECGCNYSATAVISRYVRKDGTTNPNERHLYRCTKNRNNVKKCSNKKGIYETTLENFLLENIEKQAEELSVKMQQEPEVKKTKNTNDKIKKKIDRLKKAYLNEVITLEEYKKDREELEALLIPERDNKIAKIDLNSLHNYSTAEFRDGYKQLTISEKSSLWRQVIKNIVVYPDGNLKINFLGY

SEQ ID NO: 8845 - protein, 525 aa, synthetic construct
MKKVAIYSRKSKFTGKGESIENQILKCKQFIQFKFDIDTKNTEIFIDEGFSGKNENRPRYQDMIKKVKNKEIDHIIIYQLNRLGRNARDIHNTMQMCEDLGCVIYSATEGFDSSTSFGRALIGILASLAQLEREQLAERVKDNMYTLAKMGRWLGGQSPLGFDGTREYYIDESGKERSVTRLKANNEELKIVKLIYEKYLEEKSISQVSKWTLTNNFKGKNGGNIDKSAINVILKNPVYVKSNTDVFKFLENNGYEVYGEANGNGLLRYGKNNKDNSTGIIATGNHKGIIDSSNWLKIQEILQENTEKAPALGKSKACLLTGLLKCSCGSNMQMRYGPKRKDGTRPYYYVCTMKINSGGTRCNSKNLNGQLFEEKLINHFKKYSEERLIKQLESTLNASKNLEKNINIESIDKDIESAEKSVKSLLNNLKQTTDTNIVNIIFSEISELQNTIKDLKYKKDNLLEDQSEIVLSQSEIISMINTFNDFISLYDTLSIDEKQKRLKTLFKEILYDGNKIHVKFNLKKN

SEQ ID NO: 8846 - protein, 521 aa, synthetic construct
MKAAIYARYSSDNQREESIEAQIRAINEFAERENIQIVKTYIDEARSATTDDRPQFLKMIKESELGLFDTLIVHKLDRFSRNRYDSAFYKKKLKDNNVRLISVLEHLDNSPESIILESVLEGMAEYYSVNLSREVMKGMRETALQCKHNGGLPPLGYDVAKDKTYIINPNEAKAVKLIYELYSNGVGYNLILSRLNELGYKTKKGKFFGKNSLYSILTNEKYNGIYVFNKSSKKINGKRNSHKHKLDEEIIKIKDGMPKIIDDDLWNEVKKKMDNNKAHRGAAQAKKIYLLSGLIYCGKCGHAMTGNSRHSGRNKTLYETYECSNRKRTKQCDMRAINKSLAEKIVIDALYDNIFSKKAIENLTRKILTYAQEQNKTITEDIITYKKELKDVDSKIDNIVEAIADGLYSPVMKEKLTSLESKKNALLIRIDEAEREAILTSPSKEMIKKYLSKDSDIKEKTPQQQKKVVQNYIKKVTIYDDEVITDTIVTCLGIGEAYRTRVHKLQKTNINIKSRNPHRNL

SEQ ID NO: 8847 - protein, 450 aa, synthetic construct
MDIIRAALYIRVSTEEQVREGYSVEAQRDNLKRYAKNKGYSVVGVYADEGITARKKYTNRKEFMRLLDDVEAGKIDVILFIKLDRWFRNVGDYYKVQEILERNNVGWTATTENYDTTTANGRLYVNIRLAVAQDESDRTSERIKFVFEKKVADGEAIWGLAPFGYKVENKKVVIDEDLYPIVVDTFEAFIKLRSVNSVCVYINEKYGTHYSYNIFKRILRDNTDFYYGTYRNNTSYCPPYLSNSQYEIIKEISDSTTTIRSSGKKYDYIFSGLLECGYCGRRLVGGGSTRKDNGKAYYGYRCTGYRGGTCSNRISELKVESLLFAALEDEVKKYKVDYEIKQKKKKPAYINKSAIEKKIARLRNLYLNEVIEIDDYTVEYRKLQDKLKEYEESINKVEDNKDFTALDNLLKSDFKEIYNNLSNIDKRTLWHSVIKRIIVKDKQIQEIIFK

SEQ ID NO: 8848 - protein, 491 aa, synthetic construct
MPNAVIYARFSSSSQREESIEDQIRECKEFAVKEGLQIINTYCDYAISGKTDNRIQFQKMIKDAEKRLFQVVIIYKTDRFARNRWDSAIYKKRLKDYGVKVIPAKEIIPEGPGGIILESFYEGCAEMYSANLSENIRRGQYGNALKCKANCKAPPGYKINPVTRLYELDDTTAPFIRKAFEMAASGETSKAILNYLANNGIKKSHASIYSMLRNERYKGIYIFDNTRVEGGMPALVDKATFDKITGNFKRRSIHPQANSKKYFLSLKLYCGYCGKLMNGEYGISRNGSQYRYYTCPTNRRQKCCELKAKPADKIETLISEKLQVTLLSDEVIDTMSNYILEYQQQMYNDNSMENALSKQLANVEKRIKNLLSAMEAGAMTDSTINRMHELEAKQKELLTSLSIEKLKAPTITKEQIVYYIKKYRDSDITVDKIRQEFLNTFVSKAYVFTDHLFVIYDAINGINTEITQEILSDPNEFGYIPIWWRQAGSNR

SEQ ID NO: 8849 - protein, 516 aa, synthetic construct
MARKKKVSPGNRLVAYYRYSGGSQQTEQSIEGQRRDCEAYARQHGLTIVHEYIDRHISGRGVESRLAFQQMIADSSKHLFDLVICWKTDRFARNRYDSAVYKKRLRDNGVRILYAAESSVEGPEGIILEGLMESLAEYYSAELAQKMRRGMRESALKGKAINPNRPLGLTTDEHKRFIIDEKNAPTIRFIFEHYAAGESSASIVDQLNAAGLRTSKGNSFNKCSIPRIIQNEAYHGVYICKAYDVRIDGAIPAIIDDDLWKRAQKMLTLNKQHRAPHSSHADYLLSGKLFCGCCHSLMRGISGHNCRNDVYYYYACGNKADGGTCKKKNIPKDVAENLVVNAICENILRPDTLEDLADAIAAAQQAEVNQPDPERAMLEQNLADVHRKINNIIESIENGTASSRLSARLADLEQQESTLNYQLESLKEVHPPVLDRERILFLLEQFLISPNERTEDYNRRIIDTFVNRIEITDTEMLIYFNLSEASASEKQKNSQPNSCSTGNHLVRVARIELTAS

SEQ ID NO: 8850 - protein, 497 aa, synthetic construct
MPKTEEKQAIKAVIYARYSSDRQREESIEGQLRVCEDYAHRNNMTILHTYADRAMTGRSDQRPEFQMMVRDAATMTFDVVLVYKLNRFARNRYDSAKYKHKLKKYGVKVVSAMENIADDPSGILLESVIEGMAEYYSAELAENVTRGMTENALEGKWPGGYVPLGYKLDEQHHLVIDEPKAEIVRMIFQLVLEGHSQKHIIDELNRRHYTTGSGRPFTYNTLRTIFKNEKYIGRLDWGTVHRENALPAILDKRTFEAVQKQLHFRKKNHIRSCNESFLLTGKLFCGCCHSKMVGVSGTSKTGAIYYYYACSAHLKKKCKARNVRKDAIEDLVCEVTTRILSDPEAVEAIARQAIEMQKNKKDSLELQAIKNQIADINKKLQNCVRAVENGLISKTITNHINDYEKQLTRLKDDAARVKLLDGDVELTQQHIEFFFWSIAQKIKTADKYKSILLSSIVRSVIVDKDYIEIQYNYKNELPILQNPVRIESSYLNQMVTR

SEQ ID NO: 8851 - protein, 430 aa, synthetic construct
MSTDQDEQLSSYENQVNYYREYILKHEDYEFVDIYADEGISATNTKKRDAFNRLIQDCRDGKVDRILVKSISRFARNTLDCIKYVRELKELGIGVTFEKENIDSLDSKGEVLLTILSSLAQDESRSISENSTWGIRKKFERGVVQVNTTNFMGYDKDEKGNLIINHEQAKVVRYIFDRFLEGYSPEFISKELREQEIPGCTGKAKWCPSAIWKMLQNEKYKGDALLQKTYTVDFLTKKRIDNDGQVNQYYIENNHEAILDRDKWEIVQLEIERRKRFREQHKLQFYIMQKENNPFTTKVFCAECGSAFGRKNWTTSRGKRKVWQCNNRYRIKGQIGCLNNHIDEEMLEKAVMMAVSILKENRELLQSKWNKLMETDSSLEQYYSERLREIVSRNKWDFNGVEMCRILHSITISEKGEISVKFLEGTEVNL

SEQ ID NO: 8852 - protein, 413 aa, synthetic construct
MNIRKIETKNNKRKKRICAYVRVSTTNGSQLDSLENQKVYFEKLYAERDDVEFLGVFCDKGISGSKYDRPDFQTMLDACRKGQIDVIHTKSISRFARDLINVLEISRELKTLGIDIFFEKQNIHTLSNEGEVVLTVLASLAEEELQSMSGNQRWSFRRKFQKGELLINAKRFLGYDLNEKGELVINKAEAQIVRTIFYSYLEGMGTHRIAKKLNEGKVPTVAGKKWYDSTIRNILKNEKYKGSLLLQKYFHDGVNGPKKLNQGQVEQYYIEDNHEGIVSKEIWEKVQVKMKSRSRIQGTNKTYKFSRMLKCQYCGSTLKRQVSYKKKIVWCCSKYIKEGKNSCKGMRVPERDIEDWKLSSPVIVLERIEDGEKHYGYTGQKTSANSHISNSEKNQSSRLLSSVYRSRRTAIKL

SEQ ID NO: 8853 - protein, 500 aa, synthetic construct
MKSVLYARVSTEDLEQNNSYIQQQLYQDDRFEIVKIFSDKASGSSVDGRESFLEMLKYVGISKEGNNYFVEHRTEIECIIVANVSRFSRSVVDARLIIDALHKNNVKVFFVDLNKFSDDADIFLQLNMYLMIEEQYLRDVSKKVKAGMQRKQSTGYILGSNKIWGYNYVTKDDGKGYLVPHETESLMVKNIFKEYIFGAGTRTLAKKYKLASSTILGILKNTKYCGYMGYNLKSDNPTYVKSPFIEPLISTEAFEEVQRIIKGRCNSESGRGRRIKVRNLTGKIKCECGANYHYKQRETEWCCGREGVEGRTKGCGSPQFNTKLIIPYLEKNIDNIEKNLEFNLNREIKDINVGSFDRLNQRKEELIRQQDKLLDLYLDEDKLKNISKEMLERRSKLIKEEIEEVEEKLVILNDMNSHLNNLRRIKVEYKNEIKNIRRLIEEKNLDEIEKLISKIQLETIVNIINFRKELKIKEIQFSCFNELYNTNFIFAPEPKKVWDK

SEQ ID NO: 8854 - protein, 499 aa, synthetic construct
MKSVLYARVSTEDLEQNNSYIQQQLYQDDRFEIVKIFSDKASGSSVDGRERFLEMLKYVGISKEGNNYFVEHRTEIECIIVANVSRFSRSVVDARLIIDALHKNNVKVFFVDLNKFSDDADIFLQLNMYLMIEEQYLRDVSKKVKAGMQRKQSTGYILGSNKIWGYNYVTKDDGKGYLVPHETESLMVKNIFKEYITGAGTRTLAKKYKLSPSTILGILKNVKYCGWMAYNLKDSPTYVKSPFIEPLISTEAFEEVQRIIKGRCNSESGRGRRIKVRNLTGKIKCECGANYHYKQRETEWCCGREGVEGRTKGCGSPQFNTKLIIPYLEKNIDNIEKNLEFNLNREIKDINIGSFDRLNQRKEELIRQQDKLLDLYLDEDKLKNISKEMLERRSKLIKEEIEEVEEKLVILNDMNSHLNSLRRIKVEYKNNIENIRKLIKDKNLDEIEKLISKIQLETIVNIINFRKELRIKEIQFSCFNELYNTNFIFAPEPKKVWDK

SEQ ID NO: 8855 - protein, 502 aa, synthetic construct
MIAIYARQSVDKKDSISIESQIDFCKKEVGEEDYKVYKDKGYSGKNIDRPAFKEMMRDIKKNAITKVVAYKLDRISRSILDFNNLLEEFKKHNIEFVSVTEKFDTSTPMGKAMVNIVVTFAQLEREQIAQRVKDNYYERGKTGRFLGGKVPLGYTNTKVEIQGKKVPTLVINKEEALLIEKMFNMYAYQDISLSKISDYLNEQGLKSAKGTAWDSGKISRIIKNALYVKADVNVYNYYKNLGVEINNPIEDFIGTNGCFVYGKRDRNENRYTNLKDHKLSIGLHEGIIDADTFLKCQYKLSQNQQITRSGSGKHTWLTGLTKCGYCGYSMSAVVNSSGKYLNCRGKTNMKICNGHSRTIKVEEIENIVETEILNRLEKLSKVKVKVENSNSKKIKSIETEIKIVDENIEKLLDKILESNDITIKYINKKVEELDNKKTELQNELNRITLEGSNNSSLEEVLKDADKIKNLNFDKKKSIAKSLINKILIKDDEIDIQWKVFNQ

SEQ ID NO: 8856 - protein, 524 aa, synthetic construct
MQALAQNVTVIPARKRVGSRKTEAQVQKIRVAAYCRVSTDSEEQETSYETQVSHYTTYIQSKEEWEFVKVYADDGISGTNTMKREAFNQMIEDCEAGKIDLILTKSISRFSRNTVDCLKYTRQLKALNIAVFFEKENINTLDAKGEVLMTIMAALAQQESESLSANVRLGIQYRNQQGKVQVNHNWFLGYTKDEDGNLVIDEAQAEIVRRIYREYLEGQSLLQIKRSLEADGIKNGAGHLKWHESNIKQILTNEKYIGDALLQKTYTVSILEKKRAENNGQMPKYYVEGSHEAIIDKDVFLKVQAEMAKRANLVPQGKKRVYTSKYALSGMVFCGHCEDIYRRVYWNNRGKKKYVWRCVSRVLKKSSGIDCPARTIEETALHDAVVTAVNDAFAQKNIVIPLLKQNIEEVINDDLEKKIRDIDKQLAELQIELINVSGDELAVERLGTEIVDLREERQDILTAAAERKDLQLRMQELIDFLDEQHTAITEYSETLTRRLVEKVTILDEKIVVTLKSGMEMEVEA

SEQ ID NO: 8857 - protein, 514 aa, synthetic construct
MRRITKIEATAASADKKLRVAAYARVSTGSDDQLISLEAQKNHYESLIKSRQDWEFAGLYFDEGISGTKMAKRDGLLSMLSDCERGKIDYIIVKSISRFSRNTVESIETVRKLYGMGIYIFFEKENIDTGKMEGELLLSILSSLAESESRSISENSTWSVQKRFRNGTFKVGYPPYGYENVDGQMVVIPEQGEVVKWMYKQVLAGVSPSQLARELNDRGVATKRNGKWTAHTIIGIIRNEKNTGDVIFQKTYTDDCFTRHVNRGEKDQFYAKDHHEALVSREDYTIANEMLDRNGLEKGITADDSKYQNRYVFTKRIICGECGSTWKRKKFDGYFGFNCSLHLKDKDACSMKSIREDKVKAAFITMMNKLTFGRDKVLKPYSAGLEEMEKAEFLDELNALEDAMEENLQKRQQIKTLFSKGFIDPAVFAQENDILVKGYEELTADRNAIIKQISGGDERKASLKELLHYTAKGKMLSEFDEELFIKFVDHIIVYERTEIGFAMKCGPIFRERID

SEQ ID NO: 8858 - protein, 565 aa, synthetic construct
MDFKTLAHNIIMEKRKKRIAIYCRVSTVEQAEEGYSIAEQERLLTEWCSKMDYVVTKCYSDRGISGKAINNRPALKELLKDAEEKKFDMVLVWKINRISRKLTHVLEIAETLEMNNIAFKSFSEEFDNSTPAGKMQFQMMALVGEFERGTIAQNVKMGMCAKAKSGEWCGGQVLGYDLVPVEKQQGAKRTKTVLTINEREAESVRFIFNEYASGKGYKAITNQLNKLGYKTKKGNNFSVGSIRDILTNPVYIGKIRYNVRQNWSEKRRRNINANPIITDGIHKAIIDENLWDKVQVILESKKGKPSRIYDGEYPLTGILRCPKCGAGMVIMRTTNTLKDGSKRRIAYYACGNWKNKGIAICSSNSIRVDKANEYVFSKLSELLSNDKMVKTIVDNVNKERIRKVNPAKKDLSKIDNELEKLDKKRAKLFEAYEDEIITKEEFKLRKEELMKRVKTLEEEKAPLLVTLSDDVNEEVPYELVKSILENFSKVLTESSTREQQKKLLHMIISEITINELREIDSIKIKLDDNLINYLSNEEGVSMKGTPSSFMLRNVGIRMLKLDINI

SEQ ID NO: 8859 - protein, 495 aa, synthetic construct
MRIAIYTRKSVAVENSESIETQIQLCKKYFQGENEFEIFEDEGFSGGNTNRPSFKRLMSLIKLGKFDIVAIYKVDRISRNIVDFFKIYEELEKYNVKLISISEGFDPSTPGGKMMMIMLSAFADMERENIRQRVKDNMISLAKKGCFTGGFVPFGCTIEKKEGKSFLKIEDDKIIKLMFDKYLELGSLYATQKYLLDNGIKTLTTRSSLGKILRNPVYCKSDERVSDYLLNKGFEVVGKANKKGYMTYGKTSDYPTLIVSKHNAPIDAELFLKVNLLLDKNKDKATKRESKTYWLTEILYCPFCGSKYVLVNSGKNTYYVCSSRINRASNEMGINKDKVKCENNKYVNAETIEEKVSILINNLEDDREFKKYKGNMVVDNKQNEIDILLKSIDDNKKAIDNLVEKLMLLSNAAAEPLTRKIEELTSENIELEAKIDELRINQLDAITKKNDSELQQAIREFRNIKDNKEKRNKVRIIFNKLIYNPFDDSIDIEFT

SEQ ID NO: 8860 - protein, 525 aa, synthetic construct
MSRTVTAIPATKKLGNVTTPSGVPARRRVAAYARVSTEMEEQTSSYEAQIDYYTTYIRSRSDWRFAGMYSDEGISGTSMKRREGFQTMINDALAGKIDLILTKSVSRFARNTVDSLTTVRKLKDAGVEVYFEKENIYTFDAKGELLITIMSSLAQEESRSISENVTWGHRKRFQDGKIMVPYASLLGYKKGADGSLVIDETQAPTVRLIYQLFLDGMAISEIKTELAARKILTPRGKEVWSTSTVRSILSNEKYKGDALLQKTFTTDFLTKKMKVNEGEVPQYYVTGNHEPIIAPRIWDQVQYELATRHGNISSAKVGLFSTRLKCAQCGSWYGRKTWASNTKYKYTVWQCNHKYAGDKPCSSATVKDEDIKNAFVQALNQLIARQPRQSQLLQIFDSMFDTSRLEEQAAACQTKIVELTEQIEALIAKNQQRALDQDAYQNKYTELDTAYRKTLACKASLEADIAANTAKHAAVTTALGDLAGEPVNDFRPAQWSALIDHAIVDEDGIRFVFRTGEQVRIALKG

SEQ ID NO: 8861 - protein, 416 aa, synthetic construct
MAHISVVTPVRSPAPKLVNVAAYARVSTNGTEQLASLSAQVSYYSRLIQSTPGWAYVGVFTDEGITGTSTKSRQGLADLMDAARRGGVDIVLCKSISRLARNTIDLLATVRELKDLGVAVRFERERIDTLSADGELLLTLLASFAQEESRSLSQNVKWAIRNRYKSGGTNSFVVYGYKWADGQFTIIEEEAKIVRLLFANFLDGISPEKTATMLNAEGKRSRGGGRFYGSVFRRMLENERYKGCQMLQKMYRPTIQAPTRSLNDGELPRYWVDNALPAIIDETTFDAVQKEIAHRREVGPAATPSKNTGVFTGRICCGACGKNYQRKTRTYKSGTSYKFWRCWSACTGNGNPCRGHNLRETLLEHACADMLGTQGFDPVQVGEQIVMIEAFEHQLTFHLADGTMMPVGLTSEGWLA

SEQ ID NO: 8862 - protein, 523 aa, synthetic construct
MNTIAIYTRKSKFTGKGESIENQIEKCKKFIEFKFNIDSENVNIFIDEGFSGKNENRPQYQLMMEKIKKKEIDSIVIYQLNRLGRNARDIHNTMQLCDDLGVIIYSATEGFDSSTSFGRAVIGILASLAQLEREQLAERVKDNMYTLAKMGRWLGGQSPLGFDGSREYYIDETGKERSITKLKKNEEELKLVKLLYDKYLEEKSLSQVGKWALINHLTGKNGGNLNKNAINVILQNPVYVKSSKEVFEYLSNEGYEVCGEPNGNGLLRYGKDDEPIVATAKHKGVIPSDQWIEVQKILKGNAYKAPRMGKTNTALLTGLLRCKCGSTMRISYGQKRKDGTKPFYYICNMKINSGGARCNLKNLNGNLFEKNFIQFLKNYSKETLFAELQKLLNNSKDLESTISSNKIDVEIEKSNKAIKQILNKLKLTDDDELSKILLQEIKVENNNLKALSKQKEELLNDQSEVVITQSEVLAILDDLDNFQKTFDDLNLEDKQKALKSLIESITLTDDKFIVDFNIKKKTR

SEQ ID NO: 8863 - protein, 481 aa, synthetic construct
MMTTNKVAIYVRVSTTNQAEEGYSIDEQKDKLSSYCHIKDWSIYNIYTDGGFSGSNTERPALEQLVKDAKNKKFDTVLVYKLDRLSRSQKDTLYLIEDIFLENKIDFVSLLENFDTSTPFGKAMVGILSVFAQLEREQIKERMQLGKLGRAKSGKSMMWAKTSYGYDYHKETGEMTINELEAIVIREIFQSYLGGRSITKLRDDINQRYPKTPAWSYRIIRQILDNPVYCGYNQYKGKIYKGNHEPIISEEVYNKTQEELKIRQRTAAEKFNPRPFQAKYMLSGIAQCGYCQAPLTIIMGMVRKDGTRFIKYECKQRHPRKTTGVTVYNNNEKCHSGAYQKEEVEEYVLKEISKLQNDTSYLDEIFSTPETESIDRDSYQKQIDELTKKLSRLNDLYIDDRITLEELQKKSAEFTTIRAFLEAELENDPSLKQQEKKEDMRKILGAEDIFLMDYEGQKTMVKGLINKVQVTAEDISIKWKI

SEQ ID NO: 8864 - protein, 580 aa, synthetic construct
MVRRKTALRGVSASARITKVAIYIRVSTIHQVDKDSIPMQKKDLIAYCQLILGTDNYEIFEDAGYSGKNTDRPAFQDMMGRIRKGEFTHVLVWKIDRISRNLLDFAEMYEELQSLRVTFVSKNEQFDTSTAIGEAMLKIVLVFAELERNMTSERVTATMISRANNGQWNGGRIPFGYSYDSGTSTFSIREDEAVVCRRLKDLYLDNKSLVYTARALNADGYKTRAGADWTPTAVWIIASSPFYAGIYRYNRYKGTENRTLNPEEEWVMIPDHHPAIFTLEEHEAMKSSLKTNARYVDNPVGKPHATANIHIFQGIAYCGKCGNKMVSTPGKKHADGYRPSNYSCPLHRRSKKCDNATVNDMIVGEFAINYILNMLNAKKTFSNIDTPEELQRHLLTGSTFSDISSIEEDGLNDFFNLLSRYGSDNSYVFAIKTPRRKKASVNPELAALRKEKEKQERALQRLQDLYLYSDKSMSEKDFILRKSEISDRLKNINAQLGLITQNPDSLLSDEEFIKQASHLLIQKELKGRKYIYYKNLATSVDPEILRTYMETILDSMYIIDGRISSIVFKNGLTHKFIYKN

SEQ ID NO: 8865 - protein, 503 aa, synthetic construct
MNNRIDAIYARQSVDKKDSISIESQIEFCKYELKGGNCKEYTDKGYSGKNTDRPKFQELVRDIKRGLIAKVVVYKLDRISRSILDFANMMELFQQYNVEFVSSTEKFDTSTPMGRAMLNICIVFAQLERETIQKRVTDAYYSRSQRGFKMGGKAPYGFHTEPIKMDGINTKKLVVNPDEAANIRLMFEMYAQPTTSYGDITRYFAEQGILFNGKELIRPTLAQMLRNPVYVQADLDVYEFFKSQGTIIVNDAADFTGMNGCYLYQGRDVKPSKKNDLKDQMLVLAPHEGIVPSDIWLTCRKKLMNNMKIQSARKATHTWLAGKIKCGNCGYALMSINNPVGKQYLRCTKRLDNKSCAGCGKIITSELETVVYQQMVKKLASYKTLTGRKKAAKANPKIAALQVELLHVDSEIEKLVDSLTGANNVLLSYVNVKIAELDGRKQELVKQIAELTVEAISPEQVSQISGYLDTWDNVSFDDKRRVVDLMITNVAATSDSLNITWKI

SEQ ID NO: 8866 - protein, 528 aa, synthetic construct
MRYVIYLRKSRADLEAEAHGEGETLSRHKTALLELARRMGITISATYEEIVSGETIAARPQMQRLLSEVGAGEWDGVLVMEIERLARGDTMDQGLVAQTFKYSGTKIITPLKTFDPQNEFDEEYFEFGLFMARREFTTTNRRLVRGREASAKEGKYVGSVPPYGYRKVKIPNDKGFTLEIIEEQAKVVRMIFEWYAEGAEVNSQKKRIGPYTIAVRLNELGIKSAGKKDYWTIYGVQNMLINPVYIGKIRWGYRKVKKTVTPEGMKKKSREFAQDGDYIVVDGLHEPILSEELFYKVQDLIAANPPTPIKYRHKNINPFAGLIFCAKCGHCMNYRRGYGRQPDYIGCYTAGCKNKASRFDLVEQRVLSILNSWVKDYSVDKAQIKHEADLNAELSNAISLAEKEIETLQDQLDKVYSFFERGTYTEKIFKQRSSAIEQQIMEIGEKIDRLKAEHQQVLERQNVQAEFVPSIKHLLEIYDTLEPVEKNKWLKQIIDRIVYEKNADGKYHNVDPGDFTIGILPRLPKKGN

SEQ ID NO: 8867 - protein, 526 aa, synthetic construct
MDEYCLYLRKSRIDLEAEANGQGDTLARHRADLLKLARKRGLNITGCYEEVRSGESIAERPEMQRLLNDVEAGRWTGVLVMEVERLARGNTTDQGVVADTFKYSDTKIVTPNKVYDPGDEFDEEYFEFGLFMSRREYKTINRRLQRGRRASLSEGKYIAGKATYGYERYKLSGEKGYSLRIIPEQAEIVRQIYDWYVNGELLPDGTLRPLGSYTIAKRLDARGIPSPTGGKWPPCTVKDILTNPTYIGKLRWSYRPTVKRMVDGELVKTRPVDRAVHLSDGRHEPILDEVLWHRAQLMLKNRSHAPVPKSTNIRNPLAGLLICSKCGRSMERRKFKHGRDTVACPNKDCNCKSSVLEEVEAGMLDSLRIWLSDYKIKLAQSQETISHTGPTAEQEITSLQRTLGTLQAQMDNLYNLVEQGVYSTDLFLQRSQALTARMAEVNQQIETTQAALTASRRIARNRFEIIPRIERVLALYPTLTDPREKNTILKEVLEKILYTKTTGSRWEASDMNLYVFPRVETDGEQL

SEQ ID NO: 8868 - protein, 516 aa, synthetic construct
MARKKKVSPGNRLVAYYRYSGGSQQTEQSIEGQRRDCEAYARQHGLTIVHEYIDRHISGRGVESRLAFQQMIADSSKHLFDLVICWKTDRFARNRYDSAVYKKKLRDNGVRILYAAESSVEGPEGIILEGLMESLAEYYSAELAQKMRRGMRESALKGRAINPSRPLGLTTDEHKRFIIDEKNAPTIRFIFEHYAAGESSASIVEQLNAAGLRTSKGNSFNKCSIPRIIQNEAYHGVYICKAYDVRIDGAIPAIIDDDLWKRAQKMLTLNKQHRAPHSFHADYLLSGKLFCGCCHSLMRGISGHNCRNDVYYYYACGNKADGGTCKKKNIPKDVAENLVVNAICENILRPDTLEDLADAIAAAQQADVNQPDPERAMLEQNLADVHRKINNIIESIENGTASSRLSARLADLEQQESTLNYQLESLKEIHPPVLDRERILFLLEQFLISPNERTEDYNRRIIDTFVNRIEITDTEMLIYFNLSEASASEKQKNSQPNSCSTGNHLVRVARIELTAS

SEQ ID NO: 8869 - protein, 406 aa, synthetic construct
MERTIKVIQSGTVKMPTKKRVAAYARVSSGKDAMLHSLSAQVSYYSNMIQQKNEWSYVGIYSDEAVTGTKDRRVEFNRLIQDCRDGKIDMIITKSISRFARNTVTMLEVIRELKNINVDVYFEKENIHSISGDGELMLTILASFAQEESRSVSENCKWRIRKGFEQGELINLRFLYGYRINKGKIEIYEKEAEIVRMIFDDYLNGEGCTRIANKLRKMNVDKLRGGMWNSERVVDIIKNEKYTGNALLQKKYVKDHLSKKLVRNKGILTQYYAEGTHPAIIDIKTFEIAQKIMEANRTKFIGKCGSKGYLFTSKIECGICGKNYRHKDREGKSTWVCANHIKYGNSRCIAKPLNEEKLKKIINEVLEVKAFNEEIFIGNIKTIKVTGNKTIEFILKDGKVIEKGMI

SEQ ID NO: 8870 - protein, 530 aa, synthetic construct
MAIARKITVIPAVEVFIPTNIESNSRLKRVAAYARVSTENEEQLSSYEAQVDHYTRYIKANAEWEFVEVYADEGISATSTKKRDGFNRMITDALEGKIDLIITKSVSRFARNTVDTLTTVRKLKDKGVEVYFEKENIYTLDSKGELLITIMSSLAQEESRSISENVTWGQRKRFADGKVSLPYKQFLGYEKGENGLPKIVESEAKTVRLIYKMFLEGKSTSWIAKYLTEHKISSPAGKDKWQETTVRSILKNEKYKGDAILQKSFTVDFLTKKKKINEGEIPQYYVENSHPAIITSEVFNLVQHEIKKRKAARGYKTGGGCFSGKIVCGECGSFYGSKVWHSSSKYRRVIWQCNSKFKNTEKCNTPHIYEDKLKKAFIGAFNSILKNKDEIIQGYETIIKALTDTSELDKESSKVQNEIEIVTEMLRRCVEENTHSVLNQTEYEERYNVLAQRYESIKKELEVIEKKTLEKSAKHESILAFIKELEKKDSLLEKFDEELWGATINTMTIKANNEVIFEFKDGTKLPCTLK

SEQ ID NO: 8871 - protein, 404 aa, synthetic construct
MDIIRAALYIRVSTEEQVREGYSVEAQRDNLKRYAKNKGYSVVGVYADEGITARKKYTNRKEFMRLLDDVEAGKIDIILFIKLDRWFRNVGDYYKIQEILERNNVGWTATTENYDTTTANGRLYVNIRLAVAQDESDRTSERIKFVFEKKVADGEAIWGLAPFGYKVENKKVVIDEDSYPIVVDTFEAFIKLRSVNSVCVYINEKYGTHYSYNIFKRILRDNTDFYYGTYRNNTSYCPPYLNKAQYEIIKEISDSTTIIRSSGKKYDYIFSGLLECGYCGRRLVGGGSTRKDNGKAYYGYRCTGYRGGTCSNRISELKVESLLFAALEDEVKKFKVDYEIKQKKKKPAYINKSAIEKKIARLRNLYLNEVIEIDDYTVEYRKLQDKLREYEESINKVEISKYKK

SEQ ID NO: 8872 - protein, 450 aa, synthetic construct
MDIIRAALYIRVSTEEQVREGYSVEAQRDNLKRYAKNKGYSVVGVYADEGITARKKYTNRKEFMRLLDDVEAGKIDVILFIKLDRWFRNVGDYYKVQEILERNNVGWTATTENYDTTTANGRLYVNIRLAVAQDESDRTSERIKFVFEKKVADGEAIWGLAPFGYKVENKKVVIDEDLYPIVVDTFEAFIKLRSVNSVCVYINEKYGTHYSYNIFKRILRDNTDFYYGTYRNNTSYCPPYLSKSQYEIIKEISDSTTTIRSSGKKYDYIFSGLLECGYCGRRLVGGGSTRKDNGKAYYGYRCTGYRGGTCSNRISELKVESLLFAALEDEIKKYKVDYEIKQKKKKPAYINKSSIEKKIARLRNLYLNEVIEIDDYTVEYRKLQDKLKEYEESINKVEDNKDFTALDNLLKSDFKEIYNKLSNIDKRTLWHSVIKRIIIKDKQIQEIIFK

SEQ ID NO: 8873 - protein, 504 aa, synthetic construct
MYKASNGSGELMENNVIRVGGYIRVSTQEQAKEGYSIPAQTKCLKSYCSARNWILHELYIDPGYSGAKMERPALQKMLSDIKKGLVDLVLVYKLDRLSRSQKDTLYLIEDVFLKNEVAFVSINENFDTSSAFGRAMIGILSVFAQLEREQIKERTQMGLAERAKNGMWHGSGITPIGYDYDPASNQLVVNEYEAMQIREAFDLFVNQNYAFTKIVKTFRNKGYSHKHGVWAHSSKLRYILSNKTYIGRINWNGEDYPGKHDPIIPSSLFEAAQKKLAEKDWKLTDKPAKSPFDATQLLSGVLFCGNCGGRYYGAGCYRGSHDPNSPKRRYEHIYSCYSRTKTKLEMIKDPSCKNKNWKTETLDNYVITRIKNLRLEGEIENLIAKERPQKPGIDQRKALEKQIDDIDRQISRLLTLYQLEDVPTAEIGLRLSDLTRKKKTVEEAIENIPLYEPELSVAKAKSLLADAEEIFNCGTTEEKRSLIHALIRKIILTGNDVVIEWAFI

SEQ ID NO: 8874 - protein, 502 aa, synthetic construct
MSETTQIGVIYARYSSDKQRDESIDGQIRECMAYAEREGITITNTYIDRALSAKTDDRPEFRQMILDSNKQAFDYVLVYQLDRFSRNRYDSAIYKAKLRKNGIRVISVKENIKDDPSGIILESVLEGMAEYYSAELSQKVMRGMTDNVLQGKWVGTVVPYGYKLSNNRQLEINEHEANVVRKLFDMYLQRHTLSEMASYMNANGHLTHKGKPFNTNSIKAIISNEKYIGVYSWGSERIENAIPPIIDKNIFEKAQHKRNLRAKKKGNRSELYQLCGKLECGRCGGNYVGSTGTSKTGAMHHYYVCSNRRRKNACKAQNIRRDALDDIVISQTLAILNKPNVVNKIAEYAASSGKNLQSETVAQIDIIDAHIRDLKKSLDNYMTAIANGFISDVLKHRIETTEQELKDHIEIKTSLENTIIPVELTEDHIRFFLLKMAKENPSTLRGRARIIEAFVHHVTIYEDHIEIVFNYKNELSEFHDKTLESSLLNDLVTQKGFEPLAF

SEQ ID NO: 8875 - protein, 544 aa, synthetic construct
MNQRRIVAIYARVSSEKEAQLYALENQKQYYEEILDGRPEWTLYKMYVDEGLSGTMTNKRVNFLQMIEDAKEGLFDLIITREVSRFARNTVDTLTYTRKLKSVGVEVYFTEDNIWTLNDEDGELKLTIIATLAQNESKKISVRSKAGQHISYLNGVLYGTGNILGYERVGRNLVVNEKQAEVVRTVFDLYINGMGTRKICFELERRGYASSSGLTKWQPGTISAILRNSFYCGKIVYRKSYVPDYLNHKVKINRGEIEQIVVEGTHQPLISVEIFEKAQRILQSKTSYQRNIGKGQKRSEDVWVRKVRCCCGRTLARRTWHRKKDDGTGQITYRCRSQIETGSIATRKNNGLSIEGICDTPWVQRWKLEAMLYVLFKHIWQYRDTIIENAVAALKEALTPGKTKTVNVEQQLAGLEQQEGRLLDLYLDGMLTKEQYINKKQKIENEIKILQSKANSGNIGSVEEITSRIQTISSLFKVYFNENGPQIPEEIIDVFVERVIVHKEYFEWHVNCSGEVIECCVVGNKKGCTVEEFDSSQKKKVSLL

SEQ ID NO: 8876 - protein, 456 aa, synthetic construct
MKNKEDATALVRVALYIRVSGEEQKIKGLSLEAQQERLEEYARERGWVIVGTYIDAAKTARKNIHKRTEFQRMIQSVKHNEVDILLFCRLDRWFRSVGDYYKVMEILQSHNCDWKTTDEEYDTTTANGRLYINVKLSIAQNEADIDGERIDVVFDSKIAHGTVVSGSTPFGLRVNSEKRLEIIPDDAAIVQDAFNYFETTVSQRATTKYIREKYGVNWCYATFHRMLIEELYTGVYNRGDRYNANFCPAIIQRRQFDRVQMLLKKNVRHAPSGRVYLFTSILNCKECGHKMNGYISQGIYYYRCNQHIQRGKCLHNHSAREDRIEQWLFDHLDEELERCKLEWKVKAAERKRASSAKDKAALKRKLTKLKELYVNELIDIEEYKKDYVIYTSALEQIPDMPQESPPDFAAVERILDANYRKIYNALTREDKRTLWRSVIKEIRIDNDQKITGINFE

SEQ ID NO: 8877 - protein, 502 aa, synthetic construct
MKKVAIYSRKSVLVEGSVSIETQINMCKDYINNKFPNVKFKVFEDEGFSGGNTNRPAFQKMLRMAQLNEINIVVCYKVDRIARNTLDFLKILELFKENNVELISISEGFDPNTQMGKVMLTLLASFAEMERTNIQQRVKDNLLSIAKKGKWTGGSPPTGFKNGLNGGLEWDKKDMILDVFNMKCEKEKNSNIIKYIKEKYNHNFLGGTLATTLRKPIYVKSSPSVSLYLKTKGYIVQGDEDNIHSYLTYTDKETKYAIVSDIVGLIEPSIWISINKDMDKNISREGNRFSEKFWLTKTVRCKYCGQTFCGQTKTTKTKYYNKYGEEKIYISTYSYYSCRDAVRGKLKTCKNTKRVKQEILESKVSELIHLLKDKKTFNSSYFSNKIDNSSKIDTIKKQIKNIDKTINNLTDKIALLSNEASLIFISKLEELVKEKSILKDNLLQLELQELNSNNKKDSLLVYNNILAFNDNLSVDDKRKIAMSLFKEIIYDPETDLLDVTFM

SEQ ID NO: 8878 - protein, 571 aa, synthetic construct
MWGKMSKSAQLITTVLSSKKIVAVYCRVSTTEQAEEGYSIEEQERLLIKYCEDNGYAVFKVYSDRGISGKSIKARPAMKEMLRDADDKKFDMVITWKINRIARNTLELLQIVDLLEKNNIAFKSYSENFETETPMGKFSLQMMGAVGELERGTIAQNVKMGMLARAREGRWNGNVVIGYDLKPIENSTNKKRKDTELVINPKEAEVVRTIFKMYSEGNGYKAIAGYLNKYGHTTKRGNSFAVSSVKDILNNPVYIGKIRYNVLQNWSEKRRKHKNPNPILVDGIHEPIIEQELWDKVQNLLESSKGKPSRIYDGEFPLTGILRCPECGAGMVIMRSTRTKKDGTKRRLEYYCCGNWKNRGTAVCHSNAIRADKANEYVFGKLSELLSNDKLVKDIVSNINSTRKAMVDPSKDELEKIEKELDKIESKKKKLFEAYEEEIISKEDFKGRVAELKEREKVLQEDANNLKMNVMDDDVQEVSYKLVKETLSQFGTMISNNVSREQQKKLLHMLISKITINELREVDSIQININDNLIAYLNNGGEPNPDGGGSPFSFVSRRRLMINPINVRICI

SEQ ID NO: 8879 - protein, 514 aa, synthetic construct
MRRKKVEGGNRLVAYYRYSGGSGQTEQSIEGQRRDCENYARLHGLTIVHEYIDRHISGKTDDRAAFQQMMNDGDKGAFDMVICWKTDRFARNRYDSAVYKKRLRDNGIEIFYAAESNVDGAEGIIIEGLMEALAEYYSAELAEKMRRGMRESALKGQAINRCRSLGLTTDENKKYVIDEKTAPTVRFIFEHYAAGESSASIVEQLNAKGLRTSQGNPFNKCSIPRIIQNEMYRGVYTSKAYNVRIEGAIPAIIDDDLWKRAQAMMKTNRQLKAKYEPKAEYLLSGKLFCAKCGCTMKGVSGHSGGNDEVYRYYACSNPQCRKRNIPKDDLEGKVIRSICDHLLQPETMELLAETMVDVQKADMEKPNAERDVLEQELWDVRRRSKNIMDAIETGSANPQLVARLDDLTQQENTLTYQLSTMEAEKPLLFTKEQYLFLLQQFYAQPTEQDDAYKRRLINTFVTNIEVSDSELLIYFNISEETENKNKNAPQLNFDKSSSTEKRLVRVARIELTAS

SEQ ID NO: 8880 - protein, 514 aa, synthetic construct
MRRKKVKGGNRLVAYYRYSGGSGQTEQSIEGQRRDCENYAKLHGLTILHEYIDRHISGKTDDRAAFQQMMNDGDKGAFDMVICWKTDRFARNRYDSAVYKKRLRDNGIEILYAAESNVEGAEGIIIEGLMEALAEYYSAELAEKMRRGMRESALKGHAINRCRSLGLTTDENKKYVIDEKTAPTVRFIFEHYAAGESSTSIVEQLNAKGLRTSQGNLFNKCSIPRIIQNEMYRGVYTSKAYNVRIEGAIPAIIDDDLWKRAQAMMKTNRQLKAKYEPKAEYLLSGKLFCAKCGCTMKGVSGHSGGNGEVYRYYACSNPQCRKRNIPKDDLEGKVIRSICDHLLQPETMELLAETMVEVQKADMEKPNAERDVLEQELWDVRRRSKNIMDAIETGSANPQLVARLDDLTQQENTLTYQLSTMEAEKPLLFTKEQYLFLLQQFYAQPTEQDDAYKRRLINTFVTNIEVSDSELLIYFNISEETENKNKNAPQLNFDKSSSTEKRLVRVARIELTAS

SEQ ID NO: 8881 - protein, 494 aa, synthetic construct
MRVVGYARVSTREQADHGYSIGEQNSRLRAYCQAKDWTLLRVIEDPGFSGAKMQRPGLQQVLEMVRRRECDAVLVWKLDRLSRSQKDTLYLLEDVFLANGCGFVSMLENFDTSTAFGRAMVGILSVFAQLEREQFKERSAIGRVGRAKAGLFHGGGYAPIGYDYYTKEDGGQGLVVNEYEAMQVREVYRLYLAGWAVHKIQVYMHERYTTKNGCWASDTTVRSVLSSQIYLGRITWAGKTYEGQHEALISQNDFDQVAARRESLKWQPAEPRAACDLIKNSPFRSTHILGGITWCARCGARYFASGNYSGRGENRKYWPYYTCYSVAKSSKKMIKDPNCKNKRWAVGKLDAIILSEISRLEFDPAALAKAAGPVDVSGVEEKRRVLEARVAEVRPQMERLLDLCQTGGLPVASVSGRLAALQKELDALNGELSGLAVPETVDRLAVAQEMLADASAVIENGTPEQKRALVHSLIGRIDIDGEDITIHWLFAPEN

SEQ ID NO: 8882 - protein, 525 aa, synthetic construct
MAEVLCIPKTIPERTGYQIRSIRVCAYCRVSTDDDGQYHSYDAQMEYYKGLIQKNPAWEFCGIYADEGISGTSRWGREDFQRMLEECEKGWIDLILTKSITRFARNTVDTLSTVRHLKEIGVSVYFEKERLNTMTEESEGILTIYGAVAQQESENISQNVHWSAVNRFKHGTFVISRRPYGYDKDEEKELAVKKDEAAWVRRMASMYMNGMSGVRIAECLNQNQVAAPYGGLWSSEAVLRILFNEKTVGDCLHQKTYSTGTVPYRTEKNRGKKPQYFIRDDHEGILSRDEQMRLQQIKEHRLGRQARMNPRGSGETYILSGKVVCGECGRTFIRKKEQRRKGVSIKWRCPGHRSEECQCYTNEIWEVDIKNTFVNAFNTLVGHADELFGPIIQGVKRIQEANGLHEALGTLNQKKLELKEQRHILRQLKANECIDSALYFEESRKIERELSRCRSEEKQLHSRGIHQDTITGLQATLHQLQGYDGKMQAFDGDQFILLVREVSVGKERELGFHLRCGLNLYEPVL

SEQ ID NO: 8883 - protein, 449 aa, synthetic construct
MLKRAALYIRVSTDQQAKHGDSLDAQIATLKDYVSTQDNLTIIDTYIDDGISGQKLYRDEFQRLLEDIKKNRIDIILFTKLDRWFRNLRHYLNIQEILDNSGVTWLAVSQPFFNTDTAYGRSFVNQSMSFAELEAQMASERIKAVFENKIRKGEVVTGSVPFGYKICDKKLIPNENAPIAKDIFKHYSIHNSIRLTVEYLFNEYDITRSSRTIKHMLRNRKYIGEVSGNKNYCPPIVDKETFEKVQNLLDKNISSIAKRTYIFSGLVVCSCCGKKMTGRYRKRKYIKKDGTVMYYTKKVYRCNGNTYKRNKCPNKINIAEEILEEYLLNNIKADAENFEAKQKKIAVSAPEKNNNSKILKKIERLKKAYLNEVISLDEYKKDRKELEQMIVQVKPKETIVFKSNWFNKNIESTYHDFDEEEKRFVWRSVLKNLIVDPHGKITINFLTKN

SEQ ID NO: 8884 - protein, 475 aa, synthetic construct
MKTTNKVAIYVRVSTSYQAEEGYSIDEQKDKLEAYCKIKDWKIYDVYVDGGFSGSNTKRPELERLINDTKRKRFDIVLVYKLDRLSRSQKDTLFLIEDVFLKNDVAFISLQENFDTSTPFGKASIGMLSVFAQLEREQIKERMILGKEGRAKKGKAMSWTTIPFGYDYSKETGILSANPTQALIVNRIFNEYLNGKSVVKIIRDLNAEGHVGRKRPWGETITKYLLKNETYLGIVKYRGRKYEGQHEPIISQELFGLVQLELKKRQIDALKRNNNPRPFQAKYMLSGLLKCGYCGGSLGLYVTSKNRKGKAYQRYQCRHRFDKDKSKRCNSKWYDKQELEEKVIERLSKIKLEPKYRKEMLAKNDETMKVEEIKGQLKKLNNRLNKLTELYLDEIITRKELNAKNEKLKIEKAFLEEQLESKKKNTINLRQRKLARLLKDFNPEKLGYEDASKIVKSVINEIVVAKEEMTITLDF

SEQ ID NO: 8885 - protein, 601 aa, synthetic construct
VVDKIFADISSIIIFASKKNDKVMKGAIYSRVSTEQQDYSKQTNELKDYAKRNGIEVVYVFEEKESGFNNNRPEFEKLRKLTKQDIDIILVWEISRISRRAIYLQQQVQEFTDKGICIYAKKDGFSTLNDDGSVNASTKMLIGFASIIAEQEAATLKERTISSKRNKILREGKSYTYYAPYGYDYNKETKMLSINEKQAQVVKRIFQLSIDGYSTERIAILLNAEKIPTKGKKENWTAGTVCNMLTNPVYKGEANYTLKKEKKAGSTYCKPMEVVTISTPAIIEKEQFELSLQKLAERTKRSNSFGTKYNPLLRGLIHCPHCDVKYVYNFGTNQYLCVNKYKKASNKNVHCTAKCISNKLDSIVWNVVKTFFYKELAAGKAQEQIEPLQAEIESYKRQILLLDGKQSELTARANIIVDAAIEIKIQFPNMPDLYANKMKEVEEINKEASKYQKEKERLEKLIHSNDARIKNINRASKESALVESITDETEKYDLVHKAIDKIMIFGEGKTSIIIVTFSTGQTIYLGYSSKSNSKYYTIFYPSSDIYFDIQTSKGYINHLKEKATINSDGSIYLGDLTGEVKEYSIIDFVNYLDIEENRRYY

SEQ ID NO: 8886 - protein, 507 aa, synthetic construct
MKKDCFLYCRTSTTDQITSIKAQENFKSNEYNILEIFSDFGKSATKVKNRPQFIDMLNKCGVKIVSLENKIVFLPNGKKPQTNLIIVSHTSRFMRNAKYMEDVLDTLKEVGVEVRFLDMNKSSYDIDFKFTLSILFLLDEQESRNTSIKVKNGLKKAREQRQYLHYGFGNMLGLDYIKEENRLVKNKDSHIVENIFIDYGINKLSMRELANKYNKTADKIRRILMNEKYCGYNAYNKYNEDNRSTLKENYEIFESDRIEAIITKELFDKCQEIRLSRKNSDGGGKATDTYSLSSKIICSQCGKSYFHKAKNKKGDTWCCITKHNSKQCDNPNVNEDLIIKYINQNLNRYKEITQTLINLSKERLIKIDITNMQNELLKLQTSKDKLLDLYLTDESFDKETYLFKNAMIESNINSINSEIKKAQSIDESIEYLEKLQNSYNLQFNLFHDILNNNKYDIFNYISKIQVSKNFDVASNSIKPNIDYVIFKGFEKLHELEISIFPSATKFY

SEQ ID NO: 8887 - protein, 523 aa, synthetic construct
MRFFSYGRKSVFSDKSDSIDNQFRMNREYCESKFSGQVDSWQQFSDEDFTGANTSRPDLQRMLSFIKGGFCDVLVVYQLDRLSRDVRDFANIYALLEEHGVMFISIKENIDTTTPIGRAMMYVTVVFAQMERETIAARVTDNMLGLAKKGYWTGGNPPVGYVRKHIVVDGKKHCSIEVDPDRARYVTQIFDTFLAYNCSLQGMETRFKNQGIRTQSGKFFSTTQLHKMLTMPYCVEATPEVYDFYAAKGCIMDPGSPREMWDGSVGVIIYGRSTEKNKKHQVQPPEKWTVCLGKHKPFMPAEKWLAVQSRFTQNKCIKDAKWPVPLLKGVIRCKCGNLMQVSRKKKVDGTCSSWYYCRKRMRQGVDACDMGQIKCDLLDDKVLELFRGIAADPGLIQKFVKTKAPDDIPNLKAAQARVAACERKIGRLAASLALAEDSTASKYIIAEMERLDVELGALKREASLAEMESHRATANAKDAKATAVEIAKLIHGLEGFDDKEKNAIARAVIQECTWDGERLFITL

SEQ ID NO: 8888 - protein, 565 aa, synthetic construct
MDEDRKIVALYVRVSTGYQVDKDSLPFQKKELRAYCEHVLHIGKKRIEVFEDAGRSGKNTKRPAFERMMEKVKSGQVSHVIVYKIDRITRNLVDFSLMYDDFKYNNVTFISLNEQFDTSSAIGEVILKIILVFAELERKLTSERVKDVMIGRAQNKQWNGARVPYGWDWDSEKKCPVHSKKEAPYARAMYQMYLDGGSSVTICDYNNSHNIPTKRGGEWTSKTVADFLRNPINKGDYRYNYRESARGKKKSDDEVIYIKGVFPPLIDPNIWDEVNRRMDANSQNRNTSVFHPIRKRCNVFAGLMICGKCGSGYQVKGKDSRKGDGFRPSSYACTGKYQKKNCDNLNVSDVKIGPFMLNYIAAMVDASKSRRFIKDSESLEQIILSHISFSDVAGISASSLQDTLDLLFGRSGSELLSGKPVSNEAADGSKTEELKEKLQRTDRALERLKKAYLFDDDGMDEKEFLEMKSKLEVDRIKLENSIKGLESSSISENVDQAAFLKSASQFLISHKINSGDYIDYSRLAALDEESMKAFVNSIIDHIVVLDKRITEIVFKNGLTHKLLYR

SEQ ID NO: 8889 - protein, 541 aa, synthetic construct
MEVLEVIRKKSRAAAYCRFSSSNQREESIDAQLRAIYKYMDEHDYTPVGDYIDMALTGTNTDRPNFQRMIEDAKKGLFDVVIVHKMDRFSRNVRDTLNIESELAQYGVKVISVIEQFADTPEGQLQQIIQLGVGQYYSQNLAREVMKGLKENAYRCLHNGGLPPLGYDVDPITKQYIINEKEAESIRIIFKKFLEGWSYRELAEYLNVLGYRTKIGNKFSANSSFYDILVNSKYKGEYVFGRSLSKPKQPGMKRSHRKNKDESEIIRVPNGLPAIIDEGTFDQVQKLLSSRKRSKGATKAKEVYLVSGLIECGECGSSYHGSSRIGGRNKQKYVSYRCSKRKKIENPCKCKEINRTLLDEFIVNQLFTTILNSQHLEMLHEKVNEKLKQKFSEMDHDLPKLEKQLAEVNQKASNLVQAIAVGGLGSIETITAELQRLEQQKIVLTNEIQNHQVKQSEINITLDQMKEVLEEAKGYVLKNHDEMMKYILSRFIHKIIVKNEAIEVEYNLGGFFVDFKQIILLEIRTYSRKAIYSCSPLKEVS

SEQ ID NO: 8890 - protein, 584 aa, synthetic construct
MAYRKITDIRDTIGMRAVFYARVSTAEEEQLNAIELQIEENRGCIKDHGWKLVGEYIDRSKSGTMVKGRDDYQRLYEDLYEDLFDIVVIKDQERLQRNTLDWYLFINRVVQTGKLLFMYMDGKFYSPDDALITGVRAIIAEEFSRNLSKKLHNYHDHRIEKARQGQEIALQGSGNVYGWDKKDGKYYINSEQAKVRRLMCEGIMARKGSTLIAKELNDAGYRNTVGKPWKPMDIPKFVYDCKNVGTMIINKERHDFESKQTIKLPKEEWVYVENALPPIVTQEEWDLICKIHEERVIATGSDRRGKKTSGYSFSGKLVCGICGAPYWRKQRVSKDEYWVCSTKQTKGRRTRKRDSTMGKAGEINPLGCDNENISYNSLMEIMGVVSERLQANTDTIKQDMINWLTKLRKQLLEANGGHTEADLQRELSRKSKLLDAYLDGILNKQEYQKKAEELDERIIQLKAETEKNKANSGDIAEIDKVLANIDEEVSRYVDGNEKLKVEYLLEHLEQVQIFPDKVIVIVPILSEGIVVEKTQYVSREKRCRQDYLYENDRWSGKADKRRDIHVWIRWKGFVKGTLKSGLPD

SEQ ID NO: 8891 - protein, 519 aa, synthetic construct
MKKVTKIAETASSKVKLKKIRVAAYCRVSTDSDAQLESLEAQKTHYENYITSRDDWEFAGLYYDEGITGTKKDKRPELLRLIDDCKAGKVDFVITKSISRFSRNTTDCLELVRKLLALHIPIYFEKENINTGSMESELFLAILSSMAEGESVSISENSKWSIQKRFESGTYKVSYPPYGYDWDGEQMVINPEQTAVVKEIFAALLSGKGTHAIADDLNRRGIPTKRNGRWTATTIRGMLSNEKYVGDCLFQKTYSDSRFVRHNNHGEQTQYMVKDHHEAIISREDFEAAHAFIHQRATEKGVVKGSDKYQNRYTFSGKIICGECGDTFKRRIHSCTGYKYTAWCCSTHIKDKDKCHMLFVKDDDLKQAFVTMMNKLVYAHRIILKPYVDALKNTSSDDSLRRIQEIQTLLAQNTEKRETLTKLMTQGIIDPILFNKETNELLSQADSFRDEINALKNAVSGDVTKVTAATALLHFTEKGGILQEFDDDLFNEYVNRIIVRSRNEVRFELKCGLTLRERM

SEQ ID NO: 8892 - protein, 522 aa, synthetic construct
MGNVMVIPARRQVGNTVKQSAQKKLRVAAYCRVSTDSEEQETSYEAQVTHYTEYIQKNPEWELAGIFADDGISGTNTKKRDEFNRMIDECMAGNIDMVITKSISRFARNTLDCLQYIRQLKDKNIPVYFEKEAINTLDAKGEVLITIMASLAQQESQSMSQNIKLGLQYRYQQGKVQVNHNRFLGYTKDDNGHLIIDPEQAEIVKRIYREYLEGSSMDKIADGLMADGILTGAGKTKWHTSTINKILRNEKYMGDALLQKTYTTDFLTKKRIKNNGTVPQYYVEGDHEAIIPKELFVQVQAELVRRRVVHVSPTGKKRSFSCNHCFAQMVFCGDCGELYRRVHWNNHGCKSIVWRCISRLEPTSAEKNCTNRTVNELLLQEVTIKAFNQILTERDVFLKTLQQNIAKAVVNADTLSPDGIQSRLLELQKELIKKANNKQDYDAIADEIFRLRDQKEQSEVDSHHREEAMNRIKELQDFISGQETDITGFDETLVKKLIEKITVFADHFTVEFKSGITIDIEA

SEQ ID NO: 8893 - protein, 580 aa, synthetic construct
MVRRKTALRGVSASTRITKVAIYIRVSTIHQVDKDSIPMQKKDLIAYCQLILGTDNYEIFEDAGYSGKNTDRPAFQDMMGRIRNGEFTHVLVWKIDRISRNLLDFAEMYEELQSLRVTFVSKNEQFDTSTAIGEAMLKIVLVFAELERNMTSERVTATMISRANNGQWNGGRIPFGYSYDSGTSTFSIREDEAVVCRRLKDLYLDNKSLVYTARALNTDGYKTRAGADWTPTAVWIIASSPFYAGIYRYNRYKGTENRTLNPEEEWVMIPDHHPAIFTLEEHEAMKSSLKTNARYVDNPVGKPHATANIHIFQGIAYCGKCGNKMVSTPGKKHADGYRPSNYSCPLHRRSKKCDNSTVNDMIVGEFAINYILNMLNAKKTFSNIDTPEELQRHLLTGSTFSDISSIEEDGLNDFFNLLSRYGSDNSYVFAIKTPRRKKASVNPELAALRKEKEKQERALQRLQDLYLYSDKSMSEKDFILRKSEISDRLKNINAQLGLITQNPDSLLSDEEFIKQASHLLIQKELKGRKYIYYKNLATSVDPEILRTYMETILDSMYIIDGRISSIVFKNGLTHKFIYKN

SEQ ID NO: 8894 - protein, 516 aa, synthetic construct
MQKNNNIGNRCVIYARYSCSNQTEQSIEGQMHDCEQFAARNNLQIVNSYIDRATTATTDKRPQFLKMIADSKQCVFDVVLVWKLDRFSRNRYDSAMYKKKLKDNGVRVMSAMENITDSPEGVLMESVLEGFAEYFSKDLSQKVKRGMRETAAKHKITNRIPFGYCKSEEDTYIPDPHTANAVRKVFDMYITGFRKSDIADWLNSNGYKTSYGNQFTLTAITPLIKNTRYIGKYYYADNEYTDETQRIVTDDIFYKAQQKAIANQHGGSCKAIERYLLSNKLYCGYCHNKMIGECGKNQNGLAYHYYTCVGRKRKHICNRKNIKKKDIEQYVINAISCLLNDEYAINKIIETAINYQQNDVEHINEIKDIESTIKEIERKISNILSAIEAGIFTDSTKNRLQELENQKTRLTQELNYKNQSSTKIPRTTLKQILKNLDLSEAATNPEKQNIIDLLIHRVYLWQDKILIVFNQSNLCDNEISVDDTDVNTIIKTLSEPNASSSDSVEYGTPDQSRTGD

SEQ ID NO: 8895 - protein, 518 aa, synthetic construct
MKAAIYSRKSKFTGKGESIENQIEMCKKYAANNNYIETYIYEDEGFSGKNTNRPEFKQMMKDAKMHKFDAIICYRLDRISRNVSDFSSLVDELKNLNIDFVSIREQFDTTNPMGTAMMFISSVFAQLERETIAERIRDNMYELAKTGRWLGGTPPFGFISEPDYYLDANGKQKKMVKLSPVESEIELIKTFFEEYLKLGSLSKLQKYLIKNNINTKRNVAWDIKALQLLLRNPVYVKSSELVISYLDSKGAAVFGEPNGCGILSYNKKDSKDKYKDIKEWVLSIAKHEGVIEDTLWLNVQKQLDRNKCLAPRLVSNDASGLFNSVLYCSHCGSKMIQKQGHISAKTGKKLTYYVCTNKINSSGELCKCKNIRADKLEHDVLEQLFEETSYNSSLINAIEEYKKELQSEMYSKSDINSIKKLIKQKQLQIDNLLEKISLNPNLYDLFEKKLEELNSEVKQLKFKKFELEDSTANIALAIKEIDASTKMLLNFKKLWDNSDHPMKKLLISTLVDKIDRKS

SEQ ID NO: 8896 - protein, 576 aa, synthetic construct
MKKNFKMPGSGSETPIRVAIYVRVSTVYQIDKDSLPMMKQDLTSYCKYILNTDDFVIFEDAGYSGKNTDRPAYQKMMSQIRQGLFTHLLVWKIDRISRNLLDFANMYAELKDLGVTFVSKNEQFDTSTAIGEAMLKIILVFAELERNMTSERVTATMINRASNGVWNGGRIPFGYSYDKPTQVFSIDPGENKVYNFLVETYEDTQSIVHTSRKLNEAGYRSRNGNMWSPVAVWTILRNPWYKGVYRYNYYKIPGRKAIKDESEWVIVENHHPASIDPDRFDRIQATLDKNARYRNTPGRKTAQKNVHVFSGLIWCAECGSAFTASPGKLHVSGYRPSKYGCPNVRKTKTCHAKYTSDVVLGEFLLNYILNILNAQKQFAYIHSTNDLQKRLLHGSTFSNVDHVDPDGLASLLNMLEKCSGSDPVLLKRPRSKPKMDPELKRMMADQKKQQRALDRLNDLYLYSDDSISEREYLVRKQQITDRLQEINEAIGMMSQEPWMRTMNDEEFIRQASSFILTQKLADKQYIYYENLAESLDPEILKNFFVSILDSIILRDGRPETVVFRNGLSHTFTYKDS

SEQ ID NO: 8897 - protein, 523 aa, synthetic construct
MNENVCIYLRKSRADQEAELRGEGETLARHERILLDLAKSRNYSVGAIYREIVSGETISARPVMQQLLREVEAGSWDGVLVVEVERLARGDTIDQGVVSRAFQFSDTKIITPTKTYDPDNEFDEEYFEFGLFMSRREYKTIKRRLNAGRIASVKEGKYCGSKPPYGYERVKLHGEKGFTLQPVPEQAEVIKMIYSLYSGASGDRIGVSKIVRKLNDMGIKSPSGKSWVPISVQDVLANPVYAGMIRWNGRKTVRAIQDGVVTQSRPRSKEDDILLFPGRHPAIVSKEMYDSVQQIRKKNPPRPISIKNTIKNPLAGIVYCSKCGRAMVRRPYQKRGQDDTLMCSYTSCPTVSSKLSLVERAVLNGIQDLVDEYRLNDAVPGPDINNAVKSKKKLIAEKEHELEKLNVQKMKQYDLLEQGIYTTEVFLERSNSIASSINSCQDSIECLKEEIRHDKELIDQRSSFIPRCENLLEIYWSLDTAAKNKMLKELIERVNYTKDVKNAFRMGNEATFVLDIFPRIQSN

SEQ ID NO: 8898 - protein, 478 aa, synthetic construct
MPKIKVGIYIRVSTQEQANEGYSIDAQTDRLTSYCKSRDWAIYNTYIDGGFSGSNTNRPALHQLMQDIQDKKLNCVLVYKLDRLSRSQKDTLYLIEDVFLKNKIDFVSLNENFDTSSPFGRAMIGILSVFAQLEREQIKERSLMGRIERAKNGLWHGGGFEPFGYNYINGQLIVNEYEANIVREAFELFLQKLPIHRINRIISEKYGKEFHETVLRSILSTRLYTGKISYLGGIYDGQHQAIITEDTFKAAETLLAYRKKKFSNSNPFKATRLLGGILYCAHCGARYLAKGNYSGHGNKKVYRPYYTCYSRAKCTKKYILDPNCKNPSYAVVVLDEIIINEIRKLFINKEYLYSAKNATAATNTINKQKSILKQIDSIQSQISRLLDLYQIEGISIDDIQDRIKKLQHEKDVLEETFSNLKTNQKKKLTTTEVLSMEASFNEIMENGTDMEKQAIVRTLIDKIIVHEELNSFEIIWNF

SEQ ID NO: 8899 - protein, 461 aa, synthetic construct
MKLERCAIYIRVSTAEQMMHGKSLEAQREYLEAYASEHNMVVAGVYADEGKTARKELKKRKAIHALLEDVKAGKIDVILFWRLDRWFRNLSDFYKVQDILDEYHVRWISTSEPGINMETRDGRLQLNVVLSIGQNEVDTTSERIKFVNEASIRQGKLIFGDANMGYGYKSGTVNGVKCMIKDPEREEAVNAFYQYFFKHQSKTGALKYIQENYDPDFSYSSMRTLLSSEFYKGTYRGAPYCPAYLSTEDWDRLQKISDKNIKVNRSNRVYLFSGLIYCPNCDNLLSGCGCSSIINRKTGAKRTYCYYRCNKAYMDNHCNYRHRLSQNLVESYLLEHLEDEYQRYHVRSGQIREKQKKEKKIKTPEKLRSELERLNLLFQKGRVEWEYYNKEYSRIEYELKETLAIQPEIERDVSYVNEIIQSDFRSMYAKLSLENRRAFWRSIVSDIHVAKDSTVKEVNFL

SEQ ID NO: 8900 - protein, 535 aa, synthetic construct
MKKKQPNARHGRAAIYARYSSHNQREASIEQQVKACRELAVRLGLDVVETYEDKAISGKSDRRPSFQRLLRDAEKGYFDCVLAWKSNRMGRNMLQAMTNEARLKDWGVRTFYAEEDFDDTAAGRFALRNMMNVNQFYSENMAEDITRGMMDNASKCLSNGALPLGYKAGENGRIVLDKAQAAVVQEIYTRVACREPFVDIAADLNRRGIKTKRGGPWTKSSFYTICRNERYRGIYIYDDVRVEGGVPRIVSDGLFYRVQEVLKVKKTPQSARHHTGAEDYLLTGKLFCGKCGRPMTGVSGTSRSGEMHYYYTCQKRRRERACDKKNVIREQIEKSVAQAIKQYMLTDEMIQHMADATMAYNARQEKDLHLQDLQGQLAAVKTSAANLLKAIEMGVITETTKARMVELEQEQGRLNAQIENARAELVPITRDNFVSLLHIYRDGDINDSKYLASLFETFLVRVDLYDDHFLIWFNPLGQKTPADIPITSIENGDIDEFFDECRSKNVFDWGGKWSTKIKAPAVPRRVFLFWCSVSC

SEQ ID NO: 8901 - protein, 516 aa, synthetic construct
MAQAQKQVRIIEPLERFVNRINLVGCYARVSSDSEDQLNSYNNQVDFYESYVNSLENSKLVKIYTDEGITGTRMDKRDGFLQMIEDCRKGLINTIITKSISRFARNITETLSVVRELKSIGVSVYFMTEKIDTAKMGSEMMLAVYAACAEIESKAISNAQKWAFRTRAKEGRYNQPKLPYGYQRIDGEVKVIEEEAKIVEDIFNKYVNKDFSVTKLVDYLNKHYFKKKKWSQSTVSSMLKNERYCGDMLLQKKYSPDVFPYKLVTNKGELAQYYVYDVFPKIIDRELFEKANEKLVNNKLKFNKNQTDGNREYLLTSKIKCEHCGGTFKRRVLRNKEYWSCSNHVASAKKCEVKMIGTDEIEDAFLKIFYKLKENIHVLEAYKKHIVNFTTNDDDRCELDLVNRELKKVTSSINTLVRYYQKDLISLEDYKKKHNELLVDKSVFEMQKCKLNEKIYQRFEVIQTQIIIECLESAKEITALDEEIFNTLVDSIEVGTLDIQFILKNDLKLKVERKQF

SEQ ID NO: 8902 - protein, 458 aa, synthetic construct
MRMIDDARAGQLDMIITKSITRFARNTVDSLMYLRILKEYNVDVYFEVENVHSLEANEMLLTILSSVAQQSSEDKSESIKWGYQRQFEKGKVYAANMYGYKSNRGTLDIIEEEAEVVREIFSKYLSGMSESKIARYLTENKVPKKNGSTKWDSGTIGRMLQNEKYSGDALLKKTFSIDFLHKKRYKNEGQKKMYFVENSHPAIVTKEVFKAAQVERTKRNMKSNDEKEVVESHHQNRYSSKNPLSNKIICSECGALYRRAVWTKRNKEKEPVWRCSNRLKNGNAICPNSVTLKEKPLLDALTSLINGKTKSKEKTRLELAKELSEYLNPKDIIEKKQKLNCELENVNSQINELLDKGMLLVARGVQDESQIEEHLAQCYQTKQMLKKELQKLDDKYNALKQGRQEKLLKTLEKNSNEHTVMTQEDLAVFIDRIVVKKDKIEIETIDDQKCELLLNQIS

SEQ ID NO: 8903 - protein, 555 aa, synthetic construct
MDIHEIRQQLKLKNIFDVKLRVTFYARVSSEKDEQLNSLDNQISYYKDLIRKNTNWQYVDGYIDEGISGISVKKRENFHNMINDAKAGKFDLILTKEITRFARNTLDSIKYTRDLLSYGVGVFFQNDNINTLDEDSELRLTIMSGIAQDELRKLSSRIKFGHQQAIKNNVVLGNSRIFGYVKVGKRLVIDESEAEMVKELFTLYATDNYSMKQIENIFWEKGYRNLNGNKIVHSTMSNMISNPKYKGYYCGNKVKIVDMFTKKQKFLPPEEWVMFKDETGEIVPAIVDEDLWERANEVLQRRSNDVKNRKGICNHDNLLTGKLFCTHCGKPYYRRDSKDRNGNKNSIWVCSGKVKNGKDSCPSFSIYESEIKPILFQVFKDTSANVDSLIEQYIEMYKSLDEDNCIAKNIKSIRNKVDLANRKKSKLLEYNISGKLSDNDFINMNNQISKDIEKFEEEIANLEEQKNSKDKLKEHIEKMKKLLKQAETDAQEKIIDKEFIRKYIDRIYVSPENGHLKLNIKIFTGDVTEKYLENLRSRTGHTFKKMIEQYENNIK

SEQ ID NO: 8904 - protein, 438 aa, synthetic construct
MARTIQQISFPAPMRPSLKRVAAYARVSSGKDAMLHSLSAQVSYYSALIQKQTGWLYCGVYADEAFTGTKDSRDGFQSLLAECRAGNIDMVITKSISRFARNTVTLLETVRELKALGVDVYFEEQSIHTMSADGELMMTILASYAQEESRSASENQKWRIRRGFERGELVNLRFLFGYKIEKGCVAVDPEKAAVVREVFRRALEGESLTSLAIDLNRRGFTGVLGGKWNSMRIREMLSNEKYLGNALLQKQYRNNHLEKKEIPNRGELPQYYAEGTHEAIIDQATFDAAQELLAGITENSPVKRPRQRSAFTSMITCTVCGRNYKRCTGGKRHFWNCPTAVQTDLPSCGTSQIPEKLLYDLAAQVLGLAQFDEGVFLERIKGIDALPDKTLVFHFKDGSTAERHWEHISRAKSWTPEMKEIARQRALAQRRGEKWQEP

SEQ ID NO: 8905 - protein, 525 aa, synthetic construct
MARAVTVIPPTIQPITHLARNAVVRRRVAAYARVSTSSEEQLTSYEAQVDYYTRFIQSKPEWEFVRVYTDEGISAVNTKKREGFNQMVRDALDGKIDLIVTKSVSRFARNTVDSLVTVRKLKEKGVEVYFEKENIYTLDSKGELLITIMSSLAQEESRSISENVTWGQRKRFADGKVSLPYSHFLGYRKGADGLPEIVPEEAETVRWIYSLFLTGKTTGSIASLLTREGIPTPAGKAKWQASTVESILKNEKYKGDALLQKAFTVDFLTKKQKKNEGEVPQYYVENSHPAIIDPAEWKLVQRELERRKSIGRSYSGNSIFSSRLVCGDCGGFFGSKVWHSTDKYRRTIWRCNSKFTGEETCQTPHLTEEEIKARFLDAFNALVADKDRLLDECRTMQAALTDTGSLDSEIAALLSEMEVVAELTKRCIEENSTTAQDQATYLERYNGLAERYESAKAKLEKLQAAKAQREAKAEDIGGFMFELAEYGESLTEFDDRLWLTVIDIVTVHRDGRLTFKFQTGHEMLE

SEQ ID NO: 8906 - protein, 565 aa, synthetic construct
MVLKKLLNNIEDENARKRLALYTRVSTIEQSEEGYSIDEQERLLRSWAEKNNYEVYKCYSDRGISGKDIKNRPALKELLKDAEEKKFDMVISWKINRISRKLADVLKIVDILEKNDITFKSYSEPFETDTPAGKMQFQMMALIGEFERGTIAQNVKMGMCAKAKSGEWCGGRVLGYDLVPVENQEGAKRKKNRLTINEKEAEAVRFIFNEYVNGKGYKAITNQLNKLSYKTKKGNDFSVGSIREILTNPVYIGKVRYNVRQNWSEKRRRNINANPIITDGIHEPIIDEGLWDKVQAIMESKKGKPSRIYDGEYPLTGILKCPKCGAGMVISRTTNKLADGTKKRIAYYCCGAWKNKGTSVCNSNTIRVDKANEYVFNRISELLSNEKMVKSIVNNINKERHKKISPAKKELERIDKELEKIDRKKTKLFEAYEEEIISKEEFKERKDELNKRAKSLQEEKEPLLVTLSDDVSEEIPYEFIKSILENFSKVLTESATREQQKKLLHMIISEITINEAREIDSIKLKINDNLVDYISKEEGVSIKDAPSSFMLRNVGVSTLNLDIAI

SEQ ID NO: 8907 - protein, 521 aa, synthetic construct
MKIAIYTRKSRFTGKGESIENQIIKCKKFIEFKFNINSDNIELFIDEGFSGKNENRPEYQNMISKIKNKEIDSIVIYQLNRLGRNARDIHNTMQLCEDLGAVIYSATEGFDSSTSFGRAVIGILASLAQLEREQLAERVKDNMYTLAKMGRWLGGQNPLGFDGTREYYIDENGKERSITKLKENNDELKSIKSIYKKYLEKKSLSQVTKWSLVNNLKGKNNGDFHSSTINAILQNPVYVKSSNEVLNYLIKEGYEVCGEPNGNGILRFGKDDNKIAAIAKHKGIINADDWIKVQEILKENTEKAPRMGKTNTALLTGILKCECGSPMRVAYGRLNKDGVKPYYYVCTMKSKSGGTRCKGKNINGSIIEEKLIKHIKNYNKNILIEELINSFNKSKEIEVKLTTETIDNEINKSNKSIKQLLNNLKLSIDKEVTEIILDEIATEKNKINGLKNQKEDILKNQCEVSINQSSILNIINALDEFDKTFDSLTHEQKQSKLKTLIKSITYKEDGKVHLSFNLKKN

SEQ ID NO: 8908 - protein, 582 aa, synthetic construct
MEKVKIAIYSRKSKYSDKGDSVGNQVEIAMKYITQHYPSSEYDVESIIYEDDGFSGGNIDRPKFKEFLTEENKKPFDILICYRLDRISRNIAHFSNLMNYITNLGTNFVSIKEQFDTKTPMGRAMMYIASVFAQLEREVIAERIRDNMIELAKTGRWLGGKTPTGYKSERIELVDVYEQSEDSVLEKKKKKATKLISIDEELELIQEIGYKFLELKSLTKLEAYFVKNKIATKNNLDFSVSTLRRILVNPVYAPNDKDVLEYFNKNGVTIYADGDRANFDGKYGLIGYGKKDGKKDRNIKDWIVSVGFHQPAFKEGIVWVKIQELLEKNKEKRYRADCKHDFLFSGILRCSECGSYMRPKIAQGERFYYICELKEKSRGMRCHSKNINGKALDELMMKKLEKIFVPTSEVYQELSKLTIKKDRIELDTKVEELNKKIKTNDEAMKNLIDKLKYMDIEVIDLINSELKRLKQENKELEDELIKLKTNKETEENFRDEESKMAELILDIINNCFKTFNYLDIKSKKDILRILIEDMQGSGQNVEVDILNTKISQNDKRLFSDMFEETANKKDKNVVSRLGLQFL

SEQ ID NO: 8909 - protein, 478 aa, synthetic construct
MNKVAIYVRVSTTNQADEGYSIDEQIDKLKAYCEIKDWVVYKVFTDAGFTGSNIERPAMTKLISAAKKKQFDTILVYKLDRLSRSQKDTLYLIEEIFIKNGIDFLSLSENFDTSSAFGKAMIGILSVFAQLEREQIKERMMLGKVGRAKSGKTMMWAHPAYGYTYNKETSSLDIVPAEAALIKKIYELYIKGKSISKLRDYLNDNKIFVNKSVPWSHRTISYALTNPVYCGMIRYEGKLYDGLHEPIITKELFNKTQEVLAERRMEASKKNPRPFQSKYMLSGIIRCGCCNAPMKSLLGMPRKDGTRTRRYQCINRFPRKTKPVTVYNDNKKCDSGYYYMEDVEHAVLHRISTLYSDEIEASEFFEDEITFDIQKVKDEITKIESKINKLNDLYINDFISLDSLKKQSANLINEKKIIENEIEKENSKQVNNLKEDALKILATNNIHDLDYEMQSYVVKSLIDKVFVTKEDMEILFKK

SEQ ID NO: 8910 - protein, 484 aa, synthetic construct
MQKEKVIPIDSLDLVDLYIRVSTTEQALEGYSVAEQEHRLRQYCAAMGHRIHKVHIDAGFSGASLDRPGIKETIKDVQKHLVRRVVVWKLDRLSRSQKDTLIMLEDVFLENGCDFISMMESFDTSTSFGRAIVGILAAFAQLERENIKERTMMGRQARLAKGHYNGSRPPLGYSFIPGSNDLQVDPYQAAIVREIFKLFLSGISINAIARKMEEKYPTVRTWNNTMIRRTLKNPVYIGKVNDNGILRDGIHEPLISEIDFQMANAILVHNSKIKKQSCRSRSLLTGLLYCGDCGARMHPRRIARGYPLRRYVCYSVSRTSKSMIKSDHCTNRLHPYTQEELEQIIIDEIKKLAADEDYISEVIRNSSEEAPADDTELFQERIEELNRQTDKLLNLYQIGAIELDQIQERLADLKQERESLTAALKETQTKTDINMDHLKIMSYASAFQIALESGDPEYTNSIIRLLIDKIVVLNEDIEIHWTFC

SEQ ID NO: 8911 - protein, 546 aa, synthetic construct
MKAAIYSRKSKFTGKGDSIENQIQLCMDYSKSIGIKEFLVYEDEGFSGGNIDRPQFKKMMQDAKDKKFDCLVCYRLDRISRNVSDFSTLIEKLNKLEISFISIKEQFDTSTPMGRAMMFISSVFAQLERETIAERIKDNMYELARSGRWLGGKTPHGFTSKKISFLDENLKERSMYQLEVNDEQMEIVKLIFNKYLELRSLSQLYKYVYHNGIKGPRGGKFDPSSLSGILRNPAYVKANEDILDYLRSLGMEVVGVPDGQCGILTYAKNTSNSIAAIAKHHGVIEPDMWLEVQSILNENKDKIPRISTGKTALLSGLLKCGKCGANMRIMYKGKRNDKDLKYYYVCGTKRSLGVEGCNCKNLNGPLVENLVIDKIKNCNIESVINAFNSNKAKVDTVFSDVRSEIDLFKNSISEKEKLIGNLVMELAKNTGSVASEYIISQIESLNGEIDSLKSKVSELESSSVDINSASLNLDIIVSNLKKFNYEVDDASLDDKRLLLFTIVDSIVWDDASGNLSIVYMGAKMDDLVSLSDGSHFCSDGRSYIYE

SEQ ID NO: 8912 - protein, 517 aa, synthetic construct
MRKITRLEPKKTALPTRKKVAAYARVSKDTERLLHSASAQVSYYSELIQKNPEWEYAGVYVDCGITGTLTYKRDEFKRMLTDCEAGKIDIILTKSISRFARNTVDLLETVRHLKSIGVEVRFEKEGIHSFSEDGELMLSLLASFAQEESRSISENVKWGIHKRFKSGEIGVANKHILGYQYDEEQKKYIIIPEEAESVRWMFQMYIDGVTLRDIADNLNNAGICTILGNDFQEASVRQLIFNEVYAGDIRRQKCYVSDPIKKDKVPNRGELPQYYMADCHEAIIDRDTYAKVKAEMERRASLLNPTYCFTKKIRCGTCGAQFTRKKGKVRGKTYVHWICRSKKETGVTCSSVNFSEEELKNICADVLETDSFDEEIFESRVKDIIVLKNGDIEFHLVGGETRRWKNLHLNPPRHKVTLTDAFQGKIRCAKCGNTYQRVNSANKWVYWYCMGKTKKGMTCDNINYTDFQLRQITAHILGLEDFDEQVFSEQIEGITVLEDGNLEYHFYKGRTERWQRV

SEQ ID NO: 8913 - protein, 524 aa, synthetic construct
MAKSVITIPATKSKYTATPLSCKKKRKVAAYARVSTDHEEQQSSYEAQVDYYTTYIQGRDDWEFVSVYADEGITGCNTKKRDGFNSMVEDALAGKIDLIITKSVSRFARNTVDSLTTIRKLKEHGTECYFEKENIWTFDGKGELLLTIMSSLAQEESRSISENCTWGQRKRFQDGKVTVPFGRFLGYDRGEDGNLVLNEDEAQIIRRIYGLFLQGRSPYAIAKVLTSEGIPTPGKKKTWSASTVKSILTNEKYKGDALLQKVYTEDFLTKKKIKNDGQVPQYYVENNHPAIIEPGVFDRVQKLMAVRHPGQNRNSSISPFSSRIKCGECGSWYGSKVWHSNDKYRKVIWQCNHKFDGDCKCGTPHITEDEIRSLFIKAMNILITEKDALIEDFEAIKDTVFDTSALVQERTDLQVDMNTVAGLIEECIAENARIAQDQGEYQKRYDSLAKRFDRTKDRLEAVERSIAEKQAHREMVEQFLSELANQDAVTEFTDELWYSMIDHVTIHSKDDIRFTFQNGTEIRM

SEQ ID NO: 8914 - protein, 592 aa, synthetic construct
MPNLRKIEAAVPAIREKKKVAAYARVSMQSERMLHSLSAQVSYYSGLIQKNPDWEYAGVYADDFISGTNTVKRDEFKRMLADCEAGKIDIILTKSISRFARNTVDLLETVRHLKDLGVEVRFEKECIRSMDGDGELMLTILASFAQEESRSISDNVKWGIRKRMQNGIPNGHFRIYGYRWEGDELVIVPEEAEIVKRIFQNFLDGKSRLETERELADEGITTRDGCRWGDSNIKVVLTNVTYTGNLLLQKEFISDPISKQRKKNRGELPQYYVEDTHPAIIDKATFDFVQEEMARRRELGALANKSLNTSCFTGKIKCPYCGQSYMHNKRTDRGDMEFWNCGSKKKKKKGTGCPVGGTINHKNMVKVCTEVLGLDEFDEAIFLEKVDHIDVPERYTLEFHMADGRVVTKACPNTGHRDCWTPERRAEVSAKRRKNGTNPIGASCFTGQIKCVSCGCNFRKATRNCKDGSKVSHWRCAEHNGCDSPSLREDLLEQMAAEVLGLDAFDAAAFREKIDRVEVLSSSELRFCFKDGRTVSRNWQPPERVGRPWTEEQRAKFKESIKGAYTPERRRQMSEHMKQLRKERGDKWRREK

SEQ ID NO: 8915 - protein, 525 aa, synthetic construct
MAQRKVTAIPATITKYTAVPIGSKRKRRVAGYARVSTDHEDQVTSYEAQVDYYTNYIKGRDDWEFVAIYTDEGISATNTKRREGFKAMVADALAGKIDLIVTKSVSRFARNTVDSLTTVRMLKEKGVEIYFEKENIWTLDAKGELLITIMSSLAQEESRSISENTTWGQRKRFADGKASVAYKRFLGYDRGPNGGFVVNQEQAKTVKLIYKLFLDGLTCHAIAKELTERKLPTPGGKAVWSQSTVRSILTNEKYKGDALLQKEFTVDFLQKKTKKNEGEIPQYYVEGNHEAIIDPVTFDYVQAEMARRMKDKHRYSGVSMFSSKIKCGECGCWYGSKVWHSTDKYRRVIYQCNHKYKGGKPCSTPHVTEDQVKDAFVRAVNILLSEKEELSVNVQMVIAMLCDSAELEKRQTELKEELEVVVGLVERCVTENARVALDQDEYTQRYNGLVSRYEAVKAQFDEVTQAVADKADRKKLLEQFLHTVEGQAPVTEFDERLWSSLVDFVTVYSEKGIRVTFKDGTEIQV

SEQ ID NO: 8916 - protein, 548 aa, synthetic construct
MNDTAPNVIVIPAKVETPQEQEKRRHLRVAAYCRVSTDSEEQLSSYENQLAYYTKKIMKEPGWTMAGVFADEGITGTSTCKRKEFLRMIRQCRQGKIDMILAKSVSRFARNTVDTLNFTRELRGLGIPVIFEEQNINSIYPESEFLITLHGAFAQAESESTSSRVRWGKRQAMKSGHVTMQYKQLLGYEKGPDGKPRIVPEQAEVVRFIYDRYLAGDSIREIKAALEGREIPTVSGKTKWMASHIRSILANEKYCGDVLLQKTFIQDCISKKVIPNTGQLPKYLIQNHHEGIVSRETFDAVQLEMARRNAKAGATRKSTPTGRGKYSGKHVLSNLLFCGECGTAYRRCVWTQRGIKRPVWRCVSRLDYGKKFCTQSPTLDEEPLQQAILAAVNAVMLDRDTLARQLAAAMEWELAPVLGERMSLADIDRALEELSGRFNSLLAEASANPAEDYTGRFRELSESTAHLREQRARLEGVYQENQKVNQRLRTVSAAMEHMSAALTEWDEEVIHQLLEKVTVLSREKIRVTFRDGREIEQYVAQPKRRKLA

SEQ ID NO: 8917 - protein, 485 aa, synthetic construct
MPTSDLKIAAAYIRVSTDDQEEYSPDSQVRLIREYARKNGYLLPEEYVFQDDGISAATARKRPAFNRMIALAKEKERPFDAILVLMFSRFARNREESVLYKGLLRKQGISVISVKEPAVDGPFGTLIESIIEWFDEYYLINLSAEVKRGMSEKFLRGEAMGTAPFGYRIDSANKTFTVDPERAEIVCDVFRSYADGAGLRDIAVQLGDAGITTRRGNRPDNRFVEYMLRNPVYIGKIRWTPGHKTRYSRVHIADGVEVVDGKPPPIVSMDLWEAVQRRMDQRKAAYGRYQRQAPAAWMMRGLVRCSACGATLIMAGRSSSCPFLQCHSYAKGACHTSHSLSLRRANAAVLAGLRRSVGTLTFHMVPHLSSAPSRAADYGRLLEQERRRLDRCKDAYQAGVDTLEEYRDNKARLEERIRRIEEQAASAAAAPESFDKAAYGKKAADILRFLETSADEGAKNEVLRSVVDHITYEKASRHLAIYFYT

SEQ ID NO: 8918 - protein, 537 aa, synthetic construct
MIRQTTQNLITALYPRLSHEDELQGESNSISNQKRILESYAKQNGFTNLQWYTDDGYSGANFQRPGFQAMLADIEAGKVGTVIVKDMSRLGRNYLQVGMYTDMIFPQRGVRFIAINDGVDSAQGDNDFAPLRNIFNEWMVRDTSKKIKAVFRSKGMSGKPITSQPVYGYLKGEDGRFIVDEEATPVVKQIFSLCLAGNGPTKIARILTEQQIPTPGTLEYRRTGSTRRYYPDYPYKWATNTIVHILERKEYLGHTVNFKTEKVSYKVKSSVENPEEKQVIFENTHEPIIDLATWERVQELRKQRKRPNRYDEVGLFSGLLFCADCGSVLYQQRYENKTRKQDCYICGNYKKRTHDCTAHFIRTDLLTAGVTANLRKVTSYAAKHEKQFMKLLIEQNEDGGKRRNAAKRKELDAAEKRIAELSAIFKRLYEDSVTGRISDERFAELSADYEAEQKQVKSRAAELQAELAKAQEATVNAEKFMKVVRKYTSFEELTHTLLREFIEKIVVHECSYDENGTRRQDIDIYYSFVGKVELPDE

SEQ ID NO: 8919 - protein, 524 aa, synthetic construct
MAKSVTTIPATLSRFTSTPIGVPKKRRVAAYARVSTDHEEQLTSYEAQVDYYTNYIQGRNDWIFAGVYTDEGITGTNTKRREGFKSMVADALAGKFDLIVTKSVSRFARNTVDSLTTIRQLKENSIEVYFEKENIWTFDGKGELLLTIMSSLAQEESRSISENCTWGQRKRFSDGKVTVPFARFLGYDRGADGNLVLNENEAVIVRRIYSMYLQGMTPHGIAARLTEDGVKSPGGKDKWNQGAVKSILTNEKYKGDALLQKSYTVDFLTKKKKVNEGEIPQYYVEGNHEAIVSPEVYDMVQREMESRCRNKRHSGVHMFSGKIRCGNCGSWYGSKVWHSTDKYRKVIWQCNHKFSREHRCTTPHLTDEDVQRYFVSAVNQLFSQKDTVLKSLDVGLKEAFDLTDLLMQEETQTEEVQMLADAVEKCIFENAHVAMNQDDYQQRYDDLVARYDAASNKLKEISSLIADKKARRDAIQQFMKTLKKQNDLITEFEPKLWCSLVEYMTVCAEDDVRITFKNGMEIKA

SEQ ID NO: 8920 - protein, 592 aa, synthetic construct
MAKITKLERAMSQLPTRKKVVAYARISEESERLNHSLSAQISYYSNLIQKHPEWEYAGVYADSGISGTRAERRPEFTRMVADCETGRVDIILTKSISRFARNTVDLLNTVRHLKELGIEVRFEKEHINSLSGDGELMLSILASFAQEESRSISENVKWGTVQRFKKGIPNGRFGIYGYRWEGDKLVIQPEQAKIVRLIYDNFLAGLSAESTEKQLEDMGVKSYTGRHFGNTSIRQILVNITYTGNLLLQKEYIADPISVKTKKNRGELPQYFVENTHEAIIPMEVFQRVQGEIARRRKLGALANWSIQTSCFTGKIKCGRCGKSYQHSSRKRQEDPNASYPIWICGTRRKTGNAECTNKDIPEPMLKRACAAVLGLDEFDEVRFSEQIERIVIPEPNEMIFHFKDGRIVPHHWESTMRKDCWTQERREATSKNRMGKNPSKKHQNPFTGYLRCPVCGAFFRRQTKPYKDGTMRIYWHCPNSARCGNTAKPPEPILKDMLTEAMGIETFDENAFHASVECIELTGTYEATIHMRNGEQIIKAWIPTPRKGYPHTEAYKAHMREVSKAMWTDERRAEMSRRMKQIRSEKKWPNP

SEQ ID NO: 8921 - protein, 533 aa, synthetic construct
MAKKQTDGNLALEQQRVIVIPAHDEIVARKLRVAAYARVSSSSEDQLNSYRVQNQYYSELISSNPDWEMVDIYADEGITGTSVEKREDFQRMIKDCRKGKIDRILVKSISRFARNTKDCLAAVRELKELGVSVQFEEQGIDTSKVSSEMVTAIMASLAQKQSESISGNVKWGVQKRIQDKTFVTCKEPYGYRLVDRRLCIVESEAIIVRMIYEKYLAGISMEFIRDQLNVANIPFRENEKQHRWTRKAISYILANEKYIGDSLWQKTYSGDTFPYKQRKNKGEKEQYYVENTHQAIVEKSVWHAVAELRMQRAGEKHPEDYYAPSAFRKKVLCGCCSSMFRLRQNRGCTYWSCRQHDIDRNSCPNSQIPETVMQEAFCRLYYKLKHHGSPIFTQMLSNLQKIRYSRMLWSEDVISLNKKISDTLSQVQFLAQLQQAGGVDPDTFISSNNKLSEQLRRLKQEKARLLDTDSDDLADRTRDLMDVLEDGPDFLDSFDAELFDALVDKIIVDSNERLRFRLKNSLELAEQIERTKR

SEQ ID NO: 8922 - protein, 562 aa, synthetic construct
MAGQENQQYTVLYGRLSQEDERAGESNSIQHQRTLLEKYAKEKGFENTIFLADDGYSGTNFERPSWKKIVEMIEAGQVANLIVKDASRLGREYLQVGYYMEIYFPQKNVRFIAVNDGVDSTVESSNDFNPIRNWANELHAKDTSRKVRAVMKMKAEQGERLGGRPPYGYRKSDGDANTLVPDEDTAPVVKRIFSLCAAGNGPKRIATILTKEQVVNPSNAYYRKTGKSHRGLDTTRPCLWSSNSVTSILNNEVYLGHSVGLRTTTISYKNKQRVERPESERFVVKNTHEALVTQEQWDIVQEVRQHKKRVPKHMDEPNIFSGLVFCADCGKPLVLHRASTMKRTEYNFKCYTYGKKGKTVCTPHHIREFELKAVVLEDLRRVTHFARMKEKQFAAYISSKNTLELRREMNAIQKDLDTMRRRREELSKLFKRLYEDNVLGRVTDEQYRMLAGDYTVEQKALEEQIPEKEARLEKLKAASANVNTFVEKAKQYTAIDELTPELLRLFIQRIEVGERTEKYSRSASQSIRIVYRDIGTVDSAMEQGEAQPRIAPPLSEVFQLPA

SEQ ID NO: 8923 - protein, 528 aa, synthetic construct
MSRTAARSVTVIPPTINPLTHLSKVAIQKRRVAGYARVSTDSDEQFTSYEAQVDYYTQYIKRNPEWEFVKVYTDEGISGTNTKHRIGFNEMIADALSGKIDLIVTKSVSRFARNTVDSLVTIRKLKEKGVEVFFEKENIYTFDGKGELLLTIMSSLAQEESRSISENVTWGQRKRFADGKVSLPYKQFLGYQKGADGFPEVVPEEAVIVRRIYTRFMEGLTPVAIAKELTADGIPTPAGKQRWQTSTVESILQNEKYKGAALLQKCFTVDFLTKKKKVNEGEVPQYYVEHSHEPIITPEEFDKVQTEFERRKRISRQYSGKSIFSSRIICGDCGAFFGSKVWNSTSKYRRVIWQCNNKFKGEHKCETPHLDEETIKTQFVGAFNAILADKDSALENCRLMQSTLTDCSGLDAEIESLLEEIEVVTELTKRCIAENSQTAQNQAEYEARYNGFVDRYEKAKTRVEELHSIKNARQAQADAIGAFMFEVQELDTLSEFDEKLWLTVIDTVTVHTDGRMIFKFQGGTEIDA

SEQ ID NO: 8924 - protein, 434 aa, synthetic construct
MERIVERVDSHIPVQPRALRVCAYARVSSGKDAMLHSLSAQVSYYSNLIQNHSGWLYCGVYSDEAMTGTKSQRDDFQRMIEDCHKGKIDLVITKSISRFARNTVTLLQTVRELKSLGIDVYFEEQHIHTISADGELMMTILASYAQEESLSASENQKWRVRKAFENGDLINLRFLFGYSITADGIQINEKEATIVKEIFSRFNGGESMSSISRDLNARGYRGALGGKWCAERMRNTLSNEKYLGNALLQKRYRNNHIEKKLVANKGELPMYYAEGTHEPIIDPATFEQAQERLRKIAQQTANRKKPSRSAFSGLIHCGLCGNTYKRVTYRKKHYWNCTTFQTKGKSECAAKRIPEETLEVLTCEVLEEGSINCDMVRSKITAIRAEKNNLVVFYMDDGSEIVKRWADRSRAESWTPEMKEQARQRALQARRHKV

SEQ ID NO: 8925 - protein, 573 aa, synthetic construct
MAYNAQNKTGARVAIYVRVSTLHQIDRDSLPMQKQDLLAYAKLMLNTDDCVIFEDAGYSGKNTDRPKFQEMMSQMRAGAFTHLLVWKIDRISRNLLDFATMYNELKALGVTFVSKNEQFDTSTAMGEAMLKIILVFAELERNMTSERVTATMISRANNGLWNGGRIPFGYDYDYETHEFSVNEEESKVVILMHDMYEQERSLVRVVRELNERGYRSRAGNLWSPVSLLIILRNVFYCGDYRYNMLKEGDRQKVKDESEWVTVENHHVAIIPKDQKERIMATLDSNSKLCKQRNIYKSSKHTHVFGGLIYCGSCGKPLGSTPGNLTRDSWHYSKYTCPTRRKSVTLCTGKSTSDPIIGEFVFNYILNMLNAQNYFEKISSPEELEKLLLIGDTFAYIDHIEPNGLNDLFNVLSSGAVKGAVFGKGASLPTKKATVEPEVARLRNEKQKTERALDRLRSLYLYADEAMSEAEYMIQKNKLEETLEDINDQIGMMNTDSWQQSVSDEEFIQRASEFIIAQKLSGRKYVNYKRLAMSVDSEVLKNFVVSIIDSITIQDGLVSNIVFKNGLCHTFIFR

SEQ ID NO: 8926 - protein, 533 aa, synthetic construct
MKGGQNRNAKGNENPRHAGPLYRDAHIAPRKRRVAAYARVSTDHEEQLTSYEAQVDYYTNFIKGHADWEFCGVYTDEGITGTSIKHREGFKQMVQDALDGKIDLIVTKSVSRFARNTVDSLTTIRNLKEKGVECFFEKENIWTFDGKGELLITIMSSLAQEESRSISENCTWGQRKRMADGKVSVPFDHFLGYDRGEHGEMVINEEQAKTVRLIYDLFLQGLTPHAIAKRLTGMGILTPRKKEVWDQGTVRSILTNEKYKGDALMQKCYTVDFLTKKQVVNRGVLPQYYVEDDHEAIIAPETFDLVQQEMIRRRKTGSRYSGVDIFASRLVCGECGSYYGAKVWHSNSKYRRVIYQCNHKYHEGNSCNTPHLIEDEIKQGFVVALNRLLEGKATVISNLESLSSVLFDTSEMETTAVKLKAEMELVQEMIQKAIAENARVALDQKEYKARFDELSQRFDTLEKQRNELERQIADRVSRRAAMHQFIGVLKKQKDLITEFDPSLWGALLDHATIYGKDDIRFTFKDGTEINAIG

SEQ ID NO: 8927 - protein, 538 aa, synthetic construct
MAKKVTVIKAVKAQKHTQEERRLKVCGYARVSTGNQAQATSYTAQVEYYTEKIESNPLWEFAGVYADEGISGTNVKHRDEFQMMISDCEDGNIDLILTKSITRFARNTVECIQTIRKLKEIGVGIYFEKENINTLSEKSELFITILASVAQGESENISSNNRWAIQKRFQDGTYIISTPAYGYGKDEDGNLVIIESEAETVRWIYESYLNGMGVYVIAKALNQKGIPTIRGAEKWQDGVIQDILKNPIYEGDMLQQRTYTETRFPFVRRVNNGQRNQYLIKDSHPPIVTHEEAEAVRNLMAYRVDVLHMNKSDYTKRYLFSGRIICGECGKTFRRQKIYIGKPYEKIIWTCSGHVEDKETCCMKAIREDVLHRAFTDMWNKLYTNQGTILEPLLKGLTELVAARQDSEEIRQLDKEIKDISGQSQILNQVMRKGYMDSALFMESSSKLGWQLTECRRKKTLLTRKLRRTKEIVRTEQLIQLIAEQDGLREEFDEQLFKMTAEKIVVSKEHDITFCLYNGLKLTERGGGQDAVAHANRL

SEQ ID NO: 8928 - protein, 544 aa, synthetic construct
MAETAKKISMIPAKVQYDRNVKLSEKKMKVAAYCRVSTELEEQDSSYEAQLEYYTSKISENENWKNAGIYADDGKSGTNTKKRADFNAMIQDALAGKIDMILTKSVSRFARNTVDSLVTIRKLKEKNVAVVFEKEGINTLEGTGEILITILSSLAQEESRNISENIRWGVVRKFEKGKVIVNCTKFMGYTKNEDGDLVIVPEEAEIVKLIFRLYLEGYSTGKIAKHLEEQGIKTATGQDKWHSTVIDKMLRNEKYMGDALLQKTYTVDFMTKKKVKNTGIVPQYYVEDDHEAIIPKELFYRVQEEMMRRASLCKAAVTRKKNQRSRYSSTYALTGMLICGKCGQEYRRVTWARNGKKKVVWRCSNRLTNGVKKCGESETLEENALNRAVMEAIHRITSDDMEFMENFRQNIIHVIGNYSTAKESEEYEEKIKEKQEEMVALIAENAKTGSYTPEFDERYRTIAEEINALKEAQKTARNEKRMADSYEQRIQDIDHYLSTSTCQIPEFDNDLVRRLISTIKVESSEKLLIQFQSGIVMEQEIRYE

SEQ ID NO: 8929 - protein, 566 aa, synthetic construct
MQSKKKKEQLGLTALYCRLSRDDGAEGDSNSVANQKRLLQKYAKENSLGNTRFYVDDGYTGTNFNRPSFQKMIEDVEMGYVTAVIVKDMSRLGRDYLGVGYYTDTFFPEHNIRFIAVNDCVDSDDGENELAPFRNVMNEMYARDISRKVRSAHRIRGNSGEPLGQPPYGYRKDPLNKKHWIIDPEAAQVVRDIFRMCLEGKGNDTIARILQENGILNCTAYWHEKGIGRGGKKTQPNPYRWKNSTIRKILTQQEYCGDVINFKTYSKSFKDKTRIDNPEENWVIFKDVHEPIVDRDTFEQVQKKVIKRTKRRAPKSENGEKSIFSDLLYCADCGHKLWYHVNTINKNICFFSCSNYVKDYRGSCPTRHYVRADAIEQVVKLELQRMAQFLRDDEPMFADLLERKSNWEIAEEKKHLEGELQKARMRTETVSRLYKKAFEKNAEGLLSDEGFLQITHEYDVEQLALKAKIPQLREQIAEAERQAANKDKFIAAIRKFMQMDELTAPLLRELIDHIEVYETQGVGKSRTQRITIHYRFVGYIDIPAAPLTSHYISETRQGVAVEYIPA

SEQ ID NO: 8930 - protein, 513 aa, synthetic construct
MSEVRLITPITRQSTKKMQVAAYCRVSSNSADQLNSYAAQIRAYKKLIGERDDWELVDIFADEGLTGMKSETRDEFQRMIRMCELKQIDLIITKSISRFARNTKDALAYVRKLKLLGVGVQFEKEGISTLSMGDEMLLNTFSALAQEESQSISMNQRLSIVKRMELGEYVDSNAPYGYRLVDKMLAVYEPEAVIVRNIFTLYLQGFSTSEIARELNKLNIPTKSGKETWRPSRVAYILRNEKYIGDSFYQKTYRETTVPFNQHTNRGQEDRFYAKGTHPGIVDKNVFDTVQTLIEKRKENFSKVTTQNIYPLTSRIQCSECGSFYRRRIVSGTVKWVCSLHKDDSTACSSNYYSEERIYDGFISMVNKLRFSEDNILGQVISRLEMTLAAMKRNNTAARDLSKSIAELNAKLLMLEQLRSKGYLAPEVYQAQANEINAEMAKLKDVRQEKFNSKAATMLEKVRKLKMLIFELEEPLEAFDEKLFLEIVKSIQINKEDEMSVELLGGLRFRERI

SEQ ID NO: 8931 - protein, 434 aa, synthetic construct
MERVVERVDALIPAQPKALRVCAYARVSTGKDAMLHSLSAQVSYYSKMIQSHNGWMYCGVYSDEAATGTKRERAGFQHMIEECRQGNIDLVITKSISRFARNTVTLLQAVRELKSLGVDVFFEEQHIHTMSADGELMMTILASYAQEESLSASENQKWRVRKAFENGEIINLRFLFGYDITPDGIQVNEKDAAIVREIFARFNGGESMSSICRDLDARGHKGVLGGTWCAERMRNTLSNEKYLGNALLQKRYRNNHIEKKLLPNRGELPMYYAEGTHEPIIDQATFDKAQERLRMLAQQAANRKKPTRSAFSGLIRCGLCGNTYKRVTYRKKHYWNCTTFQTKGKSECAAKRIPEETLEVLTCEVLGAVSFDPDMVRSKITAIRAEKSNMVVFCMDDGSEIAKRWKDRSRAESWTPEMKEKARQRALQARRKKE

SEQ ID NO: 8932 - protein, 528 aa, synthetic construct
MNRTAARSVTVIPPTINPLTHLSKVAIQKRRVAGYARVSTDSDEQFTSYEAQVDYYTQYIKRNPEWEFVKVYTDEGISGTNTKHRIGFNEMIADAMSGKIDLIVTKSVSRFARNTVDSLVTIRKLKEKGVEVYFEKENIYTFDGKGELLLTIMSSLAQEESRSISENVTWGQRKRFADGKVNLPYKQFLGYRKGADGFPEVVPEEAIVVRRIYTRFMEGLTPGAIAKELTADGIPTPSRKQRWQTSTVESILQNEKYKGAALLQKCFTVDFLTKKRKVNEGEVPQYYVEHSHEPIITPEEFDKVQTELARRKQISRQYSGKSIFSSRIVCGDCGSYFGSKVWNSTSKYRRVIWQCNGKFKGEHKCETPHLDEETIKARFVTALNAIIESKDNILEDCRLMQATLTDCTDIDTEIESLLEEIDVVTELTKRCIAENSQTAQNQEEYAARYNGFVERYEKAKARLEQLRTTKAAREAQAEAIGAFMFEMQELDALTEFDEKLWLTIIDTITVHADGRMTFKFQGGTEIEA

SEQ ID NO: 8933 - protein, 571 aa, synthetic construct
MMQDRTAPASTNRVAIYIRVSTTHQIDKDSLPMQRQDLIAYAKLMLNTDDYVIFEDAGYSGKNTDRPKFQEMMSQIRQGAFSHLLVWKIDRISRNLLDFATMYKELKDLGVVFVSKNEQFDTSTAMGEAMLKIILVFAELERNMTSERVTATMISRASNGQWNGGRVPYGYNYDYETKDFSINPIEAEIVRLIHDKYEEMRSLVRESRYLNEKGLRTRAGNLWNPVSLHIILHNIFYCGDYRYNVLKEGDRQKVKDESEWITVEDHHEPIISREQKERVIAMLDANKRLDRKRNTYKSEKYVHVFAGLLYCGNCGKPMGATPAAAKKDWQYSKYTCPTRRKLASACNGKFTSDPIVGEFVFNYVLNMLNVQKNFADIHSPEELQAALLIGNTFSYIDHIDEDGLNDLFNMLSSGKIKGTVFGKSAKLKKKKVVSELSKLRNEKQKIERALDRLTKLYLYAEDAMPESEFIIQKSKLTEALDEVNEQIGFSNTDEWNQSVSDEEFVRRASEFIIAQKLTDRNYVSYKRLATSVDTAVIKTFVQGIIDSIIMDAGQVKQIIFKNGLSHTFIFK

SEQ ID NO: 8934 - protein, 492 aa, synthetic construct
MAAYCRVSTDSDKQATSYETQIEHYTTYIHNHPDWKLAGIYADDGISGTNTKKRDEFNRMIEDCMAGTIDMIITKSISRFARNTLDCLKYIRQLKDKHIPVFFEKENINTMDSKGEVLLTIMASLAQQESQSLSQNVKLGLQYRYQRGEVQINCNHFLGYAKDENKHMVIVPEEAEIVKRIYREYLEGASMLKIARNLTADGLKNGAGHTKWRDSNIRQILQNEKYMGDALLQKTYTVDFLTKKRVKNTGIMPQYYVKDNHEAIIPRDIFLQVQEEMVRRSSIHLKNGRKLTYSSNHCFSQRIRCGKCGEIFRRIHWNNRGKKSIVWRCVNRVDHTGKCDARTISEFALEQVCLTAINQVLCGKKDFLAMLQHNIETVLSHNNDETLATIDTRLEELQTQLVKLASSKAGYDDVAEEIYHLREQKQQTLAKSANQDEIRSRIEDMAAFLKTQSTAITQFDEHLVRQLIETITVFEDSCTVEFKSGVTVDVEK

SEQ ID NO: 8935 - protein, 528 aa, synthetic construct
MDEQKKTSGSLALNSTPRVITIAPSTPVRDRKLRVAAYARVSSRSEDQLNSFAAQNAHYTELITDNPEWEFVDVYADKGITGTSAEKRDDFQRLLADCRRGRVDKILVKSSSRFARNAKECLETVRELKALGVGVCFEEQGIDTSELAGEFLTAIFAMMDQKESENISDNLRWSIDMRMRAGKYNTCTAPFGYRLVKGKLELIPEQVPIIRYIYEAYLSGKTAGDIAAALNLFSKGKLWKPQRIDYILTNERYSGNAFLRKRYTTDTLPRKIKYNHGQKPMYFVEGINEAAISQEVFNKAQELRRRRGDSQVPGIAGQRPLANGWLYCGCCGKALRPKCINRKWYMACRGHEESTELCDLLPIAEEAVVSAVFHLYYKLRHQGGPILTQLLADLQNARKGKLLWSLDIVALNQKIADITRQDRLLAQLKQQGLVGPDIFISRQNELAEQLRAAKLEKERFLEAEEDQTIQQTQELIEALEAGPDFLDAFDGELFRELVDKIIVESNDRLRFRLVNGLELTEPIERTVR

SEQ ID NO: 8936 - protein, 542 aa, synthetic construct
MAERVYCLYRVSTNKQVDHDENNQADIPMQRKACHDFAAKMGWVIVGEEQETGVSGYKVSADDRDKLQLIKKYAEQGKFDILLVFMFDRLGRKSDETPFVVEWFTKKGVRVWSVQEGEQRFESHTDRLTNYIRFWQADGESQKTSMRTKTALGQMVEEGRFRGGNAPYGYRLEKSGILNKRKHEVYMLVIDEDEARVVRMMFDLCISSGYGRWRLANFLNDHGIKNRKGQNWHDASVGGILHNPLYKGILRSGETYAGPFEALQIIAPDQFDLAQKLMLERTNERKERRTVPLNTAGQSLLSGNIFCGHCGGRLVLTTNGTTTRLADGTPVHKKRIRYVCYNKTRRRQECTGQTGYTMHILDGIVTEVLHQVFDKMQGASNDMIVGSAVQKQMAMIRSELQRARAENTKANKEYESLKSEVLKAIQGKSALPQDVLTEMLEDTRQKVLSTSERITTLTAELNDGNSKIEEMKAEFNRIVSWSKIFDESPMEVKKMICGYIIKKVSVFRDYRVKIEFNINVEQFLNGIDSIDECATYELPMAQ

SEQ ID NO: 8937 - protein, 501 aa, synthetic construct
MEIQIREGSREQKRKLKVCAYCRVSTDADEQENSLENQVRHYETVIKANPDYEYAGVYSDFAISGFKEKRPGLQKMLADAEKGKIDLILTKSVSRFARNTSIVLEATRKLKELNVGVFFELQNINTLSGEGELMLTILAAFAQAESESGSAGAKMVYQRKYEAGIPVQYLERSFGYTKDERGVFVADEAEAVWVRKIYKMAAEGYTPASIKRYLNENGIKTVGGVQWVDSTVFRLLENEIYKGDYIMHKHFVNEERKLVRNRGEVDAWYIEDDHEAIVSPELWQKAQDALAAKRDYLAEGSVIEEFTEENYPYMNKIYCAKCGYPLYKRIYSKGNRLNWGCSGTKRYGKSFCDGINIPDGVLRSAWHFEENTYIDEKASDKGVKEFTYLKEHSWKRRHKKKQPSAIPENTETEYPYREKIFCALCGSRLVRYVNPQNHKVTWVCNRRKRKGKEACDGTRVPDTVIKGWGEIKNDIYIQRKDDKNGKKRYSYTSKKPSGIRV

SEQ ID NO: 8938 - protein, 596 aa, synthetic construct
MPRKPAKHPAKPKRGKKLEVEEPGVLYGRYSSHNQKDISVEQQFEKGYELAAEYGIRIIDTYADRAVSGRTDKRRDFQRMMTDAAKGKFRYVIAWKSNRMGRNMLEALINEARLQDMGVRVLYVEEDFDDTAAGRFAARSMMNVNQFYSENMAEDIKRGLYDNAANCMVANGHLPYGYKADETLHYAIDEPKAAVIREIFTRVSCGEAFVDIMASLNARGIKTSYGRPWGRSSFQKILSNERYRGIYIYGDVRKEGGIPRIISDELYFKVQEVITTKKNPQGRHRVNGDYLLTGKLFCGHCKSPMTGISGTSRSGNLHYYYVCQKRRTEKTCEKKNLRRDDIELQVAKAIKRRTLDDDTINWIADSVVEYSQHQESASGIGLLEDQLKDTQRSIKNLMAAIEQGIITPTTKARLMELEKEQSDIDRKITMAKADVIPVNRDQLVGWLKKLQAGDVHDKKYQAELFDTFLIAVYVYDNPDGQDYMKVVFNYAGSKNTVEIPLDPSVIDNVENIETGAVRLSSAQVHQSNADFVCVRFFCVRSIRRTVSAGGPEKAEPDDLHGTACGPSACCPPFHVAFAYRQDKFLVNEVTLSQVFC

SEQ ID NO: 8939 - protein, 528 aa, synthetic construct
MPKTTKKITTIPATLTRFTATPITEQKKRRVAGYARVSTDHDDQFTSYEAQIDYYTNYIKSRDDWEFVDVYTDAGITGTSTKHREGFKRMVADALAGKIDLIVTKSVSRFARNTVDSLTTIRQLKENGIECYFEKENIWTFDGKGELLLTIMSSLAQEESRSISENCTWGQRKRFADGKVTVPFNRFLGYDRGPDGNLVVNREQAAIVQRIYAMFLQGMTYNGIAQQLTDDGILSPGGKPKWNTSAVKSILSNEKYKGCALLQKTYTVDYLTKKKKVNEGEIPQYYVEDNHEAIIDPDTFEMVQREMEKRGKGRKYHSGVHTFSSKIRCGECGSWYGSKVWHSNSKYRKVIWQCNHKFDGDKHCSTPHLTDDIIQQAFLSAANKLLATKDTVIADGREMMSLLFDTTDLEREQEELQQETQVVSDMVQQCIYENAHVALDQTEYQKRYDGLTERFEKAKARLDEVTAEIHQMQTQRASIEDFLKAFAAMPDELTDFTLESWHGLVDYGTVYSADDIRFTFKNGQEVKA

SEQ ID NO: 8940 - protein, 578 aa, synthetic construct
MRKVSKIEPISPSLPTRKKVAAYARVSMETERLNHSLSAQVSYYSNLIQSNPEWEYAGVYADNAITGTKSSSREEFQRMLEDCEAGKIDIILTKSISRFARNTVDLLETVRHLKELGIEVRFEKEHINSLSGDGEVMLTLLASFAQEEVRSLSENVKWGTRKRFEQGIPNGRFLIYGYRWEGDHLVVEPEEAKIVRLIYDNFLKGLSAEATEKQLEEMGVKSMKGMHFPNSSIRAILKNITYTGNLLFQKEYTLDPISKKTRKNHGELPQYFVENAHEAIIPMETYQAVQAEIARRRELGALANWSINTSCFTSKIKCGLCGASFVRNTRKNRAKTSQLGERYTFYGCGTNKRKGEHCSSGTIREDVLKEECAKVLGLPEFDEQTFSERVEKITIPATGTMLFEFTDGSSLEHHWSRNAKKESWTAERRKAVSEYRRSRETGWKCYHTFTHFIKCGRCGANYRCQTHKRVDGTVVRSWYCSSPTAVGCSKVGIREDTLKALIADVIGLPEFDEELFNQQLAYATVPADNQIVFHFRDGHEASRTFVQKRQMPRQTEERKKHMSEVMKAKWRERHAEND

SEQ ID NO: 8941 - protein, 516 aa, synthetic construct
MNRAVIYARYSSDMQREESVEAQIRACKYYAQQNGIDIIGIYADRAKSGMYHSEKREEFQALLNAAPRKEYDIVLVHKLNRFGRAGVKALNDRDYLERLGIEIISVTERLENTPEGRLMLYVITGMNEYYSRNLAGEVLKGLRENAYKGITTGGTPALGYNLSADKKLVINEQESAAVRLIFKMYISGAGYGEIIDELNSRGFRTKRGAKFGKNSIYDILRNERYTGRFTYGKTKTVNGHRSQHKKEKEYISIEGGCPAIIPADEWERVQRLMDVKKHDAASGKAKELYILSGKLFCGHCSARMVGNSRVSRGERYLYYDCNAKLRKKTCTKHAVKKNEIEQAVIQKLNQLAFSDDLIERFVDEAYKAQDNEMPDIGGKIADIDKKISNLVTAIENGADVGPIKQRMADLSAQKDALLSSNVPKGDFLTRDEIYSRFKKFLNIADLPPAQQKFIISEYVTRIDVFDYDGGGHFCRITLSNNTSVDTDVLGSSAPKGSICGCCFFPKLRGTSSRFHM

SEQ ID NO: 8942 - protein, 532 aa, synthetic construct
MIATKPTQEKTMKTVYCLYRVSTKGQVDKNDIPMQKQSCREFAEHQPGWVIKKEFQEKGVSGFKVSANDRDAVQELKTAAGNKEFDILLVFMFDRIGRIDNETPFVVEWFIQHGIEVWSVNEGEQRMDSHVDKLMNYIRFWQANGESQKTSMRVKTRLHQLVEDGIYTGGCAPFGYRLVKSGVVNKRGKELLTLEIDPIEKEMVKTIFEKTVKDGYGSYVMAQYVNDRKMLTHNGAKFQSNTIKRILQNPIYCGYYNRGGVTSKRVKELQIIDDAVFDEAQKILEQRKYTNEQKTQLARTAKSSTMLGGNIYCAHCGKKLCANSFVDRYTTKDGTTHDGGRRFRYLCSGKAMKRNECDGQSVYSAAKVDEIVLDALHKCFDKIKATPKDAAIEKKYRTQISQIKTEIKRLNKETETLKRKLGELTEEIANSLLGDSKFTPDVLSMAIETTKGKIADNVQRITEKQNRLNDKETDMSKIDYYYEEFVSWADEFDNAPAERQRMIICKLFKEILVGKGYSVQILMDSSYEQFLI

SEQ ID NO: 8943 - protein, 597 aa, synthetic construct
MTTQVPMKKLKIYLNEKRDKYFTGHSNRVGVLLTCNPIRFDSTEPERLGKDEKIMKSNQQKITALYCRLSQEDELEGESNSIKNQKSMLEKYAADNGFGNCRFYIDDGYSGVSFERPDFKRMIADMEKGEIGTVITKDLSRLGRDYLKTGTYIEIIFPQNDVRYIAVNDGVDSEKGCNEFIGIRNYFNDFFAADTSKKIRAVQRAKAERGERIGSKLPYGYMKSEDNRLVPDPDTAPVVKRIFDMYVNGVGTRTIAMTLERDKIMSPSAYAYYKYGRKENGLKLNNPYLWSDVTLRGMLVNEVYIGTTANYKTTTKSNKLKKQIHNDRKDWLIFENTHEAIIDKSTFEMVQKWFAGRRKPNKSGKTDVFAGLVYCADCKSRMYLRRVLKYPKENNYLCKTYQRYGNNHCTAHRISEQDLHAVILQKLREVTAYVRENPEEFYEIASRNARAEAEREMKTYLREKEAAEQRIAELESIIRCLYEDRVLGRISVERYESLSSGYETEQSELKTKLNEMNAFLDENEKREQLIQDFIENAKKYIDIQELTPEILRAFISRIEVHEKAKWHSTECGNDIVIYFTVERKEQLNVWHKEIKTA

SEQ ID NO: 8944 - protein, 520 aa, synthetic construct
MKRVYCLYRVSTKGQVDKDDIPMQKTSCREFAEHNGWTILKEFQEKGVSGFKVSARNRDAIQDLKAAAEKKEFDVLLVFMFDRIVRIDDETPFVVEWFIKHGIEVWSVNEGEQRMDNHVDKLMNYIRFWQANGESQKTSARVKTRLNQMTLDGKFTGGVAPFGYKLIKSGEINKKGKELMDIVVDDDEAPIVKKIFEMTVKEGYGSYRMADYLNSHGIRTHNNSKFQCNTVNRILKNRLYCGYLVSGGVESPYIERLHIIDENIFDQAQFILKQRSSKNEEKQQIARTTKGSTLLSGNIYCAHCGQKMVSTSYIDRYDRADGSQYRVRRQRYICTNKAMKRGACDGQSAYVAHRIDGAVLATLRDYLAKIKSTPKDIALEKRYKSEISEYRRKHTKLEKEIKKLKRQVVELSAEIGRSLLGESRFTPDILSTSIDNTNDLLHKKEFELSDIKFKLANQQNVMGKLDFYYSQFRTWADEFDNSTMEQKKMIACQLIREVKVSRGYELEIIFDLNYEQFLSL

SEQ ID NO: 8945 - protein, 536 aa, synthetic construct
MLRQTNQQPITALYPRLSHEDELQGESNSISNQKRILETYAKQNGFSNLRWYTDDGYSGANFQRPGFQAMLADIEAGKVGTVIVKDMSRLGRNYLQVGMYTEMIFPQKGVRFIAINDGVDSAQGDNDFAPLRNIFNEWLVRDTSKKIKAVKRSKGMSGKPITSKPVYGYLMDEDENFIIDEEAAPVVKQIYNLCLAGNGPTKIARMLTEQQIPTPGTLEYRRTGSTRRYHPGYECKWATNTVVHILENREYTGCLVNFKTEKLSYKVKHSVENPPEKQVIFENHHEPIIDTQTWERVQELRKQRKRPNRYDEVGLFSGILFCADCGSVMYQQRYQTDKRKQDCYICGNYKKRTHDCTAHFIRTDLLTAGVLSNLRKVTSYAAKHEARFMKLLIEQNEDGGKRRNAAKKKELEAAEKRIAELSAIFKRLYEDSVTGRISDERFTELSADYEAEQRELKERAAAIQAELSKAQEATVNAEKFMNVVRRHTSFEELTPTLLREFVEKIVVHECSYDENKTRRQDIEIYYSFVGKVDLPE

SEQ ID NO: 8946 - protein, 434 aa, synthetic construct
MIRAAIYIRVSTEEQARHGLSMDEQEAHLRDYAKEHGMKVVDCYLDAGKSARKRYTKRPEFMRLLADIESDKIDMVLFIKLDRWFRNISDYYEVQRVLDAHNVTWRATQEDYETVTASGRFKVNIMLSVAQDEADRTSERIKFVFEGKKERNEPITGNVPKGYKLDGKSVAIDPVTGPMVRAAFDMYLENGSISKVIRAYPELGLSYTSARYMFSNPAYMGDFAGITIPAIISPAEYQKADSLRGCIVRKTTQNRVYLFSGLLICPECGNRLGGYAALRVHKETHYYRCNSRQKMTGCSNNKNYNEEKIEEYMLDRIEAKVQTSIISRNEQRAVSHKSQRDAIQRKLSKLSELYISDLISLQDYKKQFRALNDELAAIPEDIPDIDIEALKSRFWGDWRQLYDDLPRDGKQSFWRKTVKKIYLSSDSVADFDLI

SEQ ID NO: 8947 - protein, 502 aa, synthetic construct
MEIQIREGSREQKRKLKVCAYCRVSTDADEQENSLENQVRHYETVIKANPNYEYAGVYSDFAISGFKEKRPGLQKMLADAEKGKIDLILTKSVSRFARNTSIVLEATRKLKELNVGVFFELQNINTLSGEGELMLTILAAFAQAESESGSAGAKMVYQRKYEAGIPVQYLERSFGYTKDERGVFVADEAEAVWVRKIYEMAADGYTPASIKRYLNENEVKTVGGVQWVDSTVFRLLENEIYKGDYIMHKHFVNEERKLVRNRGEVDAWYIEDDHEAIVSPELWQKAQDALAAKRDYLAEGSVIEEFTEENYPYMNKIYCAKCGYPLYKRIYSKGNRLNWGCSGTKRYGKTFCDGINIPDGVLRSAWHFKENIYIAEKASDKGVKEFTYLKEQSWKRRHKKKQPPAIPENTEAEYPYREKIFCALCGSRLVRYVNPQSHKVTWVCSRRKRKGKDACDGTRVPDTIIKGWGEIKKDIYIQRKDDKNGKKRYSYTSKKPEGADRA

SEQ ID NO: 8948 - protein, 486 aa, synthetic construct
MRRVVIYVRVSTQEQATEGYSIGEQLERLRLYCQAHGWILVEEYIDPGYSGANLDRPAISKLISDIGSGTFDTVLVYKLDRLSRSQKDTMHLIEDVFMANNIDFISMSENFDTSTPLGRAMIGILSVFAQLERDQIKERMGMGKEARAKEGKWQGGSTVPVGYEYDVSTGELIINEYEAMQVREVFNLVLSGMPYKTIANKLTAKGYTYNAISGHVGIWDAKRIKYVLTNKLYIGYIRYKDTWFPGTHEPIIDTETFEKAQLLFKERSASNVVCIKKRQGQTSYLGGLLYCKKCGARYARNSGKKWKNNEPPLYYSCYSRSHKVPKMIKDPNCKNKTWRMTNLDNIVLDEIKKLSLEPEYINTIKERETSKQDTSNKADILKKEIRKIEEQVSRFLDLYGLGAFTIEQVTAKVQPLNQRKQDIEQELIELVTDETILSEDETREIVRNFDKVLERSDFNEIRMTIDSLVRYIELNDDTVYIHWKFT

SEQ ID NO: 8949 - protein, 543 aa, synthetic construct
MEVTKIPKKIVTVIEPKRSMAVDKEKYRQKRVAAYCRVSTDSEEQLVSYANQKKVYTEMIGSRKDWCFAGLFADEGISGTRADKRPEFNKMINACLAGKIDYIITKSVSRFARNTVDCLDYVRMLKSKGIGVYFEEQQIDTLKTDSELYLVIYAGFAQSESESISKNIIWTVRNKFEEGIPVFMYKRFLGYRKGADGEPEIVPSEAAIVERIFNLYLAGETVDNISKMMQAEHPQIPGKNISFSKGMIMSMLANERYCGDAILQKSVTVDCIEKKRKKNTGEAPMYYVQNSHPAIIDRVTFNKVQEELARRRAKSPASTKTAITSTGKYSRYALTDVLICGECGTRYRRVTWSRNGVKRIVWRCISRLDYGKKYCKESPTVFEDKLKEAIVRAVNKFNDQDNATYKALMRATIGEALGLNGDPEEVDMLERKIEALNNKMLALVNESVASGEGIETHESEFMSLSQELELLKQRIATIQESAATDSGNQDRLEQIQAIIAEREHNRTEYDDSIVRQMVECIKVYPGGRLEIIFGGGYLVEEAV

SEQ ID NO: 8950 - protein, 513 aa, synthetic construct
MSEVRLITPITRQGAQKMQVAAYCRVSSNSADQLNSYAAQIRAYKKIIGARDDWELVDIFADEGLTGMKSETRSEFQRMIRMCELKQINLIVTKSISRFARNTKDALAYVRKLKLLGVGVMFEKEGISTLSMGDEMLLNTFAALAQEESQSISMNQRLSIVKRMELGEYIDSNAPYGYRLVNKMLEVDESEAAIVRNIFSLYLQGFSTGEIARELNIHNIPTKTGKDIWRSGRVSYILKNERYIGDSFYQKTYRETTVPFNQHINRGQEDRFYAKDTHPAIVEKDVFDAVQKLIEKRKGNFAKTTSQNIYPLTSRIQCSECGSFYRRRLISGTVKWVCSLHKDDSTACDSNYYSEERIYDGFITMVNKLRFSEDNILAQVISRLEMTLVAMKRNNLAARDMSKGIAELNAKLVMLEQLRSKGYLPIEVYQAQANDINAELAKLKDARQEEFQSKAATMLEEVKKLRILIFELEEPLEAFDEKLFLEIVKSIQINKKDEMSMELLGGLQFKERI

SEQ ID NO: 8951 - protein, 543 aa, synthetic construct
MEVTKVPKKIVTVIEPKRSMTVDKEKYRQKRVAAYCRVSTDSEEQLVSYANQKKVYTEMIASRKDWCFAGLFADEGKSGTRADKRPEFNKMINDCLAGKIDYIITKSVSRFARNTVDCLDYVRMLKSKGIGVYFEEQQIDTLKTDSELYLVIYAGFAQSESESISKNITWSVRKKFEEGTPVFMYKRFLGYKKGADGEPEIVPSEAAIVERIFNLYLAGETVDKISKMMQAENYDIPDKTISFSKGMIMNMLSNERYCGDAILQKSVTIDCIEKKRKKNTGEAPMYYVQNNHPAIIDRVTFNKVQEELARRKTKTPGSAKSSITSTGKYSRYALTDVLICGNCGTRYRRVTWSRNGVKRIVWRCISRLDYGKKYCSDSPTIMEDKLQEAIVRAVNKFNEQDNATYKALMRATISEALGLNGDPEEVDMLERKIEALNNKMLALVNESVSSGDGIEAHESEFMTLSQETELLKQRIAAIQESTAKDNGEQNRLEQIQAIIAERESKCMEYDDSIVRQMVECIKVYPSGKLEIIFGGGYLVEESV

SEQ ID NO: 8952 - protein, 513 aa, synthetic construct
MPEVRLITPITRQNTKKMQVAAYCRVSSNSADQLNSYAAQIRAYKKYIGARDDWELVDIFADEGLTGMKSETRDEFQRMIRMCELKQIDLIITKSISRFARNTKDALAYVRKLKLLGVGVQFEKEGISTLSMGDEMLLNTFSALAQEESQSISMNQRLSIVKRMELGEYVDSNAPYGYRLVDKMLTVYEPEAGIVRNIFALYLQGFSTSEIAKELNKLNIPTKAGKETWRPSRVAYILKNERYIGDSFYQKTYRETTVPFNQHPNRGQEDRFYAKGTHPGIVEKDVFDAAQTLIEKRKDAFAKATTQNIYPLTSRIQCSECGSFYRRRIVSGTVKWVCSLHKDDSTACDSNYYNEERIYDGFISLVNKLRFSEDNILGQVISRLEMTLAAMKRNNLAARDLSKSIAELNAKLLMLEQLRSKGYLAPEVYQAQANEISAELAKLKDVRQEKFNSKAAIMLEEVKKLKMLIFELEEPLDAFDEKLFLEIVKSIQINKEDEMSVELLGGLRFRERI

SEQ ID NO: 8953 - protein, 490 aa, synthetic construct
MTDKNLLVITPHRKEPGKQRIAAYCRVSSRSDEQLNSLTNQINFYRSLFESDDTVVFVGIYAEEGLSGTQSESRPQFMKMIEDCRSGLIDCIRTKSVSRFGRNTVDTLIYTRELRSLGIDVFFEKENIHSTESSGELMLTLMAAFAESESETMSENIKWGKRRRYEQGITGSITLNGMYGFRQNKGIVTIVENEAELVRRIYKDFIDGYSYGEIVDRLIAEGVPTRMPGASWAKTTVQHIIRNEKYCGDCLLQKAFIANPITHQQVRNNGELPKYLVEDCLPAIVDKETWKLAQAIAARHTPHKQASNERYPFTGKLFCGVCGKPYCYYHYTTTNKQPLAAYRCMSRKTQSAVEVSGQTYTPPHKATFNLNASPELIAYRERHCKPPKERPMLCTDVRISIDLPQKAFCRAWNLIVAKKLRYQATLRSTVDNAEDILVRYRAEEMCLLIDEIGKINEFSYPLMLKTLDRVVVNTNGKLSFIFQSGIKITV

SEQ ID NO: 8954 - protein, 548 aa, synthetic construct
MTNKKVKKIEATKPTLSAQYSTFTRKRKVAAYARVSTAKEEQENSFDAQVSYYTQKIQANPEWVFVEVYSDEGITGTNTKKREGFNRMIEDALAGKIDLILTKSVSRFARNTVDSLVTIRQLKEKGVEVFFEKENIYTLDAKGELLLTIMSSLAQEEARSISENTSWGRRKSFADGKVSLGYSNFLGYDKGPDGELVINKEQAKIVRRIYAEFLAGKTPGGIAKGLTADGIETPGHKKVWQASTVLNILKNEKYYGAAILQKEITVSYLTKEKRPNTGELPMYYIEKDHEPIVSPETFQMVQEEMRRRKEAGSNMQCVSIFSSRVICGDCGGYYGRKIWHSNTKHASWHWHCNAKFQKRKYCETPTLKEESLEETFVGVFNGLIANRKEIEENYRLCIDTITDDSEYRRQLEDLNNGCGEVQTLIRSLLMTYSRQDTADDIHEKLKEYEDRLDTMARLKQELDLKIAACAAKRVQITGFLNELMKHDAPLAKFDPLVWQAVINYATVNRDCTITFTFRDGTEKTVPIKNGVRPYTKRNKPQEVDGNDG

SEQ ID NO: 8955 - protein, 434 aa, synthetic construct
MKKTIVNIAPAVAETPRTKRVAAYARVSCGKDTMLHSLAAQIDYYRDYIMMNPEWRFAGVYADEAKTGTNDNRGQFQLLLTECRSGNIDMVITKSISRFARNTVTLLETVRELKSLGIDVFFEEQNIYTMSAEGEVMLTLLASFAQAESLSCSDSCKWRIRKGFEEGRASTCTMLGYRLVDGKITLIEEEAKTAKRIFDLYLAGYGLQKIANTLNEEGLYSIFGNEWHPTTVRKVLTNEKYCGDLLLQKVYRENHLTKKMRPNTGELPQYFVEDDHPAVVSRETFAAVQKELERRAEEKAPTVGTTSVFTGKIRCSCCGKNYHRKTTPYNIVWCCSTYNSKGKKYCPDSKVIPEETLKRAVTDILKTDGFSDEAFQMQVCTIEAHPGNLLRFIFANGSTTDYVWKDRSRSESWTDEMKAAAAKKAKERYTSHDK

SEQ ID NO: 8956 - protein, 603 aa, synthetic construct
MRKCFIYHRVSSEFQLAGSGIQRQADNLQAYVARTNLLDDMEEPEATIISDQGVSAFKGLNMSEGELGRWMEQVRAGMWDGSALVLESIDRFSRQNPFTVVAYLSELVNHNITIHDVSLNMLINRTNSAMLPIVTMSAQRAYEESKIKSDRIRDGWRRKRENAFTNGTIVTNKCPQWIDVQDNKYVLNDKVVIVREIFRLYQTGIGTPTIAKVLNAKGDEWLFESGRLWRGESVHKILKNKRVTGTIFISEIIRDYNSTSNPVEQKTYEMDVYPIAIPKEEFDLVQQLMKTRRPNNGRITTSKDTEELKKSNIFNSVCRCARCGEAMYHNVVLANRDSKKNGKFTEEYRYVRCIGERDGFCDNKALRYEVVEQFVIEHIKGMDFTQILKPNNINPEIELVRQRIEEEKTHIQEYELGIKRLKNQDKKIPFDVLTELQESRDKLKELEERQSTFTEVQVDTDYLKTVDPSVLFDQTNIEVRSKIEKELSKVIDTIQLYRTGKHYVITLKYRNVDVLKHVLFVEAKKLPLLISGVAIERMGDTIVYSTPSFSIYMVDGDLPRLINVEGEPLNIIDYSLLLNYIDAVDMNDTVGVWMRNKFNTLMQ

SEQ ID NO: 8957 - protein, 642 aa, synthetic construct
MKAVIYARYSSDNQREESIEGQLRECTAYCVKNDITILRTYIDRALSAKTDNRPDFQRMVKDSAKGLFDVVIVWKLDRFARNRYDSAHYKAQLRKYGVKVLSATENISEGPEGIILESMLEGMAEYYSAELSEKVIRGHTENALKCKYNGGTPTFGYVIDKDMQYQLDPRTAPVVLEIFTRYDQGATMKEIMEEMRQKGVTTVRGKKIDLNFMARLLKNRKYIGEYSYREIVTPGGIPAIVPQDLFDRVQKRLAANRKAPARHKAEDDYLLTTKLFCGTCGAMMVGESGTSASKGRKYHYYRCVNTKKQKSCNAKHKSIRKTPIENAVVNAVMAKVMDDNFVEYIADTVMDIQTRESSVLPALRHQLEETERGITNMLNAIQMGIINASTKQRLDELEDRKADIELQIIQEEMKHPMLTREDVTYWICRFRTLDVSKLEERRRLIDSFVNSVTVFDDYILITFNYKEGEERLDFTDIESSDLQSVGGPTLSEKPSEMAVFLHLSLNFIGIYGPWRYNMGVASVSEYVASLNEEQQRHTCAFIEFMNAEYPQLTNKISFSMPMWLVGKKMNEGYVAVSAAKNHFSIHFSDEEFLNHLAESLPNCKKGKRCINIKYGDEQSLRAVEESIRDFLKIYGSEGSSSR

SEQ ID NO: 8958 - protein, 527 aa, synthetic construct
MPRKPAKHPAKPKRGKKLEIEEPGVLYGRYSSHNQKDISVEQQFEKGYELAAEYGIRIIDTYADRAVSGRTDKRRDFQRMMTDAAKGKFRYVIAWKSNRMGRNMLEALINEARLQDLGVRVLYVEEDFDDTAAGRFAARSMMNVNQFYSENMAEDIKRGLYDNAANCMVANGHLPYGYKADETLHYAIDEPKAAVIREIFTRVSCGEAFVDIMASLNARGIKTSYGRPWGRSSFQRILSNERYRGIYIYGDVRKEGGIPRIVSDELYFKVQEVITTKKNPQGRHRVNGDYLLTGKLFCGHCKSPMTGISGTSRSGNLHYYYVCQKRRTEKTCDKKNVRRDEIELQVAQAIKDYALKDDVIEWIADSTVAYNERKEAESKVGILEDQLAGTEHGIKNIMSAIEQGIITETTKSRLVELESERATIKAKIAAARADIVTVSRDDIISGLEMFRDGDVHDKKYQARLFDTFLVAVYAYDDDLRLVFSFSGNKNTIQIPIESAVNAVENNEAECSFKLCSAPPRKSLRLMA

SEQ ID NO: 8959 - protein, 542 aa, synthetic construct
MMMENRMMTGNRVDCLYRVSTDKQVDYNDKSQADIPMQRRECHRFCEKMGWTIVHEEQEDGVSGHKVRAENRDKLQIIKERAKQGKFDILLVFMFDRIGRIADETPFVVEWFVKNGVRVWSTQEGEQRFDNHTDKLTNYIRFWQADGESEKTSIRTKTALGQLVEDGGFKGGLAPYGYDLVKSGRFNKRKHEVFELAVNEAEAAVVRIIFDKYVHEGFGAQRIATYLNNLGYRARTGKMWHHASIRGIICNLTYTGVLRSGESRSQTLPHLQIIEQELFEAAQHIRTSRANSAEQERRVPLNTRGQSLLAGNVFCGHCGSRLALTTNGKAYPCKEDAHRIVKRVRYICYGKTRKQTECDGQTGYTAHILDGIIDKVVRQIFERMKAIPKSEIVNIRYREKMEERKALLKSAKSDYAKAAAELDTLRAEVIKSLRGESAFSQDLLGSLISDCETKCLEVQHTMEAAQAAYDEGQAMLDALNAQYDDIISWADMYDSASTESKKMIVSCLIRRVEVYRDYRLHIDFNIDFEQFSTGLDISAIAA

SEQ ID NO: 8960 - protein, 534 aa, synthetic construct
MNGQTAISGSLALNSTPHVIMIPASGPVRTRKLRVAAYARVSSNSEDQLHSFAAQNAYYTELITGNPEWEFVDVYADEGITGTSVEKRDDFQRLLKDCRRGRIDKVLTKSTARFARNTSESLIAVRELRDLGIGVCFEEQGIDTAQMSGELLTAIFSMIAQKESEAISENIRWSIRNRMENGTFTATSLPFGYTRDETGEIKVDLQRAGYVKEIFEAFLSGRNTKEIAEEMKRRQEIETPLQSYQWTVHAIARILKNEKYTGNSLWQKSFMTQTLPRRYKVNKGELAQYYVKDTHPPIITCSVYDKAQELLRIRKEQFHPQGMESSRLSGHIECGCCGSTFRKVQHGGKVYHACRAHTLDRKKCPTKQIPESEFEHAFLRLYYKLRHRGMPILSQLLTDLQTVQNGKLLWSLDIVEANKQIADIVRQERLLAELKQQGLVDPDIYITRSSTLAEQLRTAKLEKERFLESEEDQTIRQTQVLLEILETGPEFLEAFDEELFSELVAKIIVEHNECLRFRLVNGLELTETIERTVR

SEQ ID NO: 8961 - protein, 549 aa, synthetic construct
MTETAPKVIVIPAKKETPQEQARKRNLRVAAYCRVSTNSKEQLTSYENQLAYYTEKIMKNPDWTMVKVFADEGKTGTSTCKRKEFLQMIRMCRQGKIDMILAKAVSRFARNTVDTINYTRELRELGIPVIFEEQNINSIYPESEFLIAIHGAFAQSESESTSSRVRWGQRQSMKSGRVTMQYKWMLGYEKGPDGRPVINEEEAETVRFIYQRYLAGDTLRAIKSKLEAQGALNAIGKQEWTIKNLLSILTNEKYCGDALLQKTFIQDCISKKVIQNNGQLPKYLVQDHHEGIVSRDVFYAAQLEIARRRAQTGGTSKSAPTGRSKYSGKYILTNLMFCGHCGTGYRRCVWNKGGVKRAVWRCGSRLDYGSKYCKHSETLEEKPLQQAILNAINSVMGSREELEARLLGAMEQELAPIPGETMSLADIDRTLDELEKQFNSLLAEASAAGGTEDYAERFRMISNTMADLKEHKARIKQVHQENELLNQRLKAASMAMSAYSAELTEWDQSVVYQLVEKVTALAKDKIRVTFRDGTEVEQEIEQLDWRNAS

SEQ ID NO: 8962 - protein, 572 aa, synthetic construct
MASRIAEKLAAKKAAIYIRVSTHWQVDKDSLKVQRRELIAYVTLVLGITDYVVFEDPGYSAKNTDRPEYQAMMDRIRTGEFTHLVVWKIDRISRNLIDFAAMHDELQSLGVTFVSKNEQFDTSSAIGEAMMRIILIFAELERKTTAERVTAVMLSRASDGQWNGGRVPFGYSWSKETKTFSIVPEEAKAIRRMAELYEQYQSLLYVAKYLNDAGIVTKTGGQWTPTTVRTILTNPWYIGQYVYNVHSDGKGIEKRDSDEWITVENHHEPILSEDVFYRMKFLLTRNKRGGVPSHKTYVRKNIHIFAGLLRCGQCGSNMTANLDRRRANGFRPSQYACGSRRRKGTSCTNKYISDTTLGPFVLNYVANIIRASKNSSEATTPEVLERKLLRGEAFEDVASVSTDALDQLLDAFRSAGDAVEYRPQIAFSGDDNSIREIDTLRARRRKLDNALARLNALYLYDDEAMPEKDFVMQRGQITKQLEEVNARIEELQNQESSEELGDDFIGKASYYIMANKLIEDRYIDYEKYIRAIDPSIPRSFLQQIIDHIVVNDGRVISITFKNGSTHTFTYKT

SEQ ID NO: 8963 - protein, 530 aa, synthetic construct
MALLPRKPAKHPAKPKRGKKLEIEEPGVLYGRYSSHNQKDISVEQQFEKGYELAAEYGIRIIDTYADRAVSGRTDKRRDFQRMMTDAAKGKFRYVIAWKSNRMGRNMLEALINEARLQDLGVRVLYVEEDFDDTAAGRFAARSMMNVNQFYSENMAEDIKRGLYDNAANCMVANGHLPYGYKADETLHYAIDEPKAAVIREIFTRVSCGEAFVDIMASLNARGIKTSYGRPWGRSSFQRILSNERYRGIYIYGDVRKEGGIPRIVSDELYFKVQEVITTKKNPQGRHRVNGDYLLTGKLFCGHCKSPMTGISGTSRSGNLHYYYVCQKRRTEKTCDKKNVRRDEIELQVAQAIKDYALKDDVIEWIADSTVAYNERKEAESKVGILEDQLAGTEHGIKNIMSAIEQGIITETTKSRLVELESERATIKAKIAAARADIVTVSRDDIISGLEMFRDGDVHDKKYQARLFDTFLVAVYAYDDDLRLVFSFSGNKNTIQIPIESAVNAVENNEAECSFKLCSAPPRKSLRLMA

SEQ ID NO: 8964 - protein, 580 aa, synthetic construct
MARRKTALRGVSASIRITKVAIYIRVSTIHQVDKDSIPMQKKDLIAYCQLILGTDNYEIFEDAGYSGKNTDRPAFQDMMGRIRKGEFTHVLVWKIDRISRNLLDFAEMYEELQSLRVTFVSKNEQFDTSTAIGEAMLKIVLVFAELERNMTSERVTATMISRANNGQWNGGRIPFGYSYDSGTSTFSIREDEAVVCRRLKDLYLDNKSLVYTARTLNADGYKTRAGADWTPTAVWIIASSPFYAGIYRYNRYKGTENRTLNPEEEWVMIPEHHPAIFTLEEHEAMKSSLKTNARYVDNPVGKPHATANIHIFQGIAYCGKCGNKMVSTPGKKHADGYRPSNYSCPLHRRSKKCDNATVNDMIVGEFAINYILNMLNAKKIFSNIDTPEELQRHLLTGSTFSDISSIEEDGLNDFFNLLSRYGSDNSYVFAIKTPRRKKASVNPELAALRKEKEKQERALQRLQDLYLYSDKSMSEKDFILRKSEISDRLKNINAQLGLITQNPDSLLSDEEFIKQASHLLIQKELKGRKYIYYKNLATSVDPEILRTYMETILDSMYIIDGRISSIVFKNGLTHKFIYKN

SEQ ID NO: 8965 - protein, 573 aa, synthetic construct
MVLNNIKPAMKIRVAIYIRVSTLHQIDKDSLPMQRKDLIAYSKLILNTDDYVIFEDAGYSGKNTIRPRYQDMMDQIRTGAFTHLLVWKIDRISRNLLDFAQMYQELKELNVTFVSKSEQFDTSTAMGEAMLKIILVFAELERNMTSERVTATMISRANTGKWNGGRVPYGYKYDQEEEDFLIIASESNVVKLIHDKYEELQSLVYLARYMNEHGYRTRSGNEWSPPSLAIILKSWWYCGCYEYNKRKAGNRQKLKNESEWIMIEDHHIAIISYDQKERVLAILKGNKRFATEHNLYVKGIHVHVFGGLCWCKNCGKKMTSTSSNKNRSWQYSKYLCSTRRRSLTKCRGRSTSDPVLGEFIFNYILNMLNAQKGFDSIHSPADLQDALLTGDAFSDIKSIDQEELNDLYNILSSSVVGNIYGRSFNVNKAKKNDEVQSSLTILKAEKKKLDRALDRLTNLYLYDDMAISEKDYMTKKTEIETKIAEIDEKIGIVNKNSVDNSITDEEFVDKASTFIITQKLTNRNYISYKRLATSVDPKILYMFTHDVIDYIDIYNGKVQRIVFRNGLSQTFIR

SEQ ID NO: 8966 - protein, 537 aa, synthetic construct
MPTSKNTARKYAAGGGSDNSCGVEPLRAVIYARYSSSGQREESIEGQLRDCYEFAKKHGIIVIGEYIDKAMTGRVDRRPDFQRMMKDSEKGRFNCVLLWKMDRFARNRYDSAMYKYKLKKNGIRIFYAKETIPDGPEGIILESVMEGYAEYYSENLAQNVKRGNYDSALELKTLGKTCLGLKTGPDGRYMIDQAEAAIVRRIFEEYAEGERAKDIYERLNSEGYRTSRGGKFNKNSLRRILSNKKYIGVYEYEDIYVENGIPAIITDRDLFERVQKMLKINHDAPARGKAQNFLLTTKLFCGLCGSPMIGDGGTSHTGKAYAYYSCTKRKRGRSCKKESVPKDWIEDLVVGELVKIVHNDELIEQIADRVMEYQKREKDQSGLHALEIRQKENEKAISNMLAAIEAGIITPSTKTRLMELEADRADIEKGIAHELLAEPEFERDQIIYFLERFRSGDINDEAYRIMLVDTFLNSVYLYDDDHLVLVMNYSGENCKVDLKLVEGAVSGDGCKGSAFAPSSALKNPVKSRVSEKSYDYS

SEQ ID NO: 8967 - protein, 438 aa, synthetic construct
MQRAALYIRVSSEEQAIHGLSIAAQTETLDAWAQENKIYVFDHYIDAGISARKKASKRPELQRLLEDVKSGQINLIVFTKLDRWFRNIAEYYKVQEILETYHVDWKTVQEDYDTSTASGRLKINIMLSVAQDEADRTGERIKAVFESKTLRNEPISGKVPLGYKIENKHIVINEETAPIAIDLFNKYIAIRSISSLRKYLMDTYGIAHSHTAIRVMLKNERYIGRAHDQENYCPALISQKTFDHVQEILNIRAQRSSLERTGRVYLFTGIVYCAECGNRLSGHVVAQKYIYYRCTRYEKLHLCQHKKRTSELVLEKWLLENLLTEFMKYNERLEAEAQRAKPLVDTARIRRKMEKLKDLYLNDLIERDIYEKDYTALSAELNAATKKPVIGKPVNIDKLSDSLATYSTLSREGQKEFWSRTVRRIDITNEDVFSVTPI

SEQ ID NO: 8968 - protein, 502 aa, synthetic construct
MEIQIREGNRRQNQKLKVCAYCRVSTDADEQENSLENQIRHYKEVITSNPDYEYAGVYSDFAISGFKEKRPGLQKMLADARKGKIDLILTKSVSRFARNTSIVLEATRKLKELNVGVFFELQNINTLSGEGELMLTILAAFAQAESESGSVGAKMVYQRKYEAGIPVQYLERSFGFKKDERGVYIADEEEAAWVRKIYEMAADGYTPAAIKRYLNENGVKTVGGTKWIDSTVFRLIENEIYKGDYIMHKHFVNEERKLVRNRGEVDAWYIEDDHEAIVSTELWQRAQDALEAKRDYLAEGSVIEEFTEENYPYMNRIYCARCGHPLYKRIYSNGNRLNWGCSGTKRYGKSFCEGINIPDGVLRGEWHFDENMYIGEKQTDRGKKEFTYLKEASWKRRHRKKEPEPIPENTETEYPYREKIFCGLCGSRLVRHVNTKSHKVIWVCNGRKRKGKDFCDGTRIPDTIIKGWGEIKKDIYIQRKDDKNGKKRYSYTSKKPKGADRA

SEQ ID NO: 8969 - protein, 464 aa, synthetic construct
MARSVTVIPARSQKVRTGHKAVQEKKIRVAAYCRVSTDQEDQLHSFEAQVEYYTKYINEHENYEMAGIYADEGISGTNTKKREQFKKMIADCEGGKIDLVITKSISRFARNTQDCLAYSRKLKNLGIGIIFEKENINTLDSTGELLFTILSSLAQDESRNISENCKWGIRTKFKNGEMHLNTFKFLGYDKDENGKLVINKEQAKTVRRIYRDFLIGINPAQIAKELTEEKVPGCLGQTKWYPSTVTGILKQEKHMGDALLQKTYTADFLTKRQVRNNGEIAQVYVKDSHKGIIDKQTWNAVQEEFDRREKFMELHGTDRYSYGADCMPFCEKVFCGECKSLFTRHSWRSRGIVQWQCKNHRKDGKVACTNAYVDNADLEKGFVKAFNRLVTDRDKNMERWQQMKSDGTPLEKIRAGQMMEAVGNEPLTRFVPEIAQLVLCEVTVLGAKKYEFFFLEGSRVKVSV

SEQ ID NO: 8970 - protein, 533 aa, synthetic construct
MDEKRLVDGATALAEKQSRVIKIEPAERPQNVRLRVAAYTRVSSDSEDQLNSFAAQNRYYTELISGKAEWRMVDIYADEGISGTSVAKRDDFQRMMADCRRGLIDQILVKSVSRFARNTKDCLQNIRELKELGVNVRFEREGIDTVNVSSELITAIYAAFAQKESESISGNMRWSYQRRMESGTFLPPSTPYGYRIINKKIEIDPERAVIICKIFQWYLNGISKEQIAYKLNKAGVLSNQNKAWRAGGIHYILTNERYIGDSLWQKTYTTEAIPAVRHRNTGAREQYYVEGTHPPIISKEVFTKVQILIQMRKENYGKSPSETIHPLSRKAICGCCGTVLRRKPQRGKYYWCCMRHDTNREECPLMPISETSLCESFCRLYYKLKHQSIPILEQMLTNLQMIRNRRMLWSPDIVALNKRISDISSQNQTLAFLKQQGLVDPDIFIAKTNELTKQLRQAKLEKEKLMDAESDMTALQTRDLIDILEDGPEFLDSFDTELFGELVEKIIIESNDSVRFCLKNGLELRESIERTVR

SEQ ID NO: 8971 - protein, 539 aa, synthetic construct
MKEDAPRVIKIPAKPEATRQAEARRQLRVAAYCRVSTKEEDQANSYEVQKEYYTDKIMSNTAWTMAGIFADKGITGTSAKKREDFMRMIRHCRQKKIDVILTKSVSRFSRNTVDCLYYIRALKQLGIAVIFEKENINSLEEDSELRITLSGAFAQSESESISANVTWGKRRAMETGKVSIQYKKLYGYRKGEDGQPEIIPEQAEIVRWLYERYLTGASLRMIKEELEQQGVKCSEDSPEWTISRIRSILQNEKYCGDVLMQKTFRQDFINRKAIKNTGQLPMYLIENHHEGIVSREKYDAVQAEMARRNAAKSPSKNAVTGMASYASKYALSERLVCGECGTLYRRCTWTRNGEKRVVWRCVSRLDYGKKYCHNSPTLDEAPLQQAILAALNTAMADKNSLIRQITDAMETEIIPFPGGTMSLGDIERRLRELEQQFQTLLEKATDDPAAYGGQFKEILDEQTFLKEKRSVILANNNEQAKANQRIMDAAQTLENASPYITEWDESAVRQLVETVKILSKDEVAVTLKGGIEICQKIMY

SEQ ID NO: 8972 - protein, 538 aa, synthetic construct
MAKKVTVIKAAKAQKHTQEERRLKVCGYARVSTGSQAQATSYTAQVEYYTEKIESNPLWEFAGVYADEGISGTNVKHRDEFQMMISDCEDGNIDLILTKSITRFARNTVECIQTIRKLKEIGVGIYFEKENINTLSEKSELFITILASVAQGESENISSNNRWAIQKRFQDGTYIISTPAYGYGKDEDGNLVIIESEAETVRWIYESYLNGMGVYVIAKALNQKGIPTIRGAEKWQDGVIQDILKNPIYEGDMLQQRTYTETRFPFVRRVNNGQRNQYLIKDSHPSIVTHEEAEAVRNLMAYRVDVLHMNKSDYTKRYLFSGRIICGECGKTFRRQKIYIGKPYEKIIWTCSGHVEDKETCCMKAIREDVLHRAFTDMWNKLYTNQGTILEPLLKELTELVAARQDSEEIRQLDKEIKDISEQSQILNQVMRKGYMDSALFMESSSKLGWQLTECRRKKTLLTRKLRRTKEIVRTEQLIQLIAEQDGLREEFDEQLFKMTAEKIVVSKEHDITFCLYNGLKLTERGGGQDAVAHANRL

SEQ ID NO: 8973 - protein, 544 aa, synthetic construct
MAETAKKISMIPAKVQYDRNVKLSEKKMKVAAYCRVSTELEEQDSSYEAQVEYYTSKISENENWKNAGIYADDGKSGTNTKKRADFNAMIQDALAGKIDMILTKSVSRFARNTVDSLVTIRKLKEKNVAVVFEKEGINTLEGTGEILITILSSLAQEESRNISENIRWGVVRKFEKGKVIVNCTKFMGYTKNEDGDLVIVPEEAEIVKLIFRLYLEGYSTGKIAKHLEEQGIKTATGQDKWHSTVIDKMLRNEKYMGDALLQKTYTVDFMTKKKVKNTGLVPQYYVEDDHEAIIPKELFYRVQEEMMRRASLCKAAVTRKKNQRSRYSSTYALTGMLICGKCGQEYRRVTWARNGKKKVVWRCSNRLTNGVKKCGESETLEENALNRAVMEAIHRITSDDMEFMEHFRQNIIHVIGSYGTAKESGEYEEKIKEKQEEMVALIAENAKTGSYTPEFDERYRTIAEEINALKEAQKTARNEKRMADSYEQRIQDIDHYLSTSTCQIPEFDNDLVRRLISTIKVESSEKLLIQFQSGIVMEQEIRYE

SEQ ID NO: 8974 - protein, 433 aa, synthetic construct
MSGRITTVSKPPKLERKKRVAAYARVSSGKDAMLHSLSAQVSHYSDLIQRNSDWLYAGVYADEAKTGTKDSRADFQRLIADCHAGKIDMVITKSISRFARNTVTLLQTVRDFKAWEVDIFFEEQNIHTMSADGELMLTILASYAQEESRSASENQKWRIKRNFEEGMPWNGAMLGYRLKDGRYEIVPKEAELVRRIYTEYLAGDGYLSIAKRLTEEGVPSRFGGKWNQSVVSKILSNYTYTGNLLLQKTFRENHITKKTVINHGELPKYHAENTHEAIIDMETFHAVQTEKARRAAQYNKKPAPRTTYPFTSLLVCDICGKNYRRKTTKTGIVWVCGTFNTLGKSVCASKQIPEATLQQVTAEVLGVKAFTREQLHSQVQSIRVCNGNILVFCFKDGSKVTRTWKDRSRAESWTDEMKEAARRKTLERSKHNA

SEQ ID NO: 8975 - protein, 526 aa, synthetic construct
MPKVTMIPATINPLTHLPKVAAQKRRVAGYARVSTDSDEQFTSYEAQVDYYTKFIQSKPEWDFVKVYTDEGISGCNTKKRDGFNSMVSDALAGKIDLIVTKSVSRFARNTVDSLVTIRKLKENGVECYFEKEGIFTFDGKGELLITIMSSLAQEESRSISENITWGQRKSFADGKVHLAYKRFLGYEKGKDGRPTIVESEAKVVQLIYRLFLDGKSQAAICRCLEDLGIPSPGGKDKWSKTTVTSILQNEKYKGDALLQKSFTVDFLEKRMKPNEGEVPQYYVEGSHPAIVDPDEWDHVQTEFARRKALGRAYSGKSVLSAKLVCEDCGGFFGSKVWHSTDRYRRTIWQCNSKFKVEERCHTPTVNTKTVQRLFTQAYNRMMENREQIIKDCETMRRALTDFAELDAEIERQLEETQVVAELVKAAVKENASTAQSQEAYLRKYEALTERYEKAAAELERLQNLRTTQSQQDKAMALYIRTLKKQPVVLREWSDTIWTVMVEKAIVHRNGAITFVFKNGTEVKVGE

SEQ ID NO: 8976 - protein, 526 aa, synthetic construct
MAKKNVTTIPATKSRFTAAPINSRKKRRVAGYARVSTDMEDQQTSYAAQCDYYTNYIQSREDWEFVGLYSDEGISATSTKYRDGFKQMVEDALAGKIDLIVTKSVSRFARNTVDSLSTIRKLKEHGTECYFEKENIWTFDSKGELLITIMSSLAQEESRSISENCTWGVRKRFADGKVSVPFGRFLGYDRGKDGNLVINEEQAKVVRQIYGMFLQGKSPYVIAKELTAAGIPTPGGKEVWGRAVVQSILTNEKYKGDALLQKVYTTDYLSKKKKVNEGEVPQYYVEGNHPAIIDPAVFDRVQLLMKARCPGKNRISSVSIFSSKIKCGDCGSWYGSKVWHSNDKYRRVIWQCNHKFKGGEKCTTPHLTEDAIKERFTKAMNLYADQREVLIATFTEIEHIAFDTTDLVNEQQSLQNEMNVLAEMLEQCIAENSRVAQNQDEYEIRYNALAEKFDGIKARLDTVTAAIMEKQAQREEMRVCIETLTALPDTIDTFDEPSWTALLDYATVQMDGKVEFTFKSGTVITV

SEQ ID NO: 8977 - protein, 520 aa, synthetic construct
MAKIARIEPVSATFKKRKRVAAYARVSKETKRLLHSVSAQVSYYSKLIQSNPEWEYAGVYADSGLSGTGTEWRDEFQRLLADCEAGKIDIVLTKSISRFARNTVDLLETVRHLKELGVEVRFEKERINSFSGDGELMLSILASFAQEESRSISENVKWGVRKRFQSGEIGAANKHILGYRYDDDLEQYVIIPEEAVIVRLMFQRYLEGVPLQGICDELNDKGYRTINGKLFQEASLNNLIHNEIYAGDLVRQKSVTVDPIKKVKVRNNGELPQYYMADCHEAIIDRETYALVQQEFERRTAMLNPTYCFTKKIRCAVCGQPFTRKKSTQRGKTYVHWICRSKKNPGESCTTRNYADDELKRICAEVLGTESFDEAVFENQVKEMLVQENGNIEFHLIGGECRVWHDLKITPTYHEFTVTDCFQGKVFCGKCGHPYHRVVSAKKWSYWYCIGKKYGYKGVDCDAQNYADFQLRRISAFILHQTEFNEIAFEEQIEKITVLEDGSLEYKFYEGRTEIWQRKM

SEQ ID NO: 8978 - protein, 494 aa, synthetic construct
MRVVGYARVSTREQADHGYSIGEQNSRLRAYCQAKDWTLLRVIEDPGFSGAKMQRPGLQQVLEMVRRRECDAVLVWKLDRLSRSQKDTLYLLEDVFLANGCGFVSMLENFDTSTAFGRAMVGILSVFAQLEREQFKERSAIGRVGRAKAGLFHGGGYAPIGYDYYTKEDGGQGLVVNEYEAMQVREVYRLYLAGWAVHKIQVYMHERYTTKNGCWASDTTVRSVLSSPIYLGRITWAGKTYEGQHEALVSQNDFDQVAARRESLKWQPAEPRAACDLIKNSPFRSTHILGGITWCARCGARYFASGNYSGRGENRKYWPYYTCYSVAKSSKKMIKDPNCKNKRWAVGKLDAIILAEISRLEFDPAALAKAAGPVDVSGVEEKRRVLEARVAEVRPQMERLLDLCQTGGLPVASVSGRLAALQKELDALNGELSGLAVPETVDRLAVAQEMLAGASAVIKNGTPEQKRALVHSLIGRIDIDGEDITIHWLFAPEN

SEQ ID NO: 8979 - protein, 463 aa, synthetic construct
MSEKIKRCAIYIRVSTSEQMMHGKSLEAQREYLERYAKEHNMIVVGIYADEGKTARKELKKRKAIHALLEDVKAGKIDMILFWRLDRWFRNLSDFYKVQDILDEYDVHWLSASEPGINMETRDGRLQLNVVLSIGQNEVDTTSERIKFVNEASIRQGKLIFGEANMGFGYKSGIVDGVKRMIKDPETEEATEAFFKYLLSHQNKSETVRYMQKHYYPDFSYSMLRTMVSSEFYKGTYRGIPYCPAYITEQEWLQLQELSRKNIKQTPSGRIYLFSGLIRCPVCGQKLAGTGCSSIINRKTKEKRTYCYYRCNRAILDRLCTSRHRVSQNLIEKYLLENLSEEYKKYQIRYTKICEQKKKIKDTRTPEKLNKELDRLNLLFQKDRITWEYYSTEYDRIEKELKELSAIHPEPEKDFTYLEELLRSDFKKIYEQLTPENRRTFWRSTIEEIHLNEDYTVESVDFL

SEQ ID NO: 8980 - protein, 438 aa, synthetic construct
MSTDQEEQLLSYENQVNYYTNYISENPLYEYAGTYADEGISGTNTKKRDEFNRMIADCRAGKIDMIITKSISRFARNTLDCLNYVRELKDLGIGIIFEKENINTLDAKGEVLLTILSSLAQDESRSISENCTWGIRRRFETGKHKMSTKRFLGYDTDETGKLVINRTQELIVIRLYQEFLDGKTTDYIKRIFEREGVKNWDGGTKWQSTTLMSMLENEKYKGDALLQKSYTVDFLTKKRTQNKGEIQMFYVEDDHDAIISKRIWECVQLEIKRRKKYLEEHGTNSYSHRPESNPFASKIICGDCNKVFARKGWRSSTGVDRKVWQCSERYKVKGVMGCVNRHVEEETLIKAYLMAWNALVENREDFMEQWTEQLQSENLLEGYRAEKFIEYTDGAEPLTEMDTDFMLKTLDHIKVFEDGTLLVVFLDGTEIECKNEEE

SEQ ID NO: 8981 - protein, 527 aa, synthetic construct
MAHCLYLRKSRADIEAEAHGEGETLARHEKLLLEVAKRGHYNITQIYREIVSGETIAARPVVQKLLQEVEDGKWEGVLVVEVERLARGDTIDQGVMAQAFKYSGTKIITPLKVYDPANEFDEEYFEFGLFMSRREYKTINRRLVRGRNASAKEGKWVSGLAPYGYERVRIKGDKGWTLRPVEEQADIVRFIFKLYTSGEEDENGEVRRLGTYTISKRLDSLGVAPPSSAQYWNDRTVQCILQNPAYIGKVRWGVNKSKKRIVNNSIEVERYKAPADEVIYVDGLHPAIVDEAIFRKAQDLLKRSGPPPVPKRNSVVNPLAGILVCGKCGRSIVLRRGRLDMLICHNRLCDNVGSKYEYVEERLLQALSSWLEGYRLEWSDKLPADEQALLDLKQKALRKTVTELETLHKQLDRTHDLLEQGVYDTNTFLVRSRSLTERIAAAKEDISTLTAEVQADKERAASRLNVIPKVEKLLEVYPVLPSAQAKNEMLKEVLEKVEYTKNERSGRNGPFDNFELVLYPKLPPKIE

SEQ ID NO: 8982 - protein, 514 aa, synthetic construct
MSTNYALYLRKSRADLEAEAHGEGDTLARHEHILMELAKSRALPIGAIYREIVSGERIANRPVMQQLLSEVEDGRWKGVLVTETSRLARGDTIDQGIVAQAFKFSGTLIVTPAKTYDPTQEADEEWMEFGLFMSRQEYRMIRRRQLAGTRASKKEGHYVPGRPPYGYERYKLDGRGWSLRPVEPQAGVIRTIYDMYLSGKGFSEIANELNAMKIRTPLDKKWVPATTRAILQNPHYAGFIPSAMKVNTKIVQKGKLITKRPVNKNCELYEGIHEAIIPRDVWYSVQQRMKDTVTPRVPRKYQQMNPLAGLVYCDQCGKLMSRHPYRREDKVRFGCENPSCSTVSSLFEDVESLVLQSLREFLHEIELSSPTLLDTKSEEIALQNIEKQLTDINHRLQRTYELLEDGVYSKETFLQRQSAISQDQTALLNTKHEIERKLHNKQTDIEAQKNSAPLIRHVLDVYPTLEDPKEQNLLLKQVIRRIDYHKTVRVYGKAKSDLHLTIHPKIAIPQTSNI

SEQ ID NO: 8983 - protein, 537 aa, synthetic construct
MNYLNGEKLLELGVECIINYLRRSRADEEYEKRTGEDTLKNQADLMDRVLAPYGIPYVQETEIGSGDKISTRPVFQQVIADLRSRKYQAIAVKEISRMGRGSYTDMGTIYDLIIEFNIYIITPYRVYDPSNPADLRQIRFDLFMSREEFETTRERLMGGRITAAHDGRWVAGKAPYCFVRDESTGKLVLHESESADMRQIYIYYVYGVPDFKNGGLRDVSYRALSTFLKRHTNILTPEGNKEWQPAMLRRLITHPRNVGIHEFKPKGQDPIIFYGPMVVEQELYDKAMEKDQASRHKPRTKLDFSPCELAGLIICAKCGRRMVRQYSTQIYKHKDGKGESRYEKEFLWCTEPGCTFLKYRSVESQMLKVLELLQSLDNEKLRRYIQNSVNNDEGERLERERIGMLEGLMGRRDNLKKRLVFIFDKYEEGMYDNETFLNRKAAVEKELEEVDELEKMYRGAKIEKKEEVDVKQVQRNITTVLRAYHATDNKTSKNTILRAVFDHAVAEIIEKGSGRKEAKFSLKPVLRADILGEIHLG

SEQ ID NO: 8984 - protein, 494 aa, synthetic construct
MKTAIYVRVSTDEQAEEGYSIEAQKRRLLAYIESQDWTLFDIFIDDGYSAKDLERPEMKRLLHCISENMIDVVLVYRLDRLTRSASDCDKLLKLFEEHSVKFQSSTESFETRTAAGRLFIRLIADIAQWERETIAERVRFGMEQKVREGKRPGAKFPYGYDKKGIQVVEEVKIIKRLRYMYMVERLSYKKIAEQLYIEGVDRRGYAWTAYTVQLTLENPFYAGIIRFGSKLPNGKYTQRNVEERVECVYGDSQYEAIWTIEEFKEHTERMKSRSSNGYSRKLDYWFTGLLRCGRCGAAMFGRLTTKRSLKDGTIVRNPYYWCSNRKSNNSCDMPMFRQSHVEHLIMEHINKIVFDQELMESGHHDFEEEAKKNSKEIAKIKRKLDEFSKRKKKWQYMFVEDLITFEELRERLKEEDENTEIESKKLNSLNVDSGFIIDTPRLIRLRDAWNFADDSEKQELLRTIFNTITLKTECRNVKGVKNKFFDAEIEVKYN

SEQ ID NO: 8985 - protein, 522 aa, synthetic construct
MKNSDINSAVLYCRVSSKEQEETGYSLPSQQKLLSEYAHRKSFTVVKIFSVAESASGSKQRKVFAEMMAFIAKHDIKNLIVEKVDRLTRNFKEALSANDWIGEDEDRKIHFVKQNLILHKNAKSDEKFRWDIEIVLAKKYISNLSEEVKKGQAEKLSQGWLPTKPPIGYKTVGDNGHKIHIIDSIVSPFIKKIFELYASGSYSMEALRRQIYNEGFRTRAGNQPAKSMIGKILTEPFYYGAMKWKDILYVEAKHEPIITKELFDKAQSVRKGHLTPAYSKHSFQFKKMMKCGECNGTVTAEIQKGIVYYHCCHYKNCSQKPYTPEKEIEDQLFGTFNFFKNITPQEADAIRANIKANHAQEIEYKEDTLKALNARYMQLQGRLDMLYNDRLDQKITTDIWEKKQAEVNAEQQEIQEQILKIKNIETKYFEIWLNILDLSQRALEIYKKRSPEERRLLLSHIFSNLMLKDKKVLPLLKKPIEVLSKRVQQKIDAQNNFERQKSVTTKRQKSPLSPLCPELLGD

SEQ ID NO: 8986 - protein, 438 aa, synthetic construct
MKDNTRLKYCLYARKSSESDERQAMSIDGQLKEMQLLAKREKLDITETISESHSAKESGQRPEFNNLLLGVIEGRYNSILTWAPDRLSRNAGDLGRIVDLMDQGKLTHIKTYSQSFTDNPNEKFLLMILCSQAKLENDNRGVNVKRGLRNKCQIGIRPGVAPIGYRNVLKVNRISTVELDPERAPVIKQIFHKVADQGFSGRMVKKWLDDIGFTTKSGCKMSLSKIYVALQNAFYYGEFQYGNIWYKGTYEPLITKALFERVQIQLQVAPRQWNKQLFPFKKICICGSCGGSVTAELKYRRTKANIVNSHIYYHCNRIKKYDCPEPYITEQELIKQLIGYLPRIKLNTSYLMQEFEVEVKRLQHFKANVISDYIPRVEITPHNTGDINPREYSETHTEMLKEYLLHVLQFGTPEERLKILKGVNSKFSLRDRQIQLLH

SEQ ID NO: 8987 - protein, 520 aa, synthetic construct
MRRITKIEENKALSVKKKIRVAAYCRVSTASDEQLISLDVQKAHYEKYIKANDEWEFAGLYYDEGITGTKKEVRDGLRSLITDCEKGLIDLVITKSISRFCRNTTDCLELVRKLLDLNVYINFEKENINTGSMESELMLSILSSLAESESVSISENEKWSIKKRFQDGTYIISYPPYGYANINGDMVIVPEQAEVVKQIFANTLEGKGTHAIAKELNEHGISSKKGSKWTPGTVNAIIRNEKYTGDVIFQKTYTDSNFNRHINYGEHDKYLCTAHHEAIISHVVFNKANEVMSQRGKEKGNGENTQRYQKRYGFSGKIICGECGGTFKRRIHNKPSGNYVAWCCTHHIENKDACSMKYITDDNIKVAFLTMMNKLIFSHQVVLRPLLRSLQGLDDKDRLLQIQECETKLEKNIEQRQVLTSLMASGILEPALFNSENNTLNQEKEMLEAEKNKLMHSVSGDRTKFDALEKLIKYVSGSEMLFDYEEDIFLTHVDTVTVVSREEIVFVLKCGLELKERMVG

SEQ ID NO: 8988 - protein, 521 aa, synthetic construct
MNKSITVIPARKRVGNAVNMEDKPKLRVAAYCRVSTDSDEQATSYEAQIEHYTNFIQKNEEWEFAKIFADDGISGTNTKKREEFNRMIEECMAGNIDMIITKSISRFARNTLDCLKYIRQLKERNIPVFFEKENINTMDSKGEVLLTIMASLAQQESESLSKNVKLGLQFRYQNGEVQVNHNRFMGYTKDDEGHLIIEPSEATIVKRIYLEYLQGASLKQIGESLESDAILTAAGKARWRPETIKKILKNEKYIGDALLQKTYTVDVLTKKRVKNNGIVPQYYVENSHEPIIPRELYMQVQEEMLRRTNLHSGADRKKRVYSSKYALSSIVYCPKCGDIYRRIAWNNRGKHSIVWRCCTRVEHGPSRCDAPTVGETELQEVVVKAINMALGGKDDMLVALEQNIASVLALEDEGSIESINAKLEKLQKELLKRANAKKDFNDLADEIDRLRELKQNAMAENAEREGLKQRIAEMQEFLTEQRGTIQVYDEQVVRKLIEKITVHDEKVTVAFKSGMEIDVKM

SEQ ID NO: 8989 - protein, 554 aa, synthetic construct
MAERVCCSYQNVLSIQNRVCCLYRVSTTKQVDHDDQNQADIPVQRKACCEFAERMGWTIVYEEQENGVSGFKVSANDRDKIQLIKEYAEQGKFDILLVFMFDRIGRRAEETPFVVEWLINHGIQVWSVNEGEQRIDTHVDRLTNYIRFWQADGESQKTSMRTKAALGQMVQEGRFRGGSAPYGYDLVPSGTYNKRKHEVFKLEINPDEAKVVRMMFDLCVGSGYGRFKIANFLSEMGIKTRDGKNWHEATVGHILHNIMYTGVLRSGSTQSKAFPDLQIISPENFELAQKLMAERANECNALRTMPRNTRGQSLLSGNVFCGHCGGRLTLTTNGTTRINAAGEKVGRKRIRYVCYNKTRKRSNCDGQTGYTMHILDKMVTDILHQVFDRMRSVEENEIISRTHRSAMVSLKKRLADAKAESAKAAKEYESLKLEIIKAVQGESAFPMDVLSELVNNARTRMLDANAQLTELNEEVEKSNQRIEAIKADYRRIMEWSEMFDGSDMDVKKMIAGYIIKRVDVYSDYRLHIEFNMSFAQFELGLETEVEYAAQDIVP

SEQ ID NO: 8990 - protein, 484 aa, synthetic construct
MKKEKVIPIDSLDLVDLYIRVSTTEQALEGYSVAEQEHRLRQYCAAMGHRIHKVHIDAGFSGASLDRPGIKETIKDVQKHLVRRVIVWKLDRLSRSQKDTLIMLEDVFLENGCDFISMMESFDTSTSFGRAIVGILAAFAQLERENIKERTMMGRQARLAKGHYNGSRPPLGYSFIPGSNDLQVDPYQAAIVREIFKLFLSGISINAIARKMEEKYPTVRTWNNTMIRRTLKNPVYIGKVNDNGILRDGIHEPLISEIDFQMANAILVHNSKIKKQSCRSRSLLTGLLYCGDCGARMHPRRIARGYPLRRYVCYSVSRTSKSMIKSDHCTNRLHPYTQEELEQIIIDEIKKLTADEDYISEVIRNSSAEAPVDDTELFQERIEELNRQTDKLLNLYQIGAIELDQIQERLAALKQERESLTAAMKESQTKTDINMDHLKIMSYASAFQVALESGDPEYTNSIIRLLIDKIVVLNEDIEIHWTFC

SEQ ID NO: 8991 - protein, 522 aa, synthetic construct
MNTLERDCIYLRKSRADREAEARGEEETLSRHERILLDLAKRRGCHIGAIYREVVSGETISARPVMQRLLQEVESGMWDGVLVVEVERLARGDSIDQGVVARAFQYSDTKIITPTKTYDPNNEFDEEYFEFGLFMSRREYKTIKRRLNAGRVSSVQEGKYCGNKPPYGYRRVKLEHTKGYSLEPIPEQAEIVKLIYNWYTYGIDGERIGMCKITRKLIDMGVPSLSGKSWSTATVANILENPVYTGKIRWNRRKGMNKIENGNVVKSRPRCDDYILTDGLHEAIISQEIYDLAQYYRSMNPPRPIGASNTVKNPLSGIIKCGKCGHNMVRRPYNSRKQEDTLLCSYTGCNNVSSRLSLVEKALIAGLADLVQSYKINDTLNDTNGVDIIATKEKVLLDKRAELENLNTQKNRQYELLEQGIYTTEVFLERSGATAKQIDDCAAAIERIAADLAHDRELLEQKFNFIPKCEHLLSNYWDWDAPTRNSVLKELLERVDYFKDNKNDFKRGDEITFTLDIYPKIQ

SEQ ID NO: 8992 - protein, 506 aa, synthetic construct
MYGMYLRKSRSDDPNEDINDTLAKHEKILFDLADSLNINRKEIMQFKEVVSGENIQNRPEMKKLLEYVMEGVLEGVLVVDSQRLARGDTVDQGTIIRAFSINNTKIITPMKTIDPQNEYDQEYFEFDLFMGRREYKMITRRMQRGRHIAAQEGYYVGSIAPYSFSRIKLDKGYSLEIYEEENIVFNIMKKKALEDEGSTNISNHLNELGYKPRKGEYWTKSAVEAILLNETNLGLIKWNSRKEVKVFKDGKIVKTRPRNPNYELYPGKHPAIMTQDEYDRIKFLMKKRSHPVKKDRTLQNPLAGLIVCGFCNHKMARRPYKNGRVETILCTTSRCKNVASDIHVVEQRIIDTLKDTLKNYTNYVNNYSVSVNKTYDDNKKLQLEECDKELERLNKQIIKACEMLELGAYTVELFKERKNTLENKINTVNKRKDILSKETEAMKIEQYKKAIPQLQNAIDLYWKSSTEEKNKILKSIIDKCIYKKEKGGRWDPDAIKQFKLEIYLKV

SEQ ID NO: 8993 - protein, 406 aa, synthetic construct
MERTIKVIQKGISKIPSKKRVVAYARVSNGKDAMLHSLSAQVSYYSNLIQNNNEWSYVGVYADEAVTGTKDNREEFNKLLDECRNRKVDMIITKSISRFARNTVKMLETVRELKELNVDVFFEKENIHSMSGDGELMLTILASFSQEESRSVSENCKWRIRKGFEQGELINLRFIYGYRIDKGKIEIYEEEAQIVRMIFQDYLDGYGCTVIAKKLREMKVKKLRGGKWNSERVADIIKNEKYIGNALLQKKYVKDHLTKKLIKNKGTIPQYYAEETHPAIIDIETFKRAQEIMKVNRIKYKCEPGKKNYIFTSKIQCGICGKNYKHKDRNGRSTWVCSNHHKYGDEGCIAKPICEEQLIKILSVVLQIKEFDEDIFNETIEKIKIEESRTVIVILKNGKVIKKGMV

SEQ ID NO: 8994 - protein, 463 aa, synthetic construct
MTTKVERCAIYIRVSTTEQMMHGKSLEAQKEYLTNYAKEHNMAVVGIYADEGKTARKELKKRKAIHSLLQDVEAGKIDVIIFWRIDRWFRNLSDFYKVQDILDSHNVRWISTSEPGINMETRDGRLQLNVVLSIGQNEVDTTSERIKFVNEASIRSGKLIFGDVNMGYGYKSGIVDGQKRMVKDPDREHVVDAFYKYFFKHQNKCATLRYIQETYDPDFSFGIMRTLLSSEFYKGTYRGFPYCPAYLTEDEWNKLQKIQKRNVKATPSGRIYLFAGMIRCPVCGQLLCGTGCSSIINRKTGAKRTYCYYRCNRAMIDHICSYRHRLSQNLVENYLLDNLENEYKNYKVKCEKIEKEKEKQKKKQSPEKLRKELDRLNFLFQKGRIDWDYYNEEYGRVESELNDLQSALPEPVTNYGYLEELLDTDFRTMYDQLSQENRRAFWRSIIQEIHVNEDHAITSVDFL

SEQ ID NO: 8995 - protein, 563 aa, synthetic construct
MAYRKVISLLDTIGLRAVFYARVSTAEEEQLNAIELQIEENRNCISKNKWKKVDEYIDRSKSGTMVKGRDEYQRLYEDLLTDKFDIVVIKDQERLMRNTKDWYLFIDRLVQTGKLLYMYLDNRFYNPDDALITGIRAIIAEEFSRNLSKKLHNYHDGRIEKARQGKEIDLQGSGNVFGWDKKDGKYYINPEQAKVRRLMCEGIMARKGSTQIAKELNDAGYRNTVGKEWKPMDIPKFVYDCKNVGTMVINKERHDFESKQTIKLPEEEWVYVKNALPPIVTEEEWELICKIHDERVVATGSDKRGKGKKVSGYSFSGKLVCGVCGAPYWRKQRSTKEEYWVCSTKQQKGRKTRKRDSVNGKAGELNEAGCDNTNISYNSLMEIMSIISERLQANTELVKADMINKLNSWRKRIIEANRGATEEDLQKELSRKDKLLDALLDGILTKEEYTRKAESIENKIAELKQEIEANKTQFEDIAEIDRVLANIDEEVAIYLNENKQLKVEYILEHLEKVEIYPDKVIVIVPLFDVGFIVDKEQYVSREKRRRKDNIFKNDQRIIKADRR

SEQ ID NO: 8996 - protein, 529 aa, synthetic construct
MVKKVKKVRKIEPVHQKVILELQPKKRVCAYARVSTNSIDQQGSFHAQVDYYKKFIGKRDDWEYAGIYADEAKSGTQVKRRDEFLQMIKDCEDGKIDMIITKSVTRFARNTVDSIEAIRKLKLLGIGVYFEKENINTLSEKSEMLLTILSSIAQGESETISTNNKWGIRKKFEDGTFRFSTPAYGYTKDEDGQLIINKEEAKVVRRIFNEYLNGKGFYAIARGLNEDNIPTIRSAEEWQDSVIKVILQNPIYEGDLLLQKTYTTEILPFQRKVNKGELPKYFIENNHEPIISRKQGQLVREIYEYRRNKIGIDDSDKYKNRYEFSSRIICSECGSTLRRQKIYIGKPYEKIQWCCIQHIRDINKCSMKAVREDIIKEAFLTMWNKLVSNYIDILHPLLESLKDLRTNEEQEEEIKDLNNKIMELTEQSHILSRVVSKGYIDSAVFIERQNVLTVEIEATRKRRNQLLDNNGFEKEIEGTLRLLDIIRYNSEIMEDYDENLFIHTVDKIIIGKDYEVTFRLINNLELTEY

SEQ ID NO: 8997 - protein, 550 aa, synthetic construct
MARPRKNVAFIPAQPIYDRNIRAELKVLRIAAYCRVSTTLEQQEGSYEAQVSYYTNKIKNNPNWKCAGIYADDGKSATNTKKRDDFNAMIEDCMAGKIDMVITKSVSRFARNTVDSLQTIRKLKEKNIAVFFEKENINTLDGTGELLITILSSQAQEESRNLSENTKWGITRRFENGIISINHKKFMGYTKDEDGELVIVPEEAEIVKRIYRMYLEGSSILEITRALEADKIKTATGKEKWHPGVIEKMLVNEKYMGDALLQKTYTVDFLTKKRVKNNGIVPQYYIEDNHEAIIPKELFYKVQEEKTRRASLNKSAVTRKFNKAKKEKSKFSSKYALTEILVCAECGHPYRRQVWSKYGQKSAVWRCENRLKNGTKANCKNSPTLKEEPLHNAIMTAINSVVENNGDFIGAFRENVIRVIGGYSTTNIPTEYDEQIKSLQKDMLTLIEENAKQGAVAEDFDDEYKSISEEINELKKAKLRLVQEKKQADRYEERLDEIESTIKTVRPQVREFDEDLVRRLINTIRVNRGERLEIQFESGIVMKQTVDYYD

SEQ ID NO: 8998 - protein, 536 aa, synthetic construct
MATSKKNNNMTPAVIYARYSSHGQTEQSIEGQLRDCYAFAEREGYAIVSEYIDRAISGTGADNRPDFQRMIGDAAKKQFAVIIVWKLDRFARNRYDSATYKMRLKKHGVKVVSATENISDNPEGIILEGMLESMAEYYSANLAQNVKRGQRESLLKGHYLGGSPPIGYKIVDKKLVIDENKVHIIRRVFEEYARGISKKEILAELTAKGITNTNGKPLTSSCFQHALKNEKYIGIYRFNGEEVPGGCPAIIDKKTFLTVQNRLAEHRKTGAASTAKTDYLLHGKAFCGNCGTRMVGEYGRGKGGGMFYYYSCGKRKRYHSCNKKSEKKGFLEWYVVEQTLEYVLNKQHIDFIAGRVVAAYNDEFSNKRIKECEKLIAKLDADINKLIDTIVVSPAKAAGRITEKIELLELQKNDLEVDLSRLKIANEIRYTKSQIVAWLKSFCDGDLMDEKFQRKIIDVFINSVYVYDDKIVIYYNIHGGKQVSYVDMLDSTEELDENNGDGVRALNRSPCSRKASVGAESAWILAFLFSILFSYL

SEQ ID NO: 8999 - protein, 577 aa, synthetic construct
MKKTLSSKIADLYIRVSTDEQADKGYSQRDQAERLKMYCTKLGITVENIIFEDHSAKNFERPEWSKYLKNLKKRRTKDREPRLVLFTKWDRFSRNAGDAYSMISILEGLHVEPQAIEQPLDLKIPENKIVLAIYLSTPEVENDRRALNVFYGMRRARKEGRIMGIPPYGYVNRCTEDGTKYIGVKHPEAENIIWAFEEIAKGELPTEHIRVLMNKREGKDLTRNAFMVAVRNPVFTGKVFIPEFENEAAHYVKGKHVALITEELFEKVQRILDGKSWKVKSEIGENRVLRTDYFPLRGVLICPRCGNTLTASRSKGRKKHYSYYHCNSKCGFRHNSEEVNDKFVDELRKFEILPEYRDVLKILLLKNYKRYCANVDEEKKYLVDEIETHNKKLSKARDLFLTEKLDEDDYAAVKAECKIKIDELEETLKGLTKTGKDQDIPGKLALALDGISNIAQRYNEAAVEDKRKIAGSIYYNKLEFDGRNFRTPISNAFLNLIKLSKRGLEEQKKSHQNSKSPDDHEVSAKGFEPLTVCLEGRCSIQLSYAPLKVDSRLVNKHIKSRGGRIRTCDLLVPNQAR

SEQ ID NO: 9000 - protein, 521 aa, synthetic construct
MNKIACYVRVSTDKADQQKSLEQQRVLLEAQYKDREILMYSDTGTGTSFKRAGFQQLMYDTGLNAKDLKDGRMVFEVDAERQPLFNEIVVINTSRFARNIAIVDILRVLWNYKRVNVKFLDVQKDSSNINDMILLQMFFAMAENEVKETSVRTKRGNKTTILQNKIRNNSIFGWDFDRATNSLIKNEEEAKVVEFIFNTSLKNGLKMTAKLTNQMGYRTKKNNLWTDSTIKTLITNPKYKGYNVRNKFNNVNLFTESKTKYVRKEDWVIQQNNRIDPLVSEELWEQVQKALAYRCRVGNRGQNAAVYDTRGKLKCAKCGASYVRCVETKVSDKANQLHYLICSHKKKYTKKYCNGENINIEMLNNYIEQQRKVYYKNIQLQIQLKIISLQEELDRLDENANSNIIFKIQEQETELEKLKSKLESLIENFISSSESMQDVIERKIKELEVKIQSIDNEIARLKLINTDKEKHIREINNKILKLRNELLMSNDKELTRTEWLDKVEKILIGGKRDIKAIYNLD

SEQ ID NO: 9001 - protein, 523 aa, synthetic construct
MAKVTTIPATISRFTATPINEKKKRRTAAYARVSTDSEEQLTSYSAQVDYYTNYIKSRDDWEFVSVYTDEGITGTNTKHREGFKRMVADALAGKIDLIVTKSVSRFARNTVDSLTTVRQLKEKGVEIYFEKENIWTLDSKGELLITIMSSLAQEESRSISENCTWGQRKRFADGKVTVPFKRFLGYDRGPDGNLVLNKDEAVIIRRIYSMFLQGMTPHGIAARLTADGIKSPGGKDKWNSGAVRSILTNEKYKGDALLQKSYTVDFLTKKKKVNEGEIPQYYVEGNHEAIIQPEVFELVQQELERRKSSRGRHSGVHLFSGKIRCGQCGEWYGSKVWHSNSKYRRVIWQCNHKYDGEEKCSTPHLTEDEIKAMFVSAANKLIGKKAAIISPLRNSLDVAFDTSALETEVAELQDEIMVVSDLIEKCIYENAHVALDQTEYQKRYDGLTTRFDTAKARLEEIEAALADKKSRRAAIDAFLDTLAQADPMEKFDPALWCGLIDYVTVYARDDVRFAFKDGQEIKA

SEQ ID NO: 9002 - protein, 455 aa, synthetic construct
MTDQKEITVIPPTEKHDKHIRVEQKQLKVAAYCRVSTRFEQQENSYEAQVKYFTEKIVANPKWSFAGIYADQGKPATSTKQRDSFNDMIADCYDGKIDMILTKSISRFARNTVDFLRIIRELKERQIRIVFEKENIDTMDSTGELLITILSSQAQEESRNLSENTRWGIARKFEQGVVQVNHMKFMGYTKDANGNLIIVPEEAEIVQKIFDLYLQGLGTYRIAKELERQGIRTTTGNVKWNSGTINKMLKCEKYIGDAMLQKTYTVDFLSKKRIVNDGIVKRYYIKNNHEPIITREQYYQVQEELKRRNNKMMKGTRYSSKYPLSGLITCGECGSRYVRNIWYSKKGENTAVWRCKERLKSGISNCLKSSTLKEEIVYNILLDIFSSLLTAEIQIFSSMELQARASITKAFDKKEITRESIENTRLSDIIKSIASLDKKQIEVKFHTGLVMKKDL

SEQ ID NO: 9003 - protein, 453 aa, synthetic construct
MKSKKTEKKKTIRCAIYTRKSTEEGLDQDFNSLDAQRESAEAYIKSQASEGWTALPQHYDDGGFSGGNIERPALKRLLADIEEKKIDAVVVYKVDRLSRSLLDFTKLMEVLDRNECSFVSVTQQFNTTHSMGRLTLNILLSFAQFEREIIAERTRDKMSAARKKGKHVGGVPVLGYDLDPKGGRLLVNEEEAAMVREIFGLYLERPAMLATVNELTARGWRRKRWTTRKGIESGGGAWDKGNLHRLLTNIIYTGQVKYQDVVYPGEQPAIIETAVWEKTQELLHRNAKEGGKRVRESHGALLRRLLHCPHCNHAMTHSWTKKTDGRCYRYYVCVQAIKRGYGSCPTGSLPAAEVEKFVIERIRAIGRDPALIKEVLRQSRTKEPRIAPEELRAALEQFDPAWDNLVSSEQERLLHLLVERIAYDATAGTMAIAFRPSGIKSLGTETTPTPAAA

SEQ ID NO: 9004 - protein, 525 aa, synthetic construct
MTHVPQKTAVIYCRVSSAQQTTRSDGLSSQEQRCRLFCEHKGYEVVHVFKDDMSGSVARRPGMDAMIKFLRSTRKHSHVVVIDDISRLARGIDAHLQLRAEIGATGAALESPSIEFGEDSDSKLVENLLACVSQHARQKNAEQTLNRMTARMQQGFWTFQAPWGYKYARWSGGGKILARNEPLASIIQEALEGFASGRFASQAEVMRYLELQPAVPKMRNGKVSNERVKQILTNALYAGIVFVPSWNLSPRIGKHEPLVSIETFNEIQERLKGKARGAARADVSSDFPLRGHICCPCCGHALTANWSKGRMGAAYPYYLCRQRECELRGKSYAREKVEGAFEEMLRSITPAKQLIDLATAALRNAWNAQILNAEQSRKVIEKELGEIDRKIEGLLDRIVDAGSPSVIAAYERRIGEFESSKLLLKEKMASVGQPKKDFDETFRNALAFLASPWNLWNNGRLEDKKLALRLTFPQQLVYDPKGGVRNSILSIPFKTLYDLSGHENNLAHPRGFEHLASAFGGQRSI

SEQ ID NO: 9005 - protein, 526 aa, synthetic construct
MPRVTTIPATKNKFTALPTASIAKRRTAGYARVSTDSDEQFTSYEAQIDYYTKFIQARDDWEFVKVYTDEGISATNTKHRDGFKQMVQDALDGKIDLIVTKSVSRFARNTVDSLTTVRKLKEHGTEIYFEKENIFTFDSKGELLITIMSSLAQEESRSISENVTWGQRKRFADGKVSMPYKQFLGYEKGKDGIPVVNEEEAAIVRLIYKLFLEGKTPAGICRFLDAQGIPTPSGKQKWSQTTVNSMLSNEKYKGDALLQKRFTVDFLMKKMKTNEGEVPQYYVEHSHEAIINPTEWEMVQAEIARRKALGRAYSGNSVFSSKLVCGDCGGFFGQKVWHSTDAYRKVIWRCNSKFKGDKKCATPHLDTETIQQKFLIAYNRLMENRDSVVSDCELMRTALSDCTMLDAEIDRLTEEITVVAELVKACVKENAASAQPQADYTKKYDALVKRYEKATKRVDELSTERTRKQDRDRELRLFIQSIKEQPLVLEEWNERLWVGLLEKATVFHDGRMVFEFKNGTEIEVEL

SEQ ID NO: 9006 - protein, 436 aa, synthetic construct
MPRTVNKVPQKPRLAVQKKVAAYARVSTGKDAMLHSLSSQVSYYSKMIQGHEGWMYAGVYSDEALTGTKESRDGFQKLLSDSRAGKVNMILTKSISRFARNTVTLLETVRELKALEVDIFFEEQNIHTISAEGELMLTILASYAQEESLSASENQKWRIRKGFESGELLNWRFLFGYRISKDGIEIDEETAPVVREIFARVIDGESFGAISRDLNARGISCSLGGKWCAQRIRETVGNEKYTGNAMLQKRYRNNHLEKKLCRNTGELPMFYAEETHPAIIDKDTFDAAQSILLKLRETNKDRPRPQKSEFTGKILCPFCGKNYKRTPSSGTIGWNCSTFLSSGKAVCHGKKIPEATLKAVCAEVLGTGDYSPAIFDAVIERIEVPEGNHLRFIFKDGSVAERTWADRSRRESWTPEMRQAAAERTRSQRRKTQCQE

SEQ ID NO: 9007 - protein, 464 aa, synthetic construct
MMTNKIIRCALYIRVSTAEQCMHGKSLEAQESYLQQYASDHNMIVVGVYADEGKTARKELKKRKAIHSLLEDVKAGKIDIILFWRLDRWFRNLSDFYKVQDILDEYGVRWMSASEPGINMETRDGRLQLNVVLSIGQNEVDTTSERIKFVNEASIRQGKLIFGDANMGYGYKSGIVDGRKCMVKDPEREETVNAFYKYFFKHQNKCATLRYIQDNYDPNFSWAIMRTLLSSEFYKGTYRGFPYCPPYLTEEQWNELQKIAHKNIKRAKSGRIYLFTSLIRCPVCGQLLCGTGCKSIINRKTREKRDYCYYRCSRAHNDRICTYKHRLSQNLIEQYLLDNLDTEYRKYQIRVKKIEEEKKKIAQTKTPEKLNAELERLNLLFQKGRVEWDYYSSEYDRIEQELKNLRKIKPEVKRDLSFLENLLQSDFKTLYASLSPENRRAFWRSTIKQIHLNEDSTIKFVDFL

SEQ ID NO: 9008 - protein, 446 aa, synthetic construct
MQSTITKIAPVMIQQAPRLLRVTAYARVSSGKEAMLHSLSAQVSHYSDKIQKTPGWIYVGVFADEATTGTKDSREEFQKLLEKCRAGEIDLIITKSISRFARNTVTTLKTIRELRLLGVDVYFEEQNIHTLGEEGEFLLTLLAAYAEEEARSVSENQKWRIKANFEQGLPWSVTMYGYRQVDGRLEIVPEEAEILRLAADLYLEGYGSERLERALAKAGIRGRQGNAMTGHGIVNLLCNEKSVGDLLLQKTYVDDPITKVERINRGELPQYLVENSHEAILDRETQAKILAERARRAARFQSHPQTPPTYPFTGLIACEKCGAHFRRKIAGAPGYKKPVWICDTFNTKGKVYCASKQIPEDILETVTAQAIGLPVFDAAAFADTVKEIRVPENGTLVYEFQDGRTVTKTWENPSRRHSWNDENRGKAHALALRLAAERRDALCQQQ

SEQ ID NO: 9009 - protein, 545 aa, synthetic construct
MKKYVAYCRVSTKAQADMDNSLPAQKRIITEYAQRKEFEIVDWFSEAKSGFKGKRTEFHKMLQRLTSPEIEGVVFHKLDRSSRNVADFALLDQLVTQHKKKMVVIEGEFDTSRAAGRLAFRNFCNMAVWYSENLSEEVSTKMEEVLLKGYFPAPPPIGYRSGIKGVDDDHKKKQVDPKVAPFVKESFKLFASGNYSAMTLCEYMRKRGMTNGSGNPIRKSMFYKMLRNPFYHGLMMWRKKGSDEPLFYEGNHEPLITKKLFDQVQEILDGRTQKNKMQHDFTYSKMFKCECGRYMVSSYHKTHIYLECHNPDCRQTIREDRLEDQIVAFLAKYELADEFIPYAKEAIERLSSNIRVDNAAKRKALDLKLNQIDQQLEKLNKAVLDGYFTSEEGLARKNELIDQRHTLRAQIGEKEDMKEDVLWALTLELIQIFDFLPYRYRELNPLVKRKVLNVLSSNRELKGQFALIQAIPAIEKLKAANYLIQGQKLLLNHEPNGGDPIKKAFPTADKVISGKLKNSSKSGEVLYGGAEESRTPDLYNANVAL

SEQ ID NO: 9010 - protein, 443 aa, synthetic construct
MAAYCRVSTDQLEQLSSYEAQVNYYTNYINGHSDYECAGIYADEGISGTNTKKREQFNKMIEDCKAGKIDMIITKSISRFARNTLDTLNYVRSLKELGIGVIFEKENINTLDSKGEVLLTILSSLAQDESRSISENSTWGIRRRFEQGKVTVNHKKFLGYDKDEEGNLIIDEKQAKIVRRIYKDYLDGKGSNRIARELEEEGVKGWNGKSKWYESTIRGILTNEKYKGDALLQKTYTVDFLSKKRVENNGEVPQYYVEESHPAIIDKEMWEAVQLEMDRRRVFAETYGVYKLDYATLDNPFSGRVICGYCGSILGRKTWHSTNEKLRRKVWMCSNRYKIKGEKGCTNKHIDDRVLYQAFINTFNAIIENKDYFMEKWKDALKSENILVRYKSKQFIKIIEKAESIKEFDVNLFLNLIEKMTVFEGEKIIVSLLHGIEIEVVLE

SEQ ID NO: 9011 - protein, 519 aa, synthetic construct
MQLRSQRRKALVYCRVSGKKQAIEGNGLDSQEHRCREYAREQDYEVEAVFPDDISGSGDFMRRPGMMALLAYMDAKPEENYVVIFDDLKRYARDTEFHLKLKREMAARNAKRECLNFKFEDSPEGEFIETIIAAQGELERKQNQRQVIQKMKARVEQGFWVFRAPAGYRYQRSKHGGKELVRDEPLASVVQEALKLFANGSLQTQVEVKRYLENQPAFPKDLPNGEIRAYRITRLLTQPVYAGYISAPNWNVSLRKARHEPLISLNDYNRMQDRIKSGGHAPARKDIGEDFVLRGLVSCADCGRPLTSCWSKSKTKKTHPYYRCYYKPCKSYGKSIRRAKIEGEFEQIIRSLKPAPSAFALASDMFKSAWTQRHKQSLQILNDIKANIATIELEIDQVLQRILNTNNQTVASAFEKKIEELEKDKLISEEKLQLSGKPKHSFEKMFELALQFLSNPWKLWDSDILEQRRLVLKLAFTGRIPYDRHNGFLNPKKSLPFNMIGDNMALEKRMVRTTGLEPV

SEQ ID NO: 9012 - protein, 500 aa, synthetic construct
MYLRKSRADDPHESIEDTLRKHEKILFDLANKLNIKKDEIVQFKEVVSGENLKNRPQAQKMLKLVMENAFEGILVVDSQRLARGDTLDQGTIIRAFSLNNTKIITPGKTINPGDEIDQDYFEFDLFMGRREYKMINKRMQRGRNISVQEGNYVGSIAPYGYKKTKIGKCHTLKINEDEIDCFNKMKELALNGLGCTSIANELNRLGFKPRKSKLWTTNAVRDILLNKTNLGLIKWNTRKSVKLYKNDEIIKSRPRNEEAEYYPGKHPAIITQVEYDAIVENIKNRARPVKKDKKLQNPLAGIVYCGKCGKAMIRRSYNNGYRDGLICTNTHCNNVSSVLEVVEKRVLESLEDTLKEYRQFIDNYHNDKTKTNNDSLIIKTEKEINKIDSQINKACEMLEVGAYSVELFKERKTLLDNQKKALIDKIEALKKEDTDFKLQNYINAVPILENAIKLYWNSSVEEKNKLLKQIVKRCDYLKSERGKRNGKGMYNFKLNIYLKI

SEQ ID NO: 9013 - protein, 505 aa, synthetic construct
MSSVDKIAVVYARYSSHGQTEQSIEGQIAAAQKYAEQHGYTIIHIYADRAMTGRNDDREQFQKMLSDTAMHQFGVILLWKIDRFGRNREEIAFNRYRCKKNGVRVERVAEDVPDGPEGVILDSVLEGMAEYYSLQLAQNVRRGQRESAKKSMSIGGNKMLGYIVNPETKRYESDPKTASYVTEIFKRYANGETISEIVAWLNAQGIRTTRGSEFTVNSLHRLLKNEKYTGVYIFHDIRNEGGMPALTDRATFDKVQEMLKVNRRAPARVWSKTEYLLTDKLFCGHCGAMMVGESGHGRNGIKHSYYTCLNRKKKKSCDKKPVRQDMIEPLVLRAIGKLLENPATLENIADQVWAAYERSDTSGDTIKALDKQIADVDRALSNVMKAIEMGIINEMTKTRMDELTDQKQALSAARAEAGLAGGFKLTRDMILFFLQEIAALDMADRDSQKRLIKTFVNAIYLYDDHFDIAFNYTDNGKVVVRMQEINDAVRGEVFGCCAQSPTKSL

SEQ ID NO: 9014 - protein, 537 aa, synthetic construct
MRVAVYARYSSEHQNERSIDDQVRLCREHAARLGWSVSVVYADYAISGAHLGSRPQAQAMLAAAKSGQHDIILAEALDRLSRDQEDIASIYKRLTFAGVRIVTVSEGEVNELHVGLKGTMNALFLRDLAAKVRRGQKGNIAAGKSAGGLSYGYDVVRELDAKGEPIRGQRVINPEQAEVVRRVYREYVSGLSARQIAHGLNRDGIPSPAGGVWRVSVINGNRARASGILWNDAYRGKLVYNRIRMIKDPETGKRISRPNPPEDWVCVDAPHLRIIDDATWEAVQAVKDRYSTCGARGERKPKHLLSGLLRCPVCGGAYTVYASDKAGCGTRRDAGTCSNDRTIIVSEAEQRVLSGMRSRLVHPKALAAFVTTYEDERKRLRADREQQMHRAKTRLAEAEKQIDNIIDAVANGFATESMKKRLMDAEAEAAALRQQIAAAPPENVIALHPAAIAEYRRNVEHLFDALKADDIAKAEASTLLRAVIDHIDVVPLEGRGKYDLKVVTRLETLIGLAQGAQADRFVSMVAEEGFEPPTPGL

SEQ ID NO: 9015 - protein, 492 aa, synthetic construct
MNVAMYLRKSRADENNPLETLERHKEILLSYAKDNNLTVIDIFEEVISGGMLYNRTEMLKLLDAIPSHIYDAVLCIDLDRLGRGSAADSEKIFDVLKENDVKIITLKKIYDLNNEYDEDYSEFEMFMARKELKFITRRMNRGRIKSINDGCFVSGAPFGYRNAVINKKHTLEVYEPEAKYVRMIFDMYVNQSMGITSISRQLANLGVLSKKNTPLHPTTIARMLRNHTYIGKIVWNKSKSVKGKNTQEKTSKDDWLYVPGLHEPIIDEDTFNKAQDIINLKYKPPMRTGTLQNPFAGLLKCANCGRAIVINTSNETVEKYRLCCRTLGCNKASALSIVEDKVFEVLTKEFKDIELSLKNIRQSHNKDKLSCLDTIATLETELKKLDKQQLRLYDLLEQEVYTKELFLERNNAISDRRKKINATISQEREKFKLVDTSSVEERLPLLRELLTHYHSLSAAEKNSILKNFVKKIEYKREKSAPEGDIFLKIYYK

SEQ ID NO: 9016 - protein, 531 aa, synthetic construct
MAATARSVKIIPQTINPATRMPDKGIAKRRVAGYARVSTDSDEQFTSYEAQVDYYTQFIKSKPDWTFVDVYTDEGISGTNTKHRTGFNKMIQDALAGKIDLIVTKSISRFARNTVDTLTNVRTLKEHNVEVYFEKENIYTFDSKGEVLITIMSSLAQEESRSISENVTWGHRKRFSDGKVSLGYSSFLGYEKGPDKDHPLVIVEEQAAIVRRIYTMFIDGKTPFTIAKTLTEEGVPTPGGKSKWGSAVVESILTNEKYKGSALLQKKFTVDFLQHKMKENNGEVPQYYIEHSHDAIIPPEDWELVQLEMTRRKALGRRYSGNSVFGARLICEDCGGFFGAKTWNSTNKYKRTVWQCNEKFKDKEHRCTTPHLNEDDIRARFIAAYNSLIPDRENIIDDCRRMMDVLTDTTEIDGKIADLLQEAEVVTGLTRKIIEENASNAMNQAEFSRKYKGYEDRYTAIRDKVEKLREQSEQRKAQADSISAFMFELHETDEPVVEFDSKLWLSVIDCVVVRHNGTLLFRFRNGMEIEG

SEQ ID NO: 9017 - protein, 433 aa, synthetic construct
MDRKVRKLDASFPAKPKLLNVVAYGRVSSGKDAMLHSLSAQVSYYSEMIQNHPGWNYCGVYADEAMTGTKDNRENFQRLISDCRAGKIDMVITKSISRFARNTLTLLNTVREFKKLGIDIFFEEQNIHTMSGDGELMLTILASYAQEESRSASENQKWRIRKSYEKGELVQWHIQYGYNITKDKIEINPEQAEVVRNIFDRAIAGETFGSICRDLNTRGISTYFGKKWTARRITEILSNEKYIGDAVLQKSYVNNHMEKKIVKNNGEIPMYYAEGTHEAIVDKETFEKAQSVVKAVREKYCGKNSPKRYPFTSTIKCGLCGENFKRVTANGRISWNCRSFQEQGRAFCKSKSIPETTLITVTAEVLGLDNFDEKIFYENIDHIKVPGANSLIFYFKDGSSVERQWKDRSRSESWTPEMREAARQRAIKQRRDK

SEQ ID NO: 9018 - protein, 658 aa, synthetic construct
MKKCYIYTRVSTAAQIEGYSLDAQEESLKAYAEYRELEIVGNYCDAGKSGKNIKGRPAFRQMMTDIKSQKDDIAFVLVFKLSRFGRNAADILKSLQLLEDFGIDLVSVEEAIDSSTQGGRLTLAILSAVAEMERENITVQFMAGKMQKVLEGGWTGGAVPYGYKNVNHELVLVPPEAEVIRMIYELYQQENMSASAVAYELNKSNLVRISGKGEQKPFTYEFVSRVLDNPFYCGRVYYNRRTNKKDRDGKTIKQDEDNIIMAEGKHEIIVSPEVWDSVHAKRTKIAGRYKRVDDGGHVHLLSGIVKCPICGKGLTGMISRTKNLKGDGYYKPIYYYKCRYNTRQNGKTCPFDQSLNQEIIDGLVMKILQKLQTYREFQDALQAALGHQGNLEKTEKRLQDLRKELREAELTKDRLGEKLDGLNPLGKDYDRKYEETSDKLDSIYDRIGDLEMDVISTKKKLEALKQKADSTVQIMTFMENLPLMYEEMSEEERKEMFQAFVDDIELFSEDRTDGKIIKSISFKFPMVFDGKPLAKNTKPEDMVSFRLDCTDIDIELPGKGNIIMKKQADGSQKVIVRKGTYAAIKAYILEKHDVKVPTLYIAQIKRKYGLEIGKAYNKPEKNKNHVPKCTKEKELLIMEALKFYDLMEQDVEYREDAV

SEQ ID NO: 9019 - protein, 566 aa, synthetic construct
MTEKKKKKQQKCYIYIRVSTSMQVEGYSLEAQRERLNKFADYQGMEVVREYCDAGRSGKNITGRPEFTQMLRDIADDRDGVSYILVFKLSRFGRNAADVLNSLQYIQDYGVNLICVEDGIDSSKDSGKLTITVLSAVAEIERENILVQTMEGRKQKAREGKWNGGLAPFGYRLDKEKGELVVDPKEAEIVKVIFDKFINSDMGADSISNYLNDHGYTKNTSRDFEVSYFTRGHIMKILDNPVYVGKIVYGKSATEKVKGTRDQYRRVKQDDYLVADGRHDAIIDEDTWNKAREKRKETGVKWNKIHDLDHEHLLAGILKCPICGASLAGTVRRKKYPSGKVNSTFYYRCLHRKRIESTGKKCDFKPSLNQIDTDAEIIGVIHDMVNDEQFEAFIRGKLDEKVDVSSFEAERDGLRTQLIQATGAKDKLNQQLDRLDVTDRHYDRKYQDMQDRLDTLYDRIADLEEKIDDVTDKISGAYDENLTSKQLCKVLLQFDEMFEEMTDLERKEFLYTLIERIDLFPERQENGSILKRIRFKFRVDYDAEAGGKVLLNENDVETVALMTHRA

SEQ ID NO: 9020 - protein, 526 aa, synthetic construct
MGRTSENKTIKKVALYERYSSDKQQETSIEGQDKVCTQYCSHHGYTIVKRYVDRAVSAKKNLKKRVSFLEMMSDAEKGVFDAIVVYKMDRFSRDQLTTTLYMKKLSEMGIAIISASENLNTLANDGGMSMFMIDIVNAVSSYYSEELAQKVTRGMRVTAEKCQSNGGKPPLGYKVENKIFVIDQDEAKLVKEAFERVAGGESKASVARDFNRRGLFTGRGKPFSVSAFQRMIGNEKYIGVYRFGDIRIENGIPRIIDDGLFKKANEAISRREIMKEGSTTYEGESPYLLSGKLFCGECGARMVGYSATGASGKKYRYYACTRQLGKGHPCHKRKMAKEELESLVLEECRCVYEDKELKEAFVRTFAEEFNKIMRGALSEASLIECELDELKERKRKALDALIANPELASDIKGRVEEINHDIEEKEERLKEHKANLQRVEISEKSVEGFLDAVFSDGGCGDSKARVIDSMVSRVELRDNGEVTISLNIMGDEEIRHEKTLHNGSVRMIRLVTRMRFERMNVSVKGI

SEQ ID NO: 9021 - protein, 526 aa, synthetic construct
MKKYVAYIRVSTQKQGQTGVSLQEQRAAIERYAEINRLQIETWYEERETAAKRGRPIFTQMLEQVERSSISGIILHKIDRGARNLRDWADLGGLVDKGIEVHSANESLDLHSRGGRLSADIQAVVAADYIRNLREETLKGFYGRLRQGLYPLAAPYGYLDQGRGKAKIPDPKTAPFIRHAFELYASGRYTLRALREELHKLGLRNRGGKKISLDWLSRTLNNPFYAGIIKLKTTDETFRGIHEPLVTKDLYDRVQDILNGRKNIKTFRHDFLYRCLLTCGDCGYSLIGERQKGHIYYRCHERACPTKSIRQELVDVQIGRVLKRVQLSPEEMDQVVKHFDAFDHHWEERQTTMIAAAELRLSNMTERMDRLTDALIDGLISKDTFERRRASILENQVATEQSLASLRAGDRSILERLEKFLELLKTAQRSYLAGNADHKRILLQEVTSNRLVSGKNVAVELFPPFDLIANREKSDWCCLSRNKPRTFSKKTSVLGKQLINIVVPDLKAEEAAYTERLRKMLTDMEE

SEQ ID NO: 9022 - protein, 548 aa, synthetic construct
MKNKVAIYVRVSTNYQIDKDSLPLQRSELSNYSKYALNVNDYVIFEDAGYSGKNTDRPKYQEMMSRIRQGEFTHLLVWKIDRISRNLIDFCDMYEEIKRYNCVFVSKNEQFDTSSAMGEAMLKIILVFAELERKLTAERVKAVMLDRASKGMWNGAPVPLGYKWDENIKFPIPDQHESEIVNFIFEQYKDTESTSRVRNILNANGIKTKRDGNWTTKTIADIIRNPFYIGIYRYNFREQARGKKKDESEWIVIEDNHKGIVSKEIWQHCNDIMDRNAKRSNAQFRDNTKTHVFAGLLECGECHKGLYSKQDKPHLDGYIPSFYCCTSRYNHLGCEQKTVSEKIIGEFTFNFISDVIRNSKNRAISSEYELENILLSNKALDGVLAIEGISELYDSIFNENDNFKVSKQENVINLENEGLKKEREKYKRALTRLDDLYLFDDESISEKDYLIKKNKLNDKLNEIENKLKHEKRSSDNDVNFIKLATNAMLNDIFMKTENIDMKVFINAVGRDTIKEFSNSIINKITVKNKQVTGMNFKSGLDLKFIYKT

SEQ ID NO: 9023 - protein, 621 aa, synthetic construct
MKKCFVYYRFSSEQQRDGASIVRQKEVLQEYIKRHNVCDGMDDPEVVEISDEALSAFKGLNMSEGQLGKWMDQVRVGMWDGSRIVVESTDRFSRLNPFKVLSYINELVSHKITMIDVTNNMWINLANSQLLPIVTMSAQRAYEESVIKSKRIADGWRRRRDTAFSENRIVTNKTPQWIDVVDNKYVLNNKAEIVKEIFRLCKSGIGTPTIAKILREKGEEWQFDRPWRAESVHKILRNRRVTGVIFISEIIRDFENTDNIVEQKKYEKEVYPVVISNEEFELVGKLLASRKPGSGKSVGRVSGGSVLKNIEGVDIVIEQSPMTKSNIFNSVCRCGRCGEPMYHNVVERERFAKRKGEMVKSEYRYIRCIGERDNLCTNKAFRYDAVEHFVIEHIKNLDFSKVIQASEVNPELELLRLNIQEEIEHIAEYERGIERLKAANKKVPFDIVMELNDSQEKLHKLKIKLASYDKVQVDVSVLKNIDTSIVYDVHNIEVRSLIEQEINNLIERIDLYREDNFNIITLWYKDNEVLKHVLITENGKKPKLISRIAVVKNGDATTYETASFKLIATDEQLTVEVPQEIVLNDYVLLLNYIDGLKDEHSTNVAVWMREHMNGVLTNTLM

SEQ ID NO: 9024 - protein, 510 aa, synthetic construct
MQYAQKWAADRGLVLDESLSLRDEGLSAYHQQHVKQGALGAFLLAVDEGRIPDGSVLIVEGLDRLSRAEPIQAQAQLAQIINAGITVVTASDGREYNRAGLKAQPMDLVYSLLVMIRAHEESDTKSKRVKAAIRRQCEGWKAGTYRGLIRNGKDPQWLRWDGEAWQLIPERVEAVRYALELYRQGDGATRAVRKMAERGLALSDRGVAGHQIYRLVKLPALRGAKRISIDGEDYLLEDYYPRLLSDEEFIELQGATSTRHGRRGASDIVGLVTGIGITWCGYCGTALTAQNMVSRAREDGTLLDGHRRLHCTSYSSGAGCKASSCSVVPVEKALLSYCSDQMNLTRLMEAVDDGQGVRRRLQVCRNKQAEVERQLSRVTDALLADDGAAAPLAFVRKARELEAELLQLQAEAAKLELEEAMQGRGHTPAAAEQWQRLADEAQDIYSPAREQLRQLVLDTFSRIVVYARGVVPDVKSKTIAMMLVSRTGQRVMLEVNRRSGAWVSRTDRVG

SEQ ID NO: 9025 - protein, 446 aa, synthetic construct
MSTIKRAGLYIRVSHEEQAKHGYSLDAQHEDLTRYAKEHGYIIQDYYADEGISARKKPSNRKEFIRMLDDVRAKKIDIILFIKLDRWFRSVADYYKTQEILDKYGVDWATSQEQYDTTTSNGRLHLNIKLSIAQNESDQTSDRIKFVFREKVKRGEVITGAIPLGFKKENKHLVKGDLAPVIVEAFQYYLKYNTINGVVKFLKEEHGISRHRASVRSMLKNEIYTGSCHANPNFAEQIIEPNLFYAVQKVLDERNIKKQRTDRVYLFSGLLRCPACHGKLSVVASTLNNILFVYYRCPNAYNGTMCKSRLRVSEKKLEQKLLNNLEKSMQNYIASFKIKKKVTKIKKVNPASIKAKLTKLKDLYIDDLIDKEVYAQDYAKYTKELKAAILPIEKESKNINPKILELQGQNVVELYNALTRESKKLFWRQIIDHVEFEDKEPHIFFY

SEQ ID NO: 9026 - protein, 443 aa, synthetic construct
MPLMESRRITCKKVAVYARVSTSHEEQQTSLEAQKDYYAKFIAEHPDWTLAGIYAEDGRSGTSYFHREAFKSMMEDSKSGKIDMILTKSVSRFARNTVDALQSIRKLKEYGIGVFFEKENIWTLDSKGEFLITLMTSLAQEESRSISENVTWGIRKRFASGKYYVPYRVFLGYDPGFVVNQEEAVLVRRIYRMALQGYGTTTIARMLTEEKIPTPGKKTKWCNRTVRSVLENEKYKGDALLQKTFVVDFLTHKAKINRGELPKYYVKQGHEAIIAPWLFDYVQQRLKERDPVSYNGVSMYNSKFVCGKCGAFYGPRPEHSNDKYRRIVWMCHNRFKKGKYCKNLRINAADLNKLVCQVAWASIKCRPGVLALCRKIAEGNDDLLKILTERVSGNTYSDMEDLAIIIKRITVFPDRRLAVELISGNYVYLSFNPDFPKHKYKLK

SEQ ID NO: 9027 - protein, 563 aa, synthetic construct
MSVAARAVQPDFNDDVADVVIYSRYSSIGQNDQSIDGQIDACMKYAAQRGFHVVGQYIDRALSGTHADSRPEFQRMIRDSKKGVFKYVLVWKLDRFARNRYDSAIYKNELKKQGVKVLSVTEGIDAGNDSIILEAVLEAMAEEYSRQLSQNVRRGMHQNAEKQLTLGGNPPLGYRVENKRLVVDEKEAEMVRFVFRSYADGMTKTEIAKECNRRGWRTRTGRPFTVNSFSVMLKNQTYIGTYTFKDEITVEGAVPAIVDRATFEKVGAMLERNRRAPGRVKAKEEYQLQGKVFCGYCGSPLVGECGRGRRGATYHYYACATRKKAHTCQKKNEKKDFLEWYVVEQITTHILTDQRIHEIAAGVVAEYNRSFDAAGVRDLERKIRAMDKEMDALVDALIRTTAAPAVAKINERVELLATQKEEAEVDLAKLKVASRITLTEEEIVAWLRQFVHGDPTDPAFRQRVIDIFVNSIYLYDDKVVMYFNIKDASQVSYIEMQEDLECLDGSDLNCCGVPRRSKVCFAPTYFYSYGTKVRHPSAPLLLFSESKASAAGWIRVEKRKYPE

SEQ ID NO: 9028 - protein, 575 aa, synthetic construct
MENFELKGFAKGKKQQKEQVGGNAIIYTRVSSSEQVDGQSLEVQIDKCREYANMHSYNIVGEFGGTYESAKSDKERKEFSRMLTFIKQSNKKGSNQIVKTVIVFSTSRFSRTGSTTIIEEVEARGAYVVSATSNYDPRTPVGKYMQLMELANARFQNDEKRATTVENSVKALLKGRWIGKAPRGYDQKTTKKEQIITINEEGKLIRKAFLWKANNKLSNEEIRHRLAAEGFHICKQKLSELFKNPFYCGYMAHKFLQGDIVQGNHPPLIPKEIFLKVNGELSKNHSGYEQKIDKEYAPLLGSIKCPCCGNNLSASISTKMRKKFGRTDIGYYVCSRKGCKYNSSTKNVHEAFEEEANKYVLSDKVSELLKLQLTITFENMNKENKERAQSIKSNIKAKEKELEQVETNYALCSDTKKQEICVKVMTRLEEEIRGLQAEYSKVNTEILNLDKFIDYAFAMRSNLFNLWELQGLEGRRRLQKLVFPDGFIYDKNNEHIEPKIVNQFFLLNYSFPTNNGDKKRETNSENHRSSLQVLEAGLEPAQPQWPKDFKSFVSTIPPFEHPFKESGKRDSNSRP

SEQ ID NO: 9029 - protein, 527 aa, synthetic construct
MSRTGKEGEWMKRITKIDKVETLIPKKLRVAAYCRVSTGSDEQLVSLEAQKSHYESFIKANPEWEFAGVYYDEGITGTKKEKRTQLLRLISDCEAHKVDFIVVKSISRFARNTTDCLELVRKLTDLGVFIYFDKENINTQSMESELMLSILSSLAESESVSISENSKWGVKRRFQNGTYKISYPPYGYDYVDGGMEINPEQAEIVKYIFAQVLSGIGTHQIADELNARRVPTKKGGKWTASTVRGMIYNEKYVGDVIFQKTYTDEHFNRHTNYGEKDQYLMECHHEPIISREDFEAAGAVLNQRRLEKGITKGGGKYLNRYPFSGKIICSECGGKFKRRIHSKNGGKYVAWCCGKHIDDVTACSMKFIRNADVEKAFVTMMNKLVYGRRFVLRPLLESLREMDRSDSFGMIQELELKMEKNAEQRQILTGLMAKGYLEPALFNKENNELLQEAAELEMQKNGLSHSVNGEMVKTGEVEALLKFAEKSEMLTAFDGELFGRFVEQITVYSRTEVGFQMKCGLTLRERM

SEQ ID NO: 9030 - protein, 526 aa, synthetic construct
MGQMVGNPKVTVIPARPRMGMGRNNEERQKIRVAAYCRVSTDSDEQATSYEAQIEHYTAFIKKNPDWEFAGIFADDGISGTDTRKREEFNRMIEECMEGKIQMVITKSISRFARNTLDCLKYIRQLKDRGIPVFFEKENINTMDAKGEVMLTIMASLAQQESESLSQNVKIGLQYRYQQGLVQVNHNRFLGYTKDAEGHLVVEPEEAEVVKRIYREYLEGASLLQIGRGLEADGILTGAGKKKWRPETIKKILQNEKYIGDALLAKTYTVDFLTKKRVKNNGIVPQYYVENSHEPIIPRDLYMQVQEEMVRRTNLHSGENRKKRVYSSKYALSSIVYCPKCGEIYRRIAWNNRGKRSTVWRCCTRVEHGPEGCDAPTIQESKLQEAVARAINDLIGGRDTFLPILQANIFQVLENNSCGKIAEIDRRLVEQQQKLLKLANGKKDYNAVADEIYSLREQRQKVLAQDAERDGQKKHIEEMKAFLEEQKDIPIEYDEQLVRRLVEKVTVFDEKIAVEFKSGVEIEVDR

SEQ ID NO: 9031 - protein, 587 aa, synthetic construct
MNEKKKAVGYIRVSFMGPKNKKADKESPHTQLNAIKRYCEFKGYELDEESDIYRDLDYSGANDKRPDFQRLFSDIKKKRKDIDVIVVYNLSRFARDVLDLNKYLQILNEHEIDFASSQEDFLRTDSSMGKFMINIIGAVAQLQREQIAESVRDNMIHAALHKGKHQGGIPALGYTVNPKTHLYEINEDEARIVRLIFNKYVEGETTGSITKYLTEIKALGRNKFSTTSIDSILKNDRYTGDYIYNKMRNISGTKKKKKNPRKSWVSKPNNHPAIISWDLFKKAQEVRKERATNKKYFVNKGKKASKHILSGLIECGNPNCKNHYFGNQRKNGKGIAYDYYFCSGKQRHTSAFCHQRGIRVEKLDAIVIDTLSDVISHDYLMKLWEEDFHIITEEIKVEKANEIYLKNTIEELQAEQENIVERASKTSVDDFAKQLEERHYKIGLQIKELQEQLSLGEVEGVFDFEAASDFKKMISGMGDTKLDVKFLKMFDKKVIRKVVHQFIEKITVTDLEDGSTKIGIDYKVNKNNLELILKINKQKGLFEVTDKEQYFTLESENEKHTFFLNKVNEMISEVDCVHRAQHGPPVS

SEQ ID NO: 9032 - protein, 538 aa, synthetic construct
METTGLKAAIYARFSTDMQADRSIDDQISLCTDFALKQGLTIAETYSDAAQSGGSIFGRDGLLRMMEDARQNKFQVIVIEALDRLSRDMEDLAGLHKRLSFQGIEIRAVHEGKVDTILVGLRGLVGQLYREDNVHKVRRGMAGRVKDGLHAGGRAYGYQAIDGKKGELEIIPAEADTVRRIFTAYAAGTTPRAIAKELNAEGIAPPRGARQWNASTIAGNAKRGTGILNNRIYIGEIVWNRVRMVRDPDTGKRVSRPNPPEQWQRQAAPHLAIIDQTLFDQAHGQKASRAHGDHAKYARRKHLLSGLLRCGACGGGMQSYGKGARGTPRIRCSSAKEGGFCPDSKSFSRTAVERLVIEALRQELAHPDVITAYVQTYHAERKKLAATANQRRDALNRKIARLDAECERTLDFMIKGIGHEERLKQRIAEAEQELAEARRELAALDTPPPVIELHPATMTRYRETLDALATAIGNDIEDDPEAVVETRRAMDELVESVTVQRSNAGETTIQIAGRLTPLLGPNAFPEGVGGINGSGGGT

SEQ ID NO: 9033 - protein, 503 aa, synthetic construct
MKKVAVYARRSEEKETGESIQNQLNICKRYAENYYKDASIDEYFDDDYSGRNMNRPEFSKLMKLVKKGYYQSIIFWKLDRVARNALDFLALHKELEKIGVNLVSVTEGFDPSTPAGKLMMTMLAAVAEMERKNISQRVATNMNEMAKQGRWTGGTVPFGFKVNSIEGKKYLIEDENNIKIASKLFKKYLEEESLYTVSKWLKANYAINKQPTSIKRILQNLVYVQADNDIYRYLQNKGIVLHGELNNNGLLSYGKTNNTKEEGMEFREESEWIVSVAKHKGVITGAEYIHIQKTLEKKTNSGRRGTGEVTYLNGLCRCAYCKGYMRTKQKKNPNGSIYRYFACGNRDSGRNDCKNIMVKISDVEETVLDKLYHYKVGSVQVENDLADTSILKADLDKKKRQIKNLVMKISLDEELEDIFLEQIKELKNEVTEIEKSMDDIERQNLMNDVDSYNREAFLDNLKNFKDLFERSVDVETKRKLVKSLVKRVNIDGLNKIIELDPYF

SEQ ID NO: 9034 - protein, 482 aa, synthetic construct
MKKVAVYARVSTTVQAEEGYSISEQTDKLSKYCEIMGWTVYNTYTDAGFTGSNIERPAMQQLIKDAKESKFDTVLVYKLDRLSRSQKDTLFLIEDVFNKIGIGFVSLQEKFDTTTPFGKAMIGILSVFAQLEREQIKERMALGYAGRIKSGKTAAHSIQPFGYDYNKEKGILSANPLQASIVKRIFEMYLDGVSIVKIVRILNDEGHIGKEKLWAPTTVRRTLANPVYIGSQLFKGDLYKTDNDVIIDEKVYWAVQDELAKRNKKVKEANNNPKPFQSKYMLSGILKCGKCGKPLIIVVGNKKKDRTTNNRYQCYYRKTGGGSRPVDFNENNACDSGYFRQDALEKYVIDSISELQINDQLLETAVSTTEDSNKVDTMSLKKKLDRLEKELAKYKNMYMIDAISLEELQEQTKQNTLRKKSIINQLNQDKTEVNNLRISRAKKLLSSKNISELPYGEQKIMVNTIINKIICTNAEYSIIWNF

SEQ ID NO: 9035 - protein, 540 aa, synthetic construct
MTAEPAAGLQKRAILYARVSYDDRDTDSRNLAGQLEMAREYAAGRGYQIVGELSEDDRGASGALIELPQLQRVLTLAEHRAIDVVVTREVDRLSRTLVKQLLIESRLRDLGVEVEYVLADYEDSPEGRLNKLIRAVIAEFEREKIKERMARGRYLAARSGKVLLHGGPAYGYDAIEEPPGVRVNETKAEVVRELFEAYVRGGSLREIARRFSARGIPTGSDLRGRNAHRGEWHPASLRWMLMNEAYTGRWLYGPQEVEVEIPKIVDRQVWLKAQARLKANRDQLRARPVEEYLFRSRVFCGECGRHMVTRSLKVDGLPFKYYRCSGKKPPASGCRSPWFAAELVDDEVCGFLVDLLGRPEILREAVDQLRQDGASLDWLERQVAEADGVLEIARRQLGRLLDLYLAGSFDLQMLEDRKGVLHAEIALAEQRRLQLLEDLDRARRMDTSLLQDALAGAGQVLGQIEDFAARRSLVDELDVWLVLQSSGRHRSYQRWATVNVERWEGVGRVELLDRHRRPSRETPERHRDPVTGQWVRRTGS

SEQ ID NO: 9036 - protein, 539 aa, synthetic construct
MITTGHRYFLYARKSSESEDRQMASIPDQVKEVQRLASELNLDIVEIITESRSAKAPGRPAFDNMLLRIQQGEANGILCWKLNRLARNPVDGGQISWMLQQGAIQHIQCYGRDYKPSDNVLMMQVEFGMANQYVKDLSVDVKRGMRMKAERGWYPSRSLPIGYRHNTQRKSLSQEILPDDNFNTIQELWKLILSGDYSIADIKQKGDEMHLVGVTGKVLPVKTYRRIFTSKFYCGYFNWKDAHGVMNEYKGKHKAMVSLAEYKKVQKMLTGRTNAYRTRDHDFLFKGILKCGECGCSVTPEQKRHTWCDKCQRKFSCLHRDDCPRCHTPLGNFKIFEQVYYRCTKKRGPCSQRYVSEKQLRTQYRKAIQDITIPEDFHAMALEILRNFKQGSKGGEKQKLETLRHQKSKLETRLKNLTLMRADGEISSEELKAVKDEMVTQIQEKESLIAEIQRGEIDWEKHMQEYAKIGCDALETYDSGVISEVKKVLLQIGSNHTLLDQKAQFISVEPLLVIKEGHRAYLAEKARLEPQNSLEKQED

SEQ ID NO: 9037 - protein, 556 aa, synthetic construct
MASEKNNKNQKSTPIRALIYCRVSTTRQKTEGAGLVSQEHRCRQYAEMKGYAVEAVFPDDASGGGDFMKRPGMCAMLAYLDAQKDGKFVVIFDDLKRFARDTEFHFKLRHAFAERGATVECLNFNFEDTPEGKFIETIVAAHGELEREQNRRQVRQKMVARIEKGYWVFHAPVGYKYITDKVHGKLLSPDGVLAEYVQEALEGYANGRFASQAEVQRFLETKPEFPKDLPNGKIRAWKITKLLRNPLYAGYVHSETWEVSLRKGHHEALISFGTHERILNNLENGGRPAARRDFSPDFPLRGFVHCDDCDKPMTAAWSKGCRKHYPYYLCDTPSCPSKRKSIPRAKIEEGFAEILKSMQPTKKLFGVMRTMFERAWDARLDEAKRSKKAVLAQLADVEDQINKLLDRIVESSSASVISALEKRVEKLEREKFLLTEKAENMIPAKGRFGESIELALKFLSSPWNIYENGSLPLRQTVLRLAFVEPLRYSREKGYRTIETAIPFKVLAGLQGQNCQMVLLGRFELPASPLPRECSTPELQQPDKQAGPVGNGAAGEI

SEQ ID NO: 9038 - protein, 528 aa, synthetic construct
MKAAIYARYSTDKQREASIEDQFTICARRAEREDLDVAQRYSDDGVSGSTPVARRAGGARLLMDAFNGRFDVLIVEGLDRLSRDQVEQEQLVRRLEHRGIVIIGVADSYDSRMGGRKIMRGVRGLINEMFLDDLRHKTHRGQAGQVERGYAAGGKSYGYDIVRDHLGSKYQVNDVQAGWVRWIFGRYAEGWSVQRIAHELNARKVPSPRASTWVVSAIYGSPNKGSGILNNCLYQGLYIWNRSQWVKDPDTGKRQRVDRPREDWREIQVPELRIVDEDLWQTVRKRIDGRLPGRKQGAPVRTLFGGLMACPYCRGAIIAINSRLYGCANRKDRGPTVCKGIHFKRETADKNLLDTLRDELLSPAAQEQLRRQVQAILAEHQRNSMAGGATAARRRKELDGEIQRLVDAIASIGTSQALADRLRAAEAERGQLALSKPRAGSDGPSAGEIEERIGKTLANLESALAADVQQARILVAELYGRIEVVAEGENIYAEYNNAAEKLLLASSGMSLKLVAGAGFVRYLPFRIS

SEQ ID NO: 9039 - protein, 528 aa, synthetic construct
MKAAIYARYSTDKQREASIEDQFTICARRAEREDLDVAQRYSDDGVSGSTPVARRAGGARLLMDAFNGRFDVLIVEGLDRLSRDQVEQEQLVRRLEHRGIVIIGVADSYDSRMGGRKIMRGVRGLINEMFLDDLRHKTHRGQAGQVERGYAAGGKSYGYDIVRDHLGSKYQVNDVQAGWVRWIFGRYAEGWSVQRIAHELNARKVPSPRASTWVVSAIYGSPNKGSGILNNCLYQGLYIWNRSQWVKDPDTGKRQRVDRPREDWREIQVPELRIVDEDLWQTVRKRIDGRLPGRKQGAPVRTLFGGLMACPYCRGAIIAINSRLYGCANRKDRGPTVCKGIHFKRETADKNLLETLRDELLSPAAQEQLRRQVQAILAEHQRSSMSGGATAARRRKELDGEIQRLVDAIASIGTSQALADRLRAAEAERGQLAASKPKAGSDGPSAAEIGERIGKTLANLESALAADVQQARILVAELYGKIDVVAEGENIYAEYNNAAEKLLLASSGMSLKLVAGAGFVRYLPFRIS

SEQ ID NO: 9040 - protein, 537 aa, synthetic construct
MSMDQSKTKAVIYCRVSNVKQTTRGNGLASQETRCREYANYKGYEVIEVYQDDVSGGLIDRPGMQAMLGHLRRQRKDPHIVIIDDISRLARGIEAHLQLRAAIGKAGGVLESPSVEFGEDSDSILVENLLASVSQHQRQKNGEQTKNRMRGRVMNGYWVFQAPIGYRYERVTGHGKLLIRNEPVASIITEALEGYASGRFQTQAEVKRFLESQPYYPKDLPNGEIRYERVRDLLRRPIYAGYIEVPKWDVKLRKGHHEPLVSFECYQKIQERLTDTPKVPAKTNLHADFPLRGFVTCGDCGKPLSGAWSKGRSQRYAYYMCFERGCVSNRKSIRKDELETAFEALLDQAQPAEGLCHLVFDMFKDLWERRLSQSTALVRMMKDELKKLDKQVSQLLDRIVDASSDTLISAYEKRVTDLEKRQIELKEKITENGKPKWDFDETFRTAIEFLSNPHRLWDSDRIEDKRAVLKLTFADKLAYVRNEGFRTAALTLPFKVLSETDEGENKMARPRGFEPLTSAFGGQRSIQLSYGRAWGAT

SEQ ID NO: 9041 - protein, 515 aa, synthetic construct
MKKRKAILYIRVSTDEQAEKGHSLAHQEEMLQRYCTVNNIEVVAFFKEDYSAKTFERPQFKKLLEFQRKSKAVAELLLFLKWDRFSRNAPEAYTMISKLHSLGLEPQAIEQPLNMEIPEQKFLLALYLTAPEVENDRRSMNILAGVRKAMKEGRYMGSAPYGYKHGRTENNKPTIVPSKDKEKVLQSFEMMATGLYQIEELRRMLSKQGMPLGRTRFWYMMRNPTYIGKVFVAAHKNEPACIVKGVHEAIVPEALFYEVQDILDGRKKKDQPITICQKDQLPLRGFLECARCGKPLTGSASKGRNARYYYYHCKFGCKERFRADDANSLFDDVLHAVSTNEKVYRSLELILGGENKEEANIRAKELAELRMKLDMYEQRMERAQLLMLDGKMDFIEYQPIKAKLEEDTHRLKLKIEAIEELQPKDEDNVMEFGFYFLSNLGKLFTNAALPIKQQIIGSTFPEKLIYENNQFRTASGDNVLLLMAATSKAFAIKKESRLENSNLLSRRVEPAGIEP

SEQ ID NO: 9042 - protein, 550 aa, synthetic construct
MITNELFAQWSKKKDTPQFASTVKRAVVYTRVSSKEQFDKNLSLDWQRKTIEEFAGRNGFDILNFFGGTYESAKTDGRKEFQSMLEYIRKQKGKISHILVYLLDRFSRTGGGAIKLAQDLREKYGVTIVAVTQPIDTSNPGGVFQQNMQFLFSQYDNELRKQRAVAGIKEKLERGIWCMKPPMGYDIIRSNGERKIVVNKEGKLLRKAFEWKLQGMKNEEILAQLKAKGLNIYKQKLSMTFSNPFYCGLIANKMLNGRLIDGQHEKLVSKEVFLKVNNIRAAANKYGVAHQKEIAQIPLKVFMHCPHCGEGYTGYVVKAKKLWYYKCRTKGCCANKNASKVNAQFMEFLSQYEIKEEYMSLLIDELLDSTEKINEANKQQQQEVNKSMQDVQKKIDVIEEKFFVEGVMSQETYEKLLAKYAKEKTEIAGLSRENFSGSSNLDEIITEAVTFSSKLALAWSSSDVKQKEQIQKLLFPDGVSYDMKNEAFRTTKVNLLLSLNAELAGLSEDDINKQGGMKATLSNSVGMTGFEPATSSSRTKHATGLRYIPK

SEQ ID NO: 9043 - protein, 521 aa, synthetic construct
MSTKRGKPGSGPPTIRCAIYTRKSTEERLEQEFNSLDAQRESAEAYIASQKAEGWVCLPDRYDDGGFTGGNMERPALKRLMADMEAGRVDCIVVYKVDRLSRSLMDFARMMELFERQRISFVSVTQQFNTTQSMGRLTLNILLSFAQFEREIISERTRDKIAAARRKGKWSGGRSVIGYDINPETKRLVVNDEGAKLVREIFDLYLKHRSLLAVSREFNDRGLTTKRVVTKRGKVYGGRPWDKSAVVAVLTNVLYIGRVRYKTETYPGEHDPIIDEAVWTTTQETLRFNGRTGGMHRRNKHSALLKGLLHCAPCGSAMGHTATVNSGKDRVYRYYVCYKAQKQGWDACPCKSLPAEQIERFVVERVRETCSDPEVRSRTLAACRRASEAKREAAETQVAAAERDAARIQRDLGRVAGDAAASPHAAARLADLHAGLADAQQRADDANTMIAEVEAEMVLPEEVDAALEDFDGVWSRLSPKQQVRLVRLLVQRVDYDAEKGSVSIAFHPLGLRRLVDREVMA

SEQ ID NO: 9044 - protein, 549 aa, synthetic construct
MSKKHIAAVAYYRRSTKKQEASIEDQRTAVEAYAKQNGYKISFEYVDDGISGDATEKRVEFLRMRDHASSGNFDVVLCWDQDRFGRFDSLEAGHWCYPFRQAGVRIVTVNNGPIDWSDFTGRMMYSMQQEAKHQYLQDLSRNVLRGQIEAAKAGSWIGSPPYAYRIEGGSKNKRLVPGDPVHVATVRRIFHEYVEEQRTLTDIARRLTADGILSSGGSKQWKPTAVRVILANPAYTGLFRSNTHSYSKYHGYRDGQIAKGGRRGPNDESDWIVFEDHHPPLVGKRIFNRAQRLLKRNEGRKCRYTREENPYLLSGLLVCGNCGSLLWGIKNRGRTKKTKPQRYECSKRRREGKDACEGCTIGEEDLLDHLTNFVEENFIPRQEQSRLMSKAKQGKLTPSDLPKGFKKLKLLLIGSTGAGSATKHTHRKLADIESKIAKAQNNLVLLDAENIPAAQRQIAQLSKLRDQMRIAARKTPSVNDVNEQVLEVLTKLFWLCSLNEADLRPVLKEVERITVYATGKGGGSSRRYQFDHGDISFVRSRDCGQRVEP

SEQ ID NO: 9045 - protein, 451 aa, synthetic construct
MKNVALYIRVSSDQQAKNGDSLREQEDTLNEYVDSNKNMTIFSTYIDDGISGQKLKRDEFTRLMNDIVAGSIDMILFTKLDRWFRSLKHYLNTQDILEKHEVHWIAVSQPYYDTTTPYGRTFINQVMSFAELEAQMTSERIISINANKVKEGEVITGSTPLGYSIKDKKLIPNEESPIAIEVFNYYDLHTNLNQTTKFLADKHGILRTPQSIRSMLKNTKYIGEYRQNKNYNPPIIDRDLFESVNRKLKMNTKSNVKHDYLFSGLLCCGNCSRKMNSGRKSNRSPKRKDGTCIVYPPLPEYTCRYAYQLPKCENTKVIREHLLEKYLIENLPALLQLTINSLKKQKNSSKNTQARIKTLEKKIERLKLAYLNEIITLEEYKIDKADLEKELTRLAKPSVEKQKIEGYEKLLNSDLNHYYGDMSRIEKKAFWQSLIAKLTFDNQRLISVEML

SEQ ID NO: 9046 - protein, 520 aa, synthetic construct
MTEKNIMVIPARKRVGSTAAKEKIKKLRVAAYCRVSTETEEQNSSYEVQVAHYTEFIKKNNEWEFAGIFADDGISGTNTKKRDEFNRMIAECMDGNIDMVITKSISRFARNTLDCLQYIRQLKDKNISVYFEKENINTMDAKGEVLLTIMASLAQQESQSLSQNVKLGLQYRYQQGKVQVNHKRFMGYTKDEDGNLIIVPEEAEIIKRIYREYLEGQSLVRIGRGLEEDDILTAAGKPRWRPESVKKILQNEKYIGDALLQKTVTVDFLTKKRVKNEGHVPQYYVENSHEAIIPKELFLQVQEEIHRRSNIYTGASKNKRIYSSKYALSAITFCGDCGDIYRKTYWNIHGRKEFVWRCVTRIEQGPEVCKNRTVKEDELYGAVMTAINKLLAGGNNMIKTLEENIHAVIGETTEYQISEINNLLEEKQKELIKLANKGQDYEHLADEIDELRDKRQILLVEDASLSGENERINELIEFIRNNKFRTLEYDDKLVRKIIQSVTVYEDHFIITFKSGIELEV

SEQ ID NO: 9047 - protein, 520 aa, synthetic construct
MKKITKIDELPQGQLPNTKLRVAAYARVSTDSDEQLESLKAQREHYERYIKSNPEWEFAGLYYDEGISGTKMEKRTELLRMIRDCKQGRIDFIVTKSISRFARNTVDCLELVRKLIDIGVYIYFEKENLNTGDMESELMLSILSGFAAEESASISQNSTWSIQKRFENGSYVGTPPYGYTNIDGEMVIVPEEAEIIKRIFAECLSGKGGGTIARGLNKDKIPARRGNHWNAGTVIDMLRNEKYMGDVLLQKTYTDSNYNRHSNTGEKDQYYYKDNHEPIISREDFAKAQDLIDERAKMKCKGVKKNVYLNRYALSGKIVCGECGRNFRRKTNYSAGRSYIAWSCIGHIEDKESCSMLFLRDGEIKATFTTMMNKLAFSNKLILEPLFKSISQIDEESDRERMDAIDKRMEQLMEERNTLIKLMAKGFLEPALFNQERNVLDSEMKNLSTEKTNLVSNSASRVWRANEIKDLINYVSADNFNGDYTEELFEEFVVNIIVNSRDELTFNLKCGLSLKEKVVR

SEQ ID NO: 9048 - protein, 559 aa, synthetic construct
MTIIDADRTAIDSLVAPTPFPGSFAVSYLRVSTKEQAEKGGQAEGFSIPAQREANQRKADQLGATIIEEFVDAGESARKADRPELMRMIQYVAKHKTNYCIVHKVDRLARNRADDVTIHLALKDAGVTLVSATENIDETPSGMLLHGIMSSIAEFYSRNLATEVVKGLSQKAAQGGTVTKAPIGYRNVGVRDEFGREVRTVEIDEERAPLVRWAFQVFASGDWTTSQLHQELVARGLTTAASPRRPSRPIGKSSVHRMLTNPYYKGSVRYQGVTYVGVHEAIVPNEVWDQVQTVLGTHRSAADATQVHEHYLKGTVFCGQCGSRLLVCNAKSSQGTIYPYFVCASRHGGRGDCARQAMLIEQVERLIERFYTKVQIDPETIEAVSAMIHARFDEMMAEGAAELADLASRRTQLEGEQQKLLQAHYAGAIPLDLLKREQDRITASLETIEHRITAHHGHYAAARENLDDSLKLLSNAADIYEHADDANRRLINQALFKAIYIDEDNDVRVGYRNPYDGLSRSGLHADALSWAAEAKKMGQARTATKGGPLVASSHLTRLG

SEQ ID NO: 9049 - protein, 536 aa, synthetic construct
MKIADLYIRVSTDEQADKGYSQRDQHERLEKYCQQNEITIGQVIFEDHSAKNFNRPEWNNYIQNIKKRSLRSNLILFTKWDRFSRNAGDAYQMIKLLLSNNISPQAIEQPLDMSIPENKMMLAIYLAAPEVENDRRALNTFYGMRRAQKEGRLMGTASYGYINKCSEDGRKYIALKEPEASNMRWAFNEIAKGKYSINQIRLKMNTMAGTKISRTSFYRAIKNPLYCGKIYIKPYKDEDACTVDGKHESLISESLFNKVQMVLSGITTTERPKGKINAAKEFPLRGFLKCPRCGGHISGSGSKGKKSIYYYYHCNSTCGYRYRSNIINCAFEKELQKYEYHEGVNTLLKEIIFTNFKYIQEDIDAQKKEISSQIQSLNNRLNNAREKYLEDRLDYDDYQLIKNECKKKIDDLEISLQNHKLSNKNSDIKLKLDRVIKIVPNLYKLYVQGNDETKNTILCSILAEKLEFHENSFRTPKLNSALSHILLISNKLKDKKKGKSTFENAFSRKVTAEGFEPSLSEPKSEVLSIKLCSRIH

SEQ ID NO: 9050 - protein, 572 aa, synthetic construct
MGLIMQKPRLYSYVRFSSERQAKGQSLERQKSSIDSLVKKIAVEHNLEIFEEYQDFGVSAYKGNNATEGALSEFIQHVDSGKIPRGSYLLIESLDRFSRANAMRAVNMFTSLLLKGIVVITGIDNQIYKESEVNNDTLQQLMFSVMLFSRANEESATKSHRTVASALSKIKRHQQRQPGDPVVAIKELGQDKWWVDSSSGYVKPHPVYYPVAQKLIELKQKGYSNRLILAYLQENHPAPTEGRSRGKWNMQHASRIIEPAIHGQKVINVNGESFTLDDYYPAITTKDEYERLKFQIGNKSFAPLKEANPEIPLLSGIRILYCKHCGCHMFKMKSTVKNQPFAYRYVCSSRDSHRNCNKWGFRARTLELALLQLLADRVFVESAPVQSGVENLIADIDEQIANYMVAIGSAKSPAMINKLTEIIDQLESQKADYLKQKQIHDDQMVRMNTAGWDKFKQLDINDTQNVERLEIRASIKTVIKRIDCQQIDTAHNYFFVTYRDERTQKLVIKKDTAWTKGRVYIDSTTVTNEQLLESEGLVMHSHIDIMIDREKFIKEFEERTQHEPTLIDKLNE

SEQ ID NO: 9051 - protein, 599 aa, synthetic construct
MKKKLYSYIRWSSAQQTSGTSLERQTAAAAEYAKTHDLEFVEILDAGVSAFRGKNATDGALAEFIAAVENGAIPSDSWLYVENLDRLSRATVRNALKLLLHITDLGVTVVTGMDGKIYSAETMDKDFTDLMISLLLFSRANEESKTKSDRVKEASMKALARVQAGLPATIKGGGADPFWIQRGGRETSPTQHPAHWLAIKKIVELSLQGIGCNRIRQVLNDDPTLYPPPRQKDTPRRRALLDAGLAPTGWNIHRIEDARRQPSLYGLKTITLSGHTYNLEGYYPAVCSEEEFHLIQNISASNRLKSGDIRNTITLLSGLNLCKCGSCGGWVTTFRKNGKLTYRCDAGHRKIHHCPTTWSLNALIIESATVRALIAGVAHNIIEDSQDLESVAGEIDNRRAEVVEIDRKRERLAVRIAEEDDDLLMQQLRQYNARKRDLLAEIGTLTQREALRSEEHNAAERLAEAQRLLTGEMVADIYTAERLAVRELIRKSVRQVSIWKRQDKSLKLECEFISGWRYSFEGVMDGSLKSFIEYQTSPDGINMLEIYGKLNAITAKVFSRVLGADDCVLSPNLSHVQAYQDMAVRLGHSPLTGSQFFWK

SEQ ID NO: 9052 - protein, 457 aa, synthetic construct
MNEIKPSKLIRVGKYIRVSTDEQAKTGDSVRSQDDVLTNYINTHENMIEYDTYIDDGVSGQKLKRDDFIRLMNDVKNKNLDLIIFTKLDRWFRNLRHYLNTQETLDSTGVSWTAVTQPYFDTSTPYGRAFVNQSMMWAELEAQAGSVRILDVFESKVKYGEVLSGNAPRGYDIVDKHLVPNDDAEIIRDIFMYFFLNKSLHKTVMYIKETYGIFMTITNLKKSILQNKKYIGEFRNNKNYCPAIVDKDLFDNVQLILPNNIKSGVKRDYIFSSLLVCKDCGRKMAGCMQNIKKPSGKRYQYKSYRCPGAFVGKMCLNRKNIYESNIEKYLLENYMDLMEVARAAYQKKIAPVAKSVNKRDSIIKKIEKLKELYVNELITLDEYKIDKEKYLSQLEEIPEENIAIDRQSILETLQKYKGLDIKGIYENLNDVEKRNIWSGLIKEIQVDSNRDYTVVFF

SEQ ID NO: 9053 - protein, 550 aa, synthetic construct
MIKAAIYARYSSDNQREESIDAQIRAMREYASKNNISIIKIYADEAKSATTDNRPQFLQLIKDSKLGLFNVVMVHKLDRFARNRYDSAFYKHQLKMNGIRIISILENLDDSPESIILESVLEGMAEYYSANLAREVMKGMKETALQCKHTGGTPLLGYDVAQDKTYIINEYEKQAVQLIYTLYAQGFGYSYIIDELNKRGFKTKKGKAIGKTSIYEILRNEKYAGVYVFNKTNRQKMGMCIKKDKSPEEIIKIEGGMPQIIEKELWEEVQMKMDKMKHAPGTTSAKEIYLLTGLIFCGNCGGAMVGNRKHAGRNKDLYITYECSTRKRTKQCSAKSINRDYIENLVIEDLIANVLSPEAINSLSQKVYEYALKQQKEIMDDTKIFEKEIKEVQDQINNIVNAIASGMFHPSMKEKMDLLENRKSELTLYLNEAILQAEKYAPKVENIEEYLKKDFNLLDKNKTEIKEIINTYIKKVLVFEDKIEVQYIVDFTNGGGGSRTHVRKYFHKTFSECRTHFLFRIDLRLCPGLSLSYLRLYNLRSKSPLNRSLL

SEQ ID NO: 9054 - protein, 579 aa, synthetic construct
MSIALAYLRFSSLQMQGKGSSISRQKDMVTKWTEEQKLLMGKNYDEVSYYIDRGKSAYDGTNLREGNLGKLIEEVQRGMFPEGTPIVCESLDRLTRQGVQHIQQILTQLTRTGCVVHTLSDRQVISKDTLESLGGIVTIVAVADRAREESETKAKRVRDSKLRNYKAAREGKKLMTKHLPGWIYLNESTGKLCVDPEKQKVVTRIYKLRLEGHTFQSIANIMNDSGVPVLNASKGARHWLPNSIRTLLMNKSVIGYSSPSKVNPLIEEIPGYFPPCISETLFNDVQDTHVPAKRGKKTRPEYAEAVNLFKGLTVCKYCKGNVFPNGAKPGYWGRLRCMGHHNKTCEAPPIGRYAFEHSLVTRMFPLLRFFDTTKQEDPSAAIRSKIGHLQTGIDNLYNMVRDMGYTPEIGKRIKASENEKEGLERQLIAIKKNIESSTEENMSQLNFDNYNDRLTMQRILSRTIERVVVDSFNERAHVKLLNGNVLYGFPLYGDSDASLTLQKALSGTDDELFAELGMEKPLHTIYMVTSAKSQQPYDYNAVYYNKDLKQPYTVNQGESPHHPDDSKYWPDVEPDYPNE

SEQ ID NO: 9055 - protein, 615 aa, synthetic construct
MKKCFMYYRVSSDKQLGGTGIERQEENLRAYVKRLNLCNQMDVPLPIELSDPGVSAFKGLNMSEGNLGKWMKEVATGIHDGSALVIESIDRFSRQNPFTVMKYLSTLDEHDISIHDVSLGLVINRSNSSMLPIVAMSAQRAYEESKYKSTRISDGWQRKRITAFEKGTVVTNKRPLWIDVVDDYYVLNEKAEIVREIFRLYKTGIGCPTIAKILQAKGDEWRLASPKNRGGWRAESVYKVLTNKRVTGVIFITQIVRDFDKYDTDAVQKKYERNVYPEVISMEEFELVQKMLESRNPKNNQKTIGRVSQKNEDGAPLIKSNIFTSVFRCGKCHEGMYHNVVTRERFAKRVGETVTSEYRYIRCIAERDKLCDNKSLRYEVLEQFIIEHIKNLNFTQIIKSGELKPEIELLQMKIKEEQEHISDYEQGIEKLKSKGKKVPFDALVELEESQTNLKAMQERLNGIKDVSIDTEVLTEIDISKVFDVENIELRSRIEYEISKVIDRIELVTESNHYICTLYYKDVDVLKHVLIIQSGKKPKLASSVSISREVDETHYKTPSFELIVKDNEFTLTVLQNVIVFTDYALLLNYVDTLPGSKVLGVWMREHFNEVLANSVL

SEQ ID NO: 9056 - protein, 542 aa, synthetic construct
MNNRAVTYARVSGDDRVKDGRNLAGQLDICRDHALKKGYLIVAELSEDDRGASGASFELPALNQALEMAKNGEFDILVVREIDRFARSLAKQLIIEQEFRRHRVQIEYVMGEYPDTPEGSLNKNIKAVIAEYERLKINERMVRGRRQKIKAGNVIVHGKAPYGYRLEEVDGKSKLLVNEDEAQIVRIIYQWYVFGEDKKGPMSARVIARRLTQMGVPIPPLSNRNSTKWSRTTVGRIVSSKTYIGVWHYGKNGSSNGHRLSNPEDYWLSVEVPAIVDMDLWDAAQERKSINVAAAKKNLKYQYLMNRRLICGVCGSKIAACGSNDGYKNRLYYRCNVARGYDEYERKCDNARYFKAEDVDFTIWEWLKSFIRNPDAIDDGIAEYHEHREREQAPFLERLQVVDDLLVDHRNQLQKLLDIYLDGNFPKELLVERRQRLQDTVDSLAAERVNLISHLENSAHSPEQLQAIKETAFKVAAGLDEAEEDFDSRKYIVEMLNVYARLVIEEEEKIAYVTCVFKEEAERLLIVSPNTYRRKRQDNHSR

SEQ ID NO: 9057 - protein, 543 aa, synthetic construct
MSARCAIYARFSTDRQSETSAEDQVRECRRRAEQEGWQVVDIYTDLAITGASNRRPGMTAMLSAAAAGSFEIVLAEALDRIARDQADVATYYKRLTFAGVRIETLTEGAVNELHIGLKGTMGALFLKDLADKIRRGQRGALARGRIPGGLCYGYQVVRELGVDGQIEAGRRRIDPGQADVVRRIMTEYVAGRSPRAIAAGLNADGIRSARGGEWRASAIVGNRARQSGILHNPIYVGRFVYNRVTMKIDPESRNRVSRPNAAADREAIDLPELQIVTDELWQAVQDLRSRGSAQPLTHRRRPRHLLSGLVRCGVCGGNMTSISDTRLGCSRAREAGSCSHIARIQRAEVQARVVAGLDAELLAPEALSLLVREFHLERERRGRDTARARRAAASKLRSAQAAVDRLVAAIADGGGDFADLRQALGRKIEERDRARAELGEEEAVPVIALFPNIVERYRARVHTLVEHLSAGGESSDEIKADIRSLVEQVTVTPRASGGHDIQVIGSLEAAVALATNKRLPRRGSPLAISVVAEEGLEPPTRGL

SEQ ID NO: 9058 - protein, 579 aa, synthetic construct
MPAAVTYRADVKRAKGDPILAVVYARYSSHSQNEQSIEGQLAAAQQYAAQKGYTIIKEYCDRAVSGRTDNRDAFQQMLADTDKKSFDVIITWKVDRIGRNREDTAFNKHRCKKNGVKIEYVAESLPEGPEAIILESILEGMAEYYSVQLSTNVKRGIRESAKKGQFHGGTIPLGYNINKETKRFEINPETAPIVQEIFKRYSEGQTEFEIIAWLNEKGVKTSRKQPFGKSSLLTILHNEKYIGIYRYEDIVHDDAIPPIVDRPTFEKVQELMKVNQRAPSHKWSYMDFILTEKLFCGHCGEPMIGVSGVSHTGNKYGYYDCRKHRRKQCNKKPARKEWIENLVIRRTVQMLQDSELLEFIADKTYEFYASQQKAQTERKLLEKSLADINKAITNIMGAIEQGIYTATTKTRLDELEEKKADVAAQIAEYDLAASTLNLTRDHILFFLEQFRDADMNDEGCRKRLIQTFINSVFLYDDGRIKIVYNYTGENNAVTLQEVDGVETEIETGYEDPVDSANGADSGAKVLLPQDVAHHPPSEAEKLSRLFLLIAAYFFLVDPSRLTSNNVKGGAGGHANGQGP

SEQ ID NO: 9059 - protein, 487 aa, synthetic construct
MRGVIYARYSEGSRQTDQSIEGQVDDCTAYARAHDIDIIEVYADRHISGKSVDGRDEFQRMISDAGKHLFDCVIVWKIDRFGRNREDIAINKIRLRKAGVKLMYAKESIPDGPEGILLESLMEGLAEYYSADLRQKVIRGHCESAKKGQFTVGRLPIGYKKDQDQHIIIDEPKATAVREVYRRHIEGASTDELREILASYGVVSKNGTPPVKAVIFRMLRNEKYLGKFDFHGIPIPAPPIISQATFDAAAANFKTSRHNGAGRATVEYLLSCKCHCEACGTLMQGVSAAGKSGKIYRYYYCPKCHMRHTSTVLEDAVIDHTIDDVLTDQMISELSDRIMAIQKENAAHDEASVYRQQLDEVRKKESRIMQAIEDGGARTLSKRLAELEKQEDELTIKIEKAMLKRPIVPKEIVEGWLRSFRVGEDRKDPAFRKKLVHAFISDIIVAWDHVTIYYNITKEPHRSTSEMCSSTALIVDPQGLEPWTDRL

SEQ ID NO: 9060 - protein, 571 aa, synthetic construct
MYCRVSTIDKQDYQRQISDLKPEIFKHKFLESDIDEYSEKVSGYKKERPELNKLLTKIEENPSYYKCIYVTEISRIGRNPKHTREIVDRLTELRVPIFIKSIGQSTLDEKGNRNIIVSIILQVLMEFADLETQTFKERSRSGLKQSASIGRVGGGGNPPYGYTKGENKMMIVDDEEAEIVKQIYQLYSQNNGTKVISNILNEIGVPTRYNKKEKGKTLTINNIEKDVELIQWSDKQILDILKNTIYIGQRKFKDEIFDAPRIIENELFDKCKNIRENKTHRNYLTNYTYLFKDIIKCGCCGKNYFAKYKPVPNGDKVYVCSSRLKKGGNCGNGGVNISLIESTIYNELINSDSILKYLQSPNNLKTELQSEIQKLEQQLKIETKNQTNKNNELNRLLDLFLSSTNSNMQLYQQREEKLNNEIKLLTDKVALIRKELLNKKITLKKFDEKKASYQMLKDAKHNRTELALIYKQIISRVVVNVIDVKNAFITVYIQLNGKELDNPLKIILDLHGVKSKPKKFRYTPILSLSNEPKFNNGVLINLNKIGDEIIEKNEFMDWIHIHNKNVLMVEN

SEQ ID NO: 9061 - protein, 521 aa, synthetic construct
MKSCFGYVRVSTIKQGDGVSLQAQKDAIMAFASRNNINITKWFEEKETAAKKGRPIFNAMVSELKRGKARGVVIHKIDRFARNYTDWGKISDLADSGVEILTATESYDFNTYGGRMAADFQQVVAANYIRNLRDEIKKGQNGQLKNGLYPFGAPIGYLNAGGGKPKVPDPERGPLVRLAFELYSTGQYSYRPLLKELKRRGLRNKSGKSLSLCGLETLIKNPFYCGIIHIKRTGQTFNGIHEPLISVALFQRVQDVRTSRTSKQITRHNHTYRGLFRCGECGGAMVPELQKGHVYYRCKLMGCPTKTVREEVLEAEVTRCLEHIKLTKSDVALAARQIRKWMGEKRQTISDSAAQLRLANIRDRIDSLTDALIDKLIDKETFNLKKAKLALEEAQALEDQQRTVTLQQKADNLRTLAELVISLAQTYVFGKTDEKRHLVEMATSNRRVSGKNVYLEPASWVLEVQNAIAVLCCAEAPDKSRTFGDLNMLFEESELPTREQLCENNIASTTPEKLGRSHLRE

SEQ ID NO: 9062 - protein, 517 aa, synthetic construct
MKTKKKVGIWLRVSTDDQMHGDSLEVHQHRASLYAESKDWEVVETYRLEAVSGKRVIDHPEARRMIADVQAGHISGLIFSKLARLSRNNRELLEFADLFQKADADLVSLAESIDTSTPAGRMFYNMLAAMANWEREEIASRVAASVPIRAKLGKPLGGPAPYGYQWTDKKLIVDQDEAPIRVLIYTLFQKHKRKKTVARHLNDMGHRTRKGAKWSDTTIERLIRDTTAIGKKRANYSTQSNAATGAWELKPKEDWVYHDVEPLVSEELFNECVSYLDAQRRNGKRYTRQSVNLFMSYAHCGCGTKMFVPSQSKKYVCNNCKNRIPMDTLEECFLAEIAAAGITGHDVDLRKKRATQKIDELSLLIDTHKETIRKVDGDVDTLLDLYQKQALDEAGFKSRYDEKAVRKTELEEELPRLLARQDAIRQTILDAESAFEETKDILDRWNDLTKENKRLLIEAVLVRVDISEDEVEFTFLHEPTAASSLTPPNPPLSKVAARKQHKVTDSSPQPSAHAPGR

SEQ ID NO: 9063 - protein, 502 aa, synthetic construct
MEKNVTIIPQRSRDGAEIIPVAVYCRVSTKAERQGDSLENQIEHYTEAIGDDPRYELVEIYYDFGISGFKDTRPGFQRMMDDAEAGRFRQVITKAITRFARNTRTVLDSTRRLKELGIGVYFELQGIDTMSQEGELLMTLFAAFGQAESEGARMHTLMALKRKYDEGRPPRQLQRSMGYSKGEDGEFYPDEYAPLVLEMYEMAADGYTAGQITNYLNAEGITNHNGCAFHRASVTRLLRNPAYKGDFIAQRYYVNEDRKLVKNGGEKPMLYIEEDHIPIVTTELWEKAQTTLDAATHKVAPTASRPMDLNDENYPYRHQLFCAECGHRLQRAVRAGRVLWECSGKARFSQDFCAGVAVTDDEVQSWLPLADGGHYVSATIEKGKITGHAHEPEAEWKKTHGKKNRSAAGLAPELTEENYPYMNRVFCKYCGSRLRRIVSNAGKVTWLCDGLSRQGKKFCKGVRVPDEKLKPLAGLAGDFYIGKEKVNGTEGYGYSRKPDRRK

SEQ ID NO: 9064 - protein, 462 aa, synthetic construct
MARKVTVIPANPTGGSNVASGGGRKTRVAAYCRVSTDHEEQEGSFKNQVDYYTKLIEGKPDWELAGIFADDGISGTGTKKRDGFMGMIAACDEGRVDLVITKSISRFARNTQDSLNYSRKLKNLGIPIIFEKESINTMEASGELMFTILSSLAQEESRNISENTAWGIRSKFQRGIPHLNTEALLGFDKDADGNLVINEEQAATVRRVYRDFLEGWTPSEISRRLNAEGVPGVHGKANWHPCTIERMLQNEKHVGDLLMQKTYTSDFLTKAQAENNGDLEQYFIKDNHKGIIPREDWDAVQLELARREAFRQRHGIRTSGSSTDDRFYSRVFCAACGGKFIRKYWKGNRAVFWKCENAEKKKGHTCDAEIVREETLRSAVVIAWNGIVEHREEHLPEWNRQATEGDALQRYRARMLLAMTEEGPLDTEVPEITRMMLEEITVKGPSELTVRFLDGTEKNVKL

SEQ ID NO: 9065 - protein, 509 aa, synthetic construct
MKKAIAYMRFSSAVQEKGDSLRRQRKLIEDWLKENPDYELDTATYEDLGLSAYKGKHAQSGAFGEFLDALENGLIMPGTVLLVESLDRLSREKIGEATERLKDILKSGVDVITLSDKSHYSEASLDDPYALIKAILISQRANEESEIKSSRVKLSWQKKREDAELTGKIMTRACPRWLKVSSDYTRFEVIESKVKVIKKIFALRKSNKSLTAIAKYLNDRAIDNLSGQRGKWCPSVIEKLLSNKALIGICRPTHRGLAKGVKEIAEYYPRVLSEDEFYSVQEVRLSPFGFTSHSGNPYLINLLRTVMKCSHCGNTMIITSVSETIKGYYVCPMRRLHRCSSPAIRRELVDDILINEILFNIDRLQIESNQQSLQKILEKTCIDLQFQINQLVQALAIAPDVKTLADKVRELDGKLRKNETAMKVLRNKSRLDNKCNVKNLDLSAKEDREACRRLAFKAFKEINIDTLTQRCDIYFLTGLIFKNFPLGKSNCAENIISSLKYLDDNTVYF

SEQ ID NO: 9066 - protein, 497 aa, synthetic construct
MLDESLSLRDEGLSAYHQQHVKQGALGAFLKAVDEGRIPSGSVLIVEGLDRLSRAEPIQAQAQLAQIINAGITVVTASDGREYNRAGLKAQPMDLVYSLLVMIRAHEESDTKSKRVKASIRRLCEGWQAGTYRGLIRNGRDPQWLRWDGQAWQLIPERVEAVRYALELYKKGEGATRVVRKMEERGYVLSDWGLGGQQIYRLIKLPALRGAKRVSIDGEDFLLEGYYPPLLSDDEYYELQAVTDKRHGRRGASDIVGIVTGIGITWCGYCGTAVTAQNQISRAREDGTLNDGHRRLHCSSYSSSTGCKAASCSVVPVEKAVLAYCADQMNLTRLLEPTDDGQQVRQRLQACLRKQGEVERQLERVTEALLADDGGAAPLAFVRKARELEAELQQLHAEAERLELKQAVQGKVQTPAAAEQWAQLAADSQDIYSPAREQLRQLVLDTFSRIVVYMRGVVLDPKSKTIAVVLVSRAGQRVMLEVDRRSGFWQASRDRRG

SEQ ID NO: 9067 - protein, 509 aa, synthetic construct
MKKAIAYMRFSSAVQEKGDSLRRQRKLIDDWLSQNQEFTLDTTTYEDLGLSAFKGKHAQSGAFGEFIDAIDNGLIMPGTVLLVESLDRLSREKIGEATERLKYILKSGVDVITLSDSTHYSEESLDDPYALIKAILISQRANEESEIKSSRVKLSWQKKREDAELTGKIMTRACPRWLKVSADYSQFEVIESRVKVIKKIFALRKANKSLTAIAKYLNDKSVENLSGRRGEWCPSVIEKLLGNKALIGICMPTHRGRAKGVKEIPGYYPKVLSDEEFYSVQEVRLSPFGFTSHSDNPYLINLLRTVMKCRHCGNTMVITSVGETIKGYYVCPMRRLHRCTTPAVRRELVDAIIIDEILVNLDRLQIETNQMSYMSTLEKSCIDLRLQINQLVQALAIAPDVKTLANKIRDLDCQLRKNETAIKVLHNKARLDKGCDIKNLDLTLKEDRELCRRLAFKAFREINIDTLTQQCDIYFSNGLIFKNFPTGKKNHIENVISALKYIDKNTVYF

SEQ ID NO: 9068 - protein, 526 aa, synthetic construct
MEITAAFYGRFSTDRQRETSIADQERVCDVRATAIGFRIVVRHTDEGVSGSTPVAARPGGKQLLADALAGRFEVLLVEGLDRLSRDMVEQERVIRRLEHRGIRIVGVLDGYDSDSSARKLHRGMRGLINEVYLDDLRAKTHRGLAGQVSRGMHAGGLSFGYRTVPVEGGNRLEVNQEQAGWVRWIFEKYANHGWSVQRIAHELNRLKVPALRGGTWSVSVVYGHPQRGSGILNNTLYIGKYIWNRSQWMKDPDTGKRVRIDRPVEEWITQDLPELQIVSDEAWERAKERMTRTRAQGGPGRAPITRTLMSGVLKCGVCGGPIIAWNKVMYGCSIRKDRGRAVCTGVSVNRDKVDDLVLGIVRDEILTPEAIDELEQEVRRLMTAQRRESVQAQADVQRKIEASQAEIDRLIDAIAQVGISPALASRLQAAESELAVLQAPSQERQQPELKMRSMANIVARYRTMLENLDEILATDLDRAKELLREILGQPVIEKDAEGHVWVTLDKEKASMLSHEADSTFGCGGRI

SEQ ID NO: 9069 - protein, 552 aa, synthetic construct
MGTEDSNSITFPIRAYSYVRMSTRKQLRGDSLRRQLERSKAFADEHSLLLDDSLQDLGVSAWKGRNFKTGALGRFLAMVESGQIPKGSYLLIESLDRLSREAVPDALTLFMAIINAGIVIVTLGEDRQVYSRDRLNGDWTKLIIGLAVMSRGHEESQTKSERISAVAKRKRELAREGKGHITSITPGWIDAKRIDASRYEFTLNQHAETVKAIYEMATRGLGATVIARKLNADGVPAFKSKDGWYQSVIKALLTRQDVIGVFQPHRIVDGKRVPDGDPVADYFPAAIDKDLFLRVQAMRSNPGKPGRKGSTFANLFTGLCHCAHCGGPMTMKMSRVKGNENGRYLVCANYVRGHRCKDGNRHFRYEPLEAAILDHVTEINLAETLQAASFDDAVREFDQTIAGLSLQLEELRRKEQRLAQIIEDDSEPPEAVVDLLKIRQGERQAVEAELRQQQAERKHRLIRHESPTEACDRIGRLRAAWEKADDAARYDLRSEAHASIREIITEISFDSGDCSTMLIVENGIVVHRFTDCRASHRHKRWCAMPATITQAA

SEQ ID NO: 9070 - protein, 462 aa, synthetic construct
MKTALYIRVSTKEQAENGHSIAGQENRLRAFAEAKDLSNIEVYKDDGYSGASLNRPEMQRLIRDVKQGQISSILVYKLDRLSRSQKDTLHLIEEVFNRYEASLISISESFDTSTAFGRAMIGILSVFAQLERENIRERIMMGKEQNAKLGRWNGGGNTQGTIFGYRRKDKHWIIEPYEAEIVKEVYTLYLDGHGATKIRNIINQKFGDIFPDHTRVTAILKNSFYAGRIKHSNKEYEGEHEGIVSKDTFDMVQIFRDKRRVRTPKIKDSNFVLRGLIKCDWCGKNYTSRPSSKNRPGRYDYYSCFGRFAAAKYPERQKCMNKNHRADILHELVFTQLDKLRSEDLDFEKHFEDNDTIAVYKNKLKEITKQIERVTDLYIDGAIQIDILNARMEKLNKEKKAVEENLKNYEPKNDLAAKELNKLQTTDFRNISNAELSNMLNILIDRIVIDNNDIKIYYNFTL

SEQ ID NO: 9071 - protein, 475 aa, synthetic construct
MDDKASLRVFLYIRVSTIEQAKEGYSVGAQEERLRAYAKAKNYTVVKTFIDPAYSGSNMNRPALQEMIKQVELGATDLVLVYKLDRLSRSQKDTLYLIEDVFLKNSVDFVSMNESFDTSTPFGRAMIGILSVFAQLEREQIRERTMMGKEERAKEGKWHGGGGKSRTVKGYDYIDGQLVINEYEAECVKTIYEEYLRGNGTNKIFHLVLEKYPGVTNTETTVRNILTNPIYAGKIKHKNDFYEGEHTPIITLEQYEQAQNLMKKRASTSDPSRKKYLLTGLLYCGQCGARLFGRTGGKLKNGENVRYYSCYSRQKTRIHMIRDENCKKSHEQKDILEQHIIDEIKKINIGFVENYRLGDKSDVSIKIKRLKKEVQNIDNQISKLIDLYSLNKVPIEIMSKKIETLNDEKEKVTQHITELENENTPKNFEEIKKTVSQLATFDWDNEETDQKRLIVAKLINKIIVSNDNIIIDWAF

SEQ ID NO: 9072 - protein, 585 aa, synthetic construct
MKQGFMLSTNLTIGGKGGIIRIYITVCWLSEREVTMKRQPDKKIYLYGRLSHEDELQGDSNSIINQRKILTKYAEENGFTPYEFIYDDGFSGADFDRPAFSQMIEEVEAGNVSTIIVKDMSRFGRDYLKVGFFTEVLFSEKDVRLIAVNDNIDTQRGENDFAPMMNIFNEWFVRSTSKKIRAVWQAKGKSGERLAVIPPYGYRKDPDNPKQLAIDEESAALVRRIFRLSVEGYGPAQIARLFNGEHILNPSAYKYEHGIVKKARPCKDPYYWNTTTVHKILDAPEYLGQTINFKTWSKSYKDNRPRLNAAENQLVFENTHPAIIDPETWDIVRSMRQHKRRSPRYGKPGLFSGVAYCSDCGSKLYFHTRSIKNKWGTRLEGSYSCAEYRKDVQYQGKRKCTCHFIRESQLEQLVLEELRDLLRYIPKHEKQFARVVMDRSAQEYKRETAAKKRAAEKHRRRIAELDTLIERLYVDNVSGKITDERYEKMSGKFEAEQEELTKALASMETKIAAEESQAVNVDRFLSVVRRYTEIEELTPAIVHEFIDRIIVHEPEQARGDRRQKVEIIYNNIGAVDRLALKGLGA

SEQ ID NO: 9073 - protein, 547 aa, synthetic construct
MKIAIYSRKSKFTGKGESIENQIQMCKDYVNNNMKDRDITEFLVYEDEGFSGGNTNRPEFQRLMEDARAKKFEVLICYRLDRISRNVADFSTTLETLQKYDIDFISIKEQFDTSTPMGRAMIYIASVFAQLERETIAERVKDNMLELSKTGRWLGGVTPIGYESTPIIYYDHDMNEKKMFKLSQVPEELKVVKLIFDKYLEFKSLSKVETYLLQNDIKTKKGNDFNKSNLRVVLTNAVYVKATEDVMNYLEQEGMTTCGVPDGNHGLLSYNKSKTIINENGKITRKHRDKSDWIVSVSSQAGIIEDKEWLEVQRILLKNRDTFPNLGRTHNALLTGKLKCKKCDGLMGISHGHISKKTGDRIFYYACNLKKFSKGSRCDCKNAKVAEVDAAMKLQLKEFGLNQAKLLNKLSEQLKKAKENNSGANQEDNIKKAIVEKERQIESLLNKLSLDDDITELIVGKIKNLKTELSELKSQLSNINDMKNEQIENELNMSLIKMILDKCSIIDTLKDGEIKQLIDVFIEDIYWDDETSSIEVNIIGSKGSKKK

SEQ ID NO: 9074 - protein, 533 aa, synthetic construct
MKAAIYARKSKLTEKGDSIENQIKLCKDYLSHMSIEEIFIYKDEGFSGKNTDRPGFTQMIEDAKKQKFNILVCYKLDRISRNVADFSALTKDLEILSISFISVNEQFDTSSAMGRAMMYIASVFSQLERETISSRVRDNMYALAEAGKWLGGTPPTGYKTERLKLKDTTGKDRSFCILVPIPEELELVKLIYEKYLEVKSISKVEKYLICNDIKTKNNKNWSLASINSVLTAPVYVKADNKVTQYLKSIGIKVHGKPDGSHGILTYKKRKGKSGSNRVKDPCQWIASVSFHEGIIPADKWIKVQEIITLNKDKAPALGSSGEALLSGIIKCSNCGSPMRVAYGKKYVTSGRKKYYYMCTLKCKSGKIKCANSNINGADLDTLILEELKKITLDKNTLIEELKKYKHEIETATENLVIKKLNTSINKNEEMVDNLLNNLSLTKDIDTATILLNKISHLKTENKALRNKINKLEFQSTPEENALNNLEEIQKTFMDLSIFSSSASVSEKRKLLSSIIYKVYANGDTGKILIKFKE

SEQ ID NO: 9075 - protein, 527 aa, synthetic construct
MSYLMYLRKSRADKEAEARGEGETLARHEQLLTELAVKMGLEVGAIYKELVSGETISARPKMQQVLLEVMQGMWEGVLVMEVERLARGDTKDQGTVAEAFKFSNTKIVTPLKTYDPSDEFDEEYFEFNLFMSRREYKTINRRIQRGRIAAFRDGWYIAGTAPYGYEKVKHKGDKGYTLEIVPEEAKIVEYIYELYITGELKEDGCYAPFGSYQIRDRLNELQIPSRSERPWSASSIIDILSNPTYCGYQRWQWRKVQKQMIDGKIIETRPKDADCEKVRGRFTAIIPEEKYDLVQKIKSGKPLPVNTSTALQNPLSGLVYCFKCGTLMTRQPSNTRLRYAILRCPNSKCSNISSPLSLIEEQIIEGLKEWIPEYELDWPEETEKENETTLAVLENSLHNIDEKYTQTVKQLNKAFELLEQGVYSLDLFQERRKNLENQKKELQEELKLIKEERDRIAAREQARKDFIPAIKHLVEVYWEVDDIMIRNSMLRNVLDHVDYLKTERNKKGAGNTANFTLQFYPRIPESH

SEQ ID NO: 9076 - protein, 541 aa, synthetic construct
MPKAISYIGFSTKIQSVGDSTKRQSKYINDWLKRNPDYYLDESLRFQDLGISGFSGANAKSGAFGEFLAAVESGYIEAGSVLLVESLDRVSRQDIDTAGEQLRKILRSGVEVVTLVDNEWYTKESLKDSLSMIKAMLVMERAHEESAMKSTRLRSMWAAKRERAAKGEIMSKRCAAWLKVSEDRSHFEFIPENVKAVQRVFQLRLEGLSHIKIAKQMNDEGFYTLNQHKSVKGGWSQSSVTELLSNRSVIGFKVPSKSMAVKGVSEIPNYYPSIITDEQFYAVQQLKQGSGRKPSSDLPLLTNLFKGVLRCSECGFIVVVAGVSAKRSGIYKCSMKSEGRCNSVGFSRLQTDRALVQGLLYNTNRLSLNRDNGSAIGSLQSELEQLQKQRERLIKLAMLADDTESMAKDLKALNSQIKDAEKAVSEVHQREQSSQLETISHLDLTVKKDRIEAQIIIKRIVKEIRLNTAGKKCDVFLHNGLKLLNFPLDRVVDGAQWLEVLPLIDGDEFDFVEFTTKPRHIALEEAPDWVKEMDEQSNQPL

SEQ ID NO: 9077 - protein, 524 aa, synthetic construct
MLQQNNNLSPLKAALYVRLSREDRDKIRKEDDSESIINQQNMLINYCKDNQIEIYNIYNDEDYSGSDRERPAFNRMIQDAESRKFNMVLCKTQSRFARDMELVEKYVNGLFPIWGIRFVGVVDNADSTNKYNRKQRQITSLVDQWYLEDLSENVKATLASKRKQGLWVGAFAPYGYIKDPDNKNHLIVDEEAAEVVKYIFDLYLQGYGITPIARKLNEQGIPNPATYKQQHGQPFQNAHKECSDIWHTYSIGRMLSNLVYRGCVVQGMSENISYKSTKKRQKPKEEWDIVEGTHEPIIDQCTWDKVQRLRASKPKACNMGEPNIFAGKVKCLNCGSSMRIYYTHHERYFRCSTHYFASDRCSGTFVSEKVLQREVLKQIRLLYQQYVDEAYISDNLNIENGYEEKIETLKSRIKTAEQSIEKLNKRFKNLYLDKLDELISKEDFLMLSEDCKTNKQALEQDIADYQKELAYITAQIENTSFQFDIIRQFKDIQELDSLTVNTLIDYIEVGGNKNRRIINIHWNL

SEQ ID NO: 9078 - protein, 481 aa, synthetic construct
MNTDLKTAAAYIRVSTDSQTELSPDSQIKVVREYARKNGYIIPNEFIFRDDGISGRHADKRPEFNRMIAIAKQKPSPFCAVLLWKFSRFARNQEESIFYKSMLRKNGVEVLSISEPMIDGPFGTLIERIIEWSDEYYSIRLSGEVKRGMTEKVERGLPVSIPSFGYSIENKQYVINPETAPIVKKIFADYLNGVPVVTIARQLNDMKIRTTRGGLWENRTVEYILYNPVYIGKIRWNPKRRTRRNYSDKDIMIVDGSHEPIIDTDTFEKVQERLAEQKRAYKRYIKSNITEEYMLHGLVKCSSCGSSLSMCQRGVGLQCVKYTRGQCKTSHYISIKKMNALVISAIEVAFATESIELTVKSAESNESSGLTEIEINALIDKENLKYSRIREAYENGIYNLDELTEAKKQTDDNIKQLKKLLKPEKTTEQIKKQFIHDKQDIISLLKTDNISEGEKNQILRSFIDKIVFNRSDCTVRIFYFI
